(19) United States
(12) Patent Application Publication
(10) Pub. No.: US 2008/0274467 A1
(43) Pub. Date: Nov. 6, 2008

(54) Novel Therapeutic Targets in Cancer

(75) Inventors: David W. Morris, Davis, CA (US); Marc S. Malandro, Gibsonia, PA (US)

Correspondence Address: NOVARTIS VACCINES AND DIAGNOSTICS, INC.;CORPORATE INTELLECTUAL PROPERTY-R338, P.O. BOX 8097, EMERYVILLE, CA, 94662-8097, US

(73) Assignee: Sagres Discovery, Inc., a Delaware corporation

(21) Appl. No.: 12/034,498

(22) Filed: Feb. 20, 2008

Related U.S. Application Data
(62) Division of application No. 10/674,575, filed on Sep. 29, 2003, now abandoned.

(51) Int. Cl. C12Q 1/68; C12Q 1/02

(52) U.S. Cl. 435/6; 435/29

(57) ABSTRACT

The present invention relates to novel sequences for use in detection, diagnosis and treatment of cancers, especially lymphomas. The invention provides cancer-associated (CA) polynucleotide sequences whose expression is associated with cancer. The present invention provides CA polypeptides associated with cancer that are present on the cell surface and present novel therapeutic targets against cancer. The present invention further provides diagnostic compositions and methods for the detection of cancer. The present invention provides monoclonal and polyclonal antibodies specific for the CA polypeptides. The present invention also provides diagnostic tools and therapeutic compositions and methods for screening, prevention and treatment of cancer.

### CROSS-REFERENCE TO RELATED APPLICATIONS

[0001] This application is related to the following U.S. Applications: U.S. Ser. No. 10/034,650, filed Dec. 20, 2001; U.S. Ser. No. 10/035,832, filed Dec. 26, 2001; U.S. Ser. No. 10/004,113, filed Oct. 23, 2001; U.S. Ser. No. 09/997,722, filed Nov. 30, 2001; U.S. Ser. No. 10/085,117, filed Feb. 27, 2002; U.S. Ser. No. 10/087,192, filed Mar. 1, 2002; U.S. Ser. No. 10/322,281, filed Dec. 17, 2002; U.S. Ser. No. 10/322,696, filed Dec. 17, 2002, U.S. Ser. No. 10/331,053, filed Dec. 26, 2002; U.S. Ser. No. 10/330,773, filed Dec. 27, 2002; U.S. Ser. No. 10/367,094, filed Feb. 14, 2003; U.S. Ser. No. 10/388,838, filed Mar. 14, 2003, U.S. Ser. No. 10/417,375 filed Apr. 15, 2003, U.S. Ser. No. 10/461,862, filed Jun. 13, 2003, U.S. application Ser. No. 10/663,431 filed Sep. 15, 2003, U.S. application Ser. No. Unknown (Attorney Docket 529452001900) filed Sep. 23, 2003, and U.S. Serial No. Unknown (Attorney Docket 529452002700) filed Sep. 24, 2003, all of which are expressly incorporated herein by reference in their entirety.

### DESCRIPTION OF ACCOMPANYING CD-ROMs

[0002] Tables 1-152 are filed herewith in CD-ROM in accordance with 37 C.F.R. §§ 1.52 and 1.58. Two identical copies (marked “Copy 1” and “Copy 2”) of this CD-ROM are submitted.

[0003] Contents of the CD-ROM disks submitted herewith are hereby incorporated by reference into the Specification.

### TECHNICAL FIELD OF THE INVENTION

[0004] This invention relates generally to the field of cancer-associated genes. Specifically, it relates to novel sequences for use in diagnosis and treatment of cancer and tumors, as well as the use of the novel compositions in screening methods. The present invention provides methods of using cancer associated polynucleotides, their corresponding gene products and antibodies specific for the gene products in the detection, diagnosis, prevention and/or treatment of associated cancers.

### BACKGROUND OF THE INVENTION

[0005] Oncogenes are genes that can cause cancer. Carcinogenesis can occur by a wide variety of mechanisms, including infection of cells by viruses containing oncogenes, activation of protooncogenes in the host genome, and mutations of protooncogenes and tumor suppressor genes. Carcinogenesis is fundamentally driven by somatic cell evolution (i.e. mutation and natural selection of variants with progressive loss of growth control). The genes that serve as targets for these somatic mutations are classified as either protooncogenes or tumor suppressor genes, depending on whether their mutant phenotypes are dominant or recessive, respectively.

[0006] There are a number of viruses known to be involved in human cancer as well as in animal cancer. Of particular interest here are viruses that do not contain oncogenes themselves; these are slow-transforming retroviruses. They induce tumors by integrating into the host genome and affecting neighboring protooncogenes in a variety of ways. Provirus insertion mutation is a normal consequence of the retroviral life cycle. In infected cells, a DNA copy of the retrovirus genome (called a provirus) is integrated into the host genome. A newly integrated provirus can affect gene expression in cis at or near the integration site by one of two mechanisms. Type I insertion mutations up-regulate transcription of proximal genes as a consequence of regulatory sequences (enhancers and/or promoters) within the proviral long terminal repeats (LTRs). Type II insertion mutations cause truncation of coding regions due to either integration directly within an open reading frame or integration within an intron flanked on both sides by coding sequences. The analysis of sequences at or near the insertion sites has led to the identification of a number of new protooncogenes.

[0007] With respect to lymphoma and leukemia, retroviruses such as AKV murine leukemia virus (MLV) or SL3-3 MLV, are potent inducers of tumors when inoculated into susceptible newborn mice, or when carried in the germline. A number of sequences have been identified as relevant in the induction of lymphoma and leukemia by analyzing the insertion sites; see Sorensen et al., J. of Virology 74:2161 (2000); Hansen et al., Genome Res. 10(2):237-43 (2000); Sorensen et al., J. Virology 70:4063 (1996); Sorensen et al., J. Virology 67:7118 (1993); Joosten et al., Virology 268:308 (2000); and Li et al., Nature Genetics 23:348 (1999); all of which are expressly incorporated by reference herein. With respect to cancers, especially breast cancer, prostate cancer and cancers with epithelial origin, the mammalian retrovirus, mouse mammary tumor virus (MMTV) is a potent inducer of tumors when inoculated into susceptible newborn mice, or when carried in the germ line. Mammary Tumors in the Mouse, edited by J. Hilgers and M. Sluyser; Elsevier/North-Holland Biomedical Press; New York, N.Y.

[0008] The pattern of gene expression in a particular living cell is characteristic of its current state. Nearly all differences in the state or type of a cell are reflected in the differences in RNA levels of one or more genes. Comparing expression patterns of uncharacterized genes may provide clues to their function. High throughput analysis of expression of hundreds or thousands of genes can help in (a) identification of complex genetic diseases, (b) analysis of differential gene expression over time, between tissues and disease states, and (c) drug discovery and toxicology studies. Increase or decrease in the levels of expression of certain genes correlate with cancer biology. For example, oncogenes are positive regulators of tumorigenesis, while tumor suppressor genes are negative regulators of tumorigenesis. (Marshall, Cell, 64: 313-326 (1991); Weinberg, Science, 254: 1138-1146 (1991)).

[0009] Accordingly, it is an object of the invention to provide polynucleotide and polypeptide sequences involved in cancer and, in particular, in oncogenesis.

[0010] Immunotherapy, or the use of antibodies for therapeutic purposes has been used in recent years to treat cancer. Passive immunotherapy involves the use of monoclonal antibodies in cancer treatments. See for example, Cancer: Principles and Practice of Oncology, 6^{th} Edition (2001) Chapt. 20 pp. 495-508. Inherent therapeutic biological activity of these antibodies include direct inhibition of tumor cell growth or survival, and the ability to recruit the natural cell killing activity of the body's immune system. These agents are administered alone or in conjunction with radiation or chemotherapeutic agents. Rituxan® and Herceptin®, approved for treatment of lymphoma and breast cancer, respectively, are two examples of such therapeutics. Alternatively, antibodies are used to make antibody conjugates where the antibody is linked to a toxic agent and directs that agent to the tumor by specifically binding to the tumor. Mylotarg® is an example of an approved antibody conjugate used for the treatment of leukemia.

[0011] Accordingly, it is another object of this invention to provide antigens (cancer-associated polypeptides) associated with a variety of cancers as targets for diagnostic and/or therapeutic antibodies. These antigens are also useful for drug discovery (e.g., small molecules) and for further characterization of cellular regulation, growth, and differentiation.

### SUMMARY OF THE INVENTION

[0012] In accordance with the objects outlined above, the present invention provides methods for screening for compositions that modulate cancer, especially lymphoma and leukemia. The present invention also provides methods for screening for compositions which modulate carcinomas, especially mammary adenocarcinomas. Also provided herein are methods of inhibiting proliferation of a cell, preferably a lymphoma cell or a breast cancer cell. Methods of treatment of cancer, including diagnosis, are also provided herein.

[0013] In one aspect, a method of screening drug candidates comprises providing a cell that expresses a cancer-associated (CA) gene or fragments thereof. Preferred embodiments of CA genes are genes that are differentially expressed in cancer cells, preferably lymphatic, breast, prostate or epithelial cells, compared to other cells. Preferred embodiments of CA genes used in the methods herein include, but are not limited to the nucleic acids selected from Tables 1-152 (human genomic sequences of SEQ ID NOS: 6, 12, 24, 38, 46, 56, 64, 78, 90, 99, 111, 131, 139, 147, 155, 177, 187, 201, 207, 217, 234, 249, 271, 292, 300, 310, 322, 328, 336, 350, 374, 394, 407, 419, 437, 455, 465, 485, 498, 506, 518, 526, 534, 542, 550, 556, 564, 572, 588, 602, 610, 618, 632, 644, 654, 660, 668, 674, 686, 700, 712, 720, 732, 749, 763, 775, 785, 795, 813, 819, 829, 837, 851, 859, 869, 887, 905, 919, 927, 937, 951, 961, 971, 983, 995, 1005, 1019, 1029, 1035, 1047, 1053, 1059, 1067, 1079, 1087, 1093, 1101, 1117, 1125, 1131, 1153, 1159, 1171, 1183, 1195, 1205, 1213, 1237, 1265, 1277, 1283, 1295, 1305, 1315, 1328, 1354, 1362, 1376, 1386, 1398, 1408, 1418, 1424, 1434, 1446, 1456, 1468, 1480, 1486, 1495, 1505, 1515, 1525, 1535, 1549, 1559, 1571, 1587, 1607, 1617, 1629, 1647, 1655, 1663, 1685, 1701, 1711, 1719, and 1735, and sequences of SEQ ID NOS: 7, 13, 15, 17, 19, 25, 27, 29, 31, 33, 39, 41, 47, 49, 57, 59, 65, 67, 69, 71, 73, 79, 81, 83, 85, 91, 100, 102, 104, 106, 112, 114, 116, 118, 120, 122, 124, 126, 132, 134, 140, 142, 148, 156, 158, 160, 162, 178, 180, 182, 188, 190, 192, 194, 196, 202, 208, 210, 212, 218, 220, 222, 224, 235, 237, 239, 241, 243, 245, 247, 250, 252, 254, 256, 258, 260, 262, 272, 274, 276, 293, 295, 301, 303, 311, 313, 315, 317, 323, 329, 331, 337, 351, 353, 355, 357, 359, 361, 363, 365, 367, 369, 375, 377, 379, 381, 383, 385, 387, 395, 397, 408, 410, 412, 414, 420, 422, 424, 426, 428, 430, 438, 440, 442, 444, 446, 448, 450, 456, 458, 466, 468, 470, 472, 474, 476, 478, 486, 488, 490, 499, 501, 507, 509, 519, 527, 529, 535, 537, 543, 545, 551, 557, 559, 565, 567, 573, 575, 577, 579, 581, 583, 589, 591, 593, 595, 603, 605, 611, 613, 619, 621, 623, 625, 627, 633, 635, 637, 639, 645, 647, 649, 655, 661, 663, 669, 675, 677, 679, 687, 689, 691, 693, 695, 701, 703, 705, 707, 713, 715, 721, 733, 735, 750, 752, 754, 756, 758, 764, 766, 768, 770, 776, 786, 788, 790, 796, 798, 800, 802, 804, 806, 808, 814, 820, 822, 830, 832, 838, 840, 842, 844, 846, 852, 854, 860, 862, 870, 872, 874, 876, 878, 880, 888, 890, 892, 894, 896, 898, 900, 906, 908, 910, 912, 920, 922, 928, 938, 940, 942, 944, 946, 952, 954, 956, 962, 964, 966, 972, 974, 976, 978, 984, 986, 988, 990, 996, 998, 1000, 1006, 1008, 1010, 1012, 1014, 1020, 1022, 1024, 1030, 1036, 1038, 1040, 1042, 1048, 1054, 1060, 1062, 1068, 1070, 1072, 1074, 1080, 1082, 1088, 1094, 1096, 1102, 1104, 1106, 1108, 1110, 1112, 1118, 1120, 1126, 1132, 1134, 1136, 1138, 1140, 1142, 1144, 1146, 1148, 1154, 1160, 1162, 1164, 1172, 1184, 1186, 1188, 1190, 1196, 1198, 1200, 1206, 1208, 1214, 1216, 1218, 1220, 1222, 1238, 1240, 1242, 1244, 1246, 1248, 1250, 1252, 1254, 1256, 1258, 1266, 1268, 1270, 1278, 1284, 1286, 1288, 1290, 1296, 1298, 1300, 1306, 1316, 1318, 1329, 1331, 1333, 1335, 1337, 1339, 1341, 1343, 1345, 1347, 1355, 1357, 1363, 1365, 1367, 1369, 1371, 1377, 1379, 1381, 1387, 1389, 1391, 1393, 1399, 1401, 1403, 1409, 1419, 1425, 1427, 1435, 1437, 1439, 1441, 1447, 1457, 1459, 1461, 1469, 1471, 1473, 1475, 1481, 1487, 1496, 1498, 1500, 1506, 1508, 1510, 1516, 1518, 1520, 1526, 1528, 1536, 1538, 1550, 1552, 1554, 1560, 1562, 1564, 1572, 1574, 1576, 1588, 1590, 1592, 1594, 1608, 1610, 1612, 1618, 1620, 1622, 1624, 1630, 1632, 1634, 1636, 1638, 1648, 1650, 1656, 1664, 1666, 1668, 1670, 1672, 1674, 1676, 1678, 1686, 1688, 1690, 1702, 1704, 1706, 1712, 1714, 1720, 1722, 1724, 1726, 1728, 1730, 1736, 1738, and 1740 corresponding to the human mRNAs generated therefrom). The methods further include adding a drug candidate to the cell and determining the effect of the drug candidate on the expression of the CA gene.

[0014] In one embodiment, the method of screening drug candidates includes comparing the level of expression in the absence of the drug candidate to the level of expression in the presence of the drug candidate.

[0015] Also provided herein is a method of screening for a bioactive agent capable of binding to a CA protein (CAP), the method comprising combining the CAP and a candidate bioactive agent, and determining the binding of the candidate agent to the CAP.

[0016] Further provided herein is a method for screening for a bioactive agent capable of modulating the activity of a CAP. In one embodiment, the method comprises combining the CAP and a candidate bioactive agent, and determining the effect of the candidate agent on the bioactivity of the CAP.

[0017] Also provided is a method of evaluating the effect of a candidate cancer drug comprising administering the drug to a patient and removing a cell sample from the patient. The expression profile of the cell is then determined. This method may further comprise comparing the expression profile of the patient to an expression profile of a healthy individual.

[0018] In a further aspect, a method for inhibiting the activity of a CA protein is provided. In one embodiment, the method comprises administering to a patient an inhibitor of a CA protein preferably selected from the group consisting of the sequences outlined in Tables 1-152 (SEQ ID NOS: 8, 14, 16, 18, 20, 26, 28, 30, 32, 34, 40, 42, 48, 50, 58, 60, 66, 68, 70, 72, 74, 80, 82, 84, 86, 92, 101, 103, 105, 107, 113, 115, 117, 119, 121, 123, 125, 127, 133, 135, 141, 143, 149, 157, 159, 161, 163, 179, 181, 183, 189, 191, 193, 195, 197, 203, 209, 211, 213, 219, 221, 223, 225, 236, 238, 240, 242, 244, 246, 248, 251, 253, 255, 257, 259, 261, 263, 273, 275, 277, 294, 296, 302, 304, 312, 314, 316, 318, 324, 330, 332, 338, 352, 354, 356, 358, 360, 362, 364, 366, 368, 370, 376, 378, 380, 382, 384, 386, 388, 396, 398, 409, 411, 413, 415, 421, 423, 425, 427, 429, 431, 439, 441, 443, 445, 447, 449, 451, 457, 459, 467, 469, 471, 473, 475, 477, 479, 487, 489, 491, 500, 502, 508, 510, 520, 528, 530, 536, 538, 544, 546, 552, 558, 560, 566, 568, 574, 576, 578, 580, 582, 584, 590, 592, 594, 596, 604, 606, 612, 614, 620, 622, 624, 626, 628, 634, 636, 638, 640, 646, 648, 650, 656, 662, 664, 670, 676, 678, 680, 688, 690, 692, 694, 696, 702, 704, 706, 708, 714, 716, 722, 734, 736, 751, 753, 755, 757, 759, 765, 767, 769, 771, 777, 787, 789, 791, 797, 799, 801, 803, 805, 807, 809, 815, 821, 823, 831, 833, 839, 841, 843, 845, 847, 853, 855, 861, 863, 871, 873, 875, 877, 879, 881, 889, 891, 893, 895, 897, 899, 901, 907, 909, 911, 913, 921, 923, 929, 939, 941, 943, 945, 947, 953, 955, 957, 963, 965, 967, 973, 975, 977, 979, 985, 987, 989, 991, 997, 999, 1001, 1007, 1009, 1011, 1013, 1015, 1021, 1023, 1025, 1031, 1037, 1039, 1041, 1043, 1049, 1055, 1061, 1063, 1069, 1071, 1073, 1075, 1081, 1083, 1089, 1095, 1097, 1103, 1105, 1107, 1109, 1111, 1113, 1119, 1121, 1127, 1133, 1135, 1137, 1139, 1141, 1143, 1145, 1147, 1149, 1155, 1161, 1163, 1165, 1173, 1185, 1187, 1189, 1191, 1197, 1199, 1201, 1207, 1209, 1215, 1217, 1219, 1221, 1223, 1239, 1241, 1243, 1245, 1247, 1249, 1251, 1253, 1255, 1257, 1259, 1267, 1269, 1271, 1279, 1285, 1287, 1289, 1291, 1297, 1299, 1301, 1307, 1317, 1319, 1330, 1332, 1334, 1336, 1338, 1340, 1342, 1344, 1346, 1348, 1356, 1358, 1364, 1366, 1368, 1370, 1372, 1378, 1380, 1382, 1388, 1390, 1392, 1394, 1400, 1402, 1404, 1410, 1420, 1426, 1428, 1436, 1438, 1440, 1442, 1448, 1458, 1460, 1462, 1470, 1472, 1474, 1476, 1482, 1488, 1497, 1499, 1501, 1507, 1509, 1511, 1517, 1519, 1521, 1527, 1529, 1537, 1539, 1551, 1553, 1555, 1561, 1563, 1565, 1573, 1575, 1577, 1589, 1591, 1593, 1595, 1609, 1611, 1613, 1619, 1621, 1623, 1625, 1631, 1633, 1635, 1637, 1639, 1649, 1651, 1657, 1665, 1667, 1669, 1671, 1673, 1675, 1677, 1679, 1687, 1689, 1691, 1703, 1705, 1707, 1713, 1715, 1721, 1723, 1725, 1727, 1729, 1731, 1737, 1739, and 1741).

[0019] A method of neutralizing the effect of a CA protein, preferably a protein encoded by a nucleic acid selected from the group of sequences outlined in Tables 1-152 (human genomic sequences of SEQ ID NOS: 6, 12, 24, 38, 46, 56, 64, 78, 90, 99, 111, 131, 139, 147, 155, 177, 187, 201, 207, 217, 234, 249, 271, 292, 300, 310, 322, 328, 336, 350, 374, 394, 407, 419, 437, 455, 465, 485, 498, 506, 518, 526, 534, 542, 550, 556, 564, 572, 588, 602, 610, 618, 632, 644, 654, 660, 668, 674, 686, 700, 712, 720, 732, 749, 763, 775, 785, 795, 813, 819, 829, 837, 851, 859, 869, 887, 905, 919, 927, 937, 951, 961, 971, 983, 995, 1005, 1019, 1029, 1035, 1047, 1053, 1059, 1067, 1079, 1087, 1093, 1101, 1117, 1125, 1131, 1153, 1159, 1171, 1183, 1195, 1205, 1213, 1237, 1265, 1277, 1283, 1295, 1305, 1315, 1328, 1354, 1362, 1376, 1386, 1398, 1408, 1418, 1424, 1434, 1446, 1456, 1468, 1480, 1486, 1495, 1505, 1515, 1525, 1535, 1549, 1559, 1571, 1587, 1607, 1617, 1629, 1647, 1655, 1663, 1685, 1701, 1711, 1719, and 1735, and sequences of SEQ ID NOS: 7, 13, 15, 17, 19, 25, 27, 29, 31, 33, 39, 41, 47, 49, 57, 59, 65, 67, 69, 71, 73, 79, 81, 83, 85, 91, 100, 102, 104, 106, 112, 114, 116, 118, 120, 122, 124, 126, 132, 134, 140, 142, 148, 156, 158, 160, 162, 178, 180, 182, 188, 190, 192, 194, 196, 202, 208, 210, 212, 218, 220, 222, 224, 235, 237, 239, 241, 243, 245, 247, 250, 252, 254, 256, 258, 260, 262, 272, 274, 276, 293, 295, 301, 303, 311, 313, 315, 317, 323, 329, 331, 337, 351, 353, 355, 357, 359, 361, 363, 365, 367, 369, 375, 377, 379, 381, 383, 385, 387, 395, 397, 408, 410, 412, 414, 420, 422, 424, 426, 428, 430, 438, 440, 442, 444, 446, 448, 450, 456, 458, 466, 468, 470, 472, 474, 476, 478, 486, 488, 490, 499, 501, 507, 509, 519, 527, 529, 535, 537, 543, 545, 551, 557, 559, 565, 567, 573, 575, 577, 579, 581, 583, 589, 591, 593, 595, 603, 605, 611, 613, 619, 621, 623, 625, 627, 633, 635, 637, 639, 645, 647, 649, 655, 661, 663, 669, 675, 677, 679, 687, 689, 691, 693, 695, 701, 703, 705, 707, 713, 715, 721, 733, 735, 750, 752, 754, 756, 758, 764, 766, 768, 770, 776, 786, 788, 790, 796, 798, 800, 802, 804, 806, 808, 814, 820, 822, 830, 832, 838, 840, 842, 844, 846, 852, 854, 860, 862, 870, 872, 874, 876, 878, 880, 888, 890, 892, 894, 896, 898, 900, 906, 908, 910, 912, 920, 922, 928, 938, 940, 942, 944, 946, 952, 954, 956, 962, 964, 966, 972, 974, 976, 978, 984, 986, 988, 990, 996, 998, 1000, 1006, 1008, 1010, 1012, 1014, 1020, 1022, 1024, 1030, 1036, 1038, 1040, 1042, 1048, 1054, 1060, 1062, 1068, 1070, 1072, 1074, 1080, 1082, 1088, 1094, 1096, 1102, 1104, 1106, 1108, 1110, 1112, 1118, 1120, 1126, 1132, 1134, 1136, 1138, 1140, 1142, 1144, 1146, 1148, 1154, 1160, 1162, 1164, 1172, 1184, 1186, 1188, 1190, 1196, 1198, 1200, 1206, 1208, 1214, 1216, 1218, 1220, 1222, 1238, 1240, 1242, 1244, 1246, 1248, 1250, 1252, 1254, 1256, 1258, 1266, 1268, 1270, 1278, 1284, 1286, 1288, 1290, 1296, 1298, 1300, 1306, 1316, 1318, 1329, 1331, 1333, 1335, 1337, 1339, 1341, 1343, 1345, 1347, 1355, 1357, 1363, 1365, 1367, 1369, 1371, 1377, 1379, 1381, 1387, 1389, 1391, 1393, 1399, 1401, 1403, 1409, 1419, 1425, 1427, 1435, 1437, 1439, 1441, 1447, 1457, 1459, 1461, 1469, 1471, 1473, 1475, 1481, 1487, 1496, 1498, 1500, 1506, 1508, 1510, 1516, 1518, 1520, 1526, 1528, 1536, 1538, 1550, 1552, 1554, 1560, 1562, 1564, 1572, 1574, 1576, 1588, 1590, 1592, 1594, 1608, 1610, 1612, 1618, 1620, 1622, 1624, 1630, 1632, 1634, 1636, 1638, 1648, 1650, 1656, 1664, 1666, 1668, 1670, 1672, 1674, 1676, 1678, 1686, 1688, 1690, 1702, 1704, 1706, 1712, 1714, 1720, 1722, 1724, 1726, 1728, 1730, 1736, 1738, and 1740 corresponding to the human mRNAs generated therefrom), is also provided. Preferably, the method comprises contacting an agent specific for said protein with said protein in an amount sufficient to effect neutralization.

[0020] Moreover, provided herein is a biochip comprising a nucleic acid segment which encodes a CA protein, preferably selected from the sequences outlined in Tables 1-152 (SEQ ID NOS: 7, 13, 15, 17, 19, 25, 27, 29, 31, 33, 39, 41, 47, 49, 57, 59, 65, 67, 69, 71, 73, 79, 81, 83, 85, 91, 100, 102, 104, 106, 112, 114, 116, 118, 120, 122, 124, 126, 132, 134, 140, 142, 148, 156, 158, 160, 162, 178, 180, 182, 188, 190, 192, 194, 196, 202, 208, 210, 212, 218, 220, 222, 224, 235, 237, 239, 241, 243, 245, 247, 250, 252, 254, 256, 258, 260, 262, 272, 274, 276, 293, 295, 301, 303, 311, 313, 315, 317, 323, 329, 331, 337, 351, 353, 355, 357, 359, 361, 363, 365, 367, 369, 375, 377, 379, 381, 383, 385, 387, 395, 397, 408, 410, 412, 414, 420, 422, 424, 426, 428, 430, 438, 440, 442, 444, 446, 448, 450, 456, 458, 466, 468, 470, 472, 474, 476, 478, 486, 488, 490, 499, 501, 507, 509, 519, 527, 529, 535, 537, 543, 545, 551, 557, 559, 565, 567, 573, 575, 577, 579, 581, 583, 589, 591, 593, 595, 603, 605, 611, 613, 619, 621, 623, 625, 627, 633, 635, 637, 639, 645, 647, 649, 655, 661, 663, 669, 675, 677, 679, 687, 689, 691, 693, 695, 701, 703, 705, 707, 713, 715, 721, 733, 735, 750, 752, 754, 756, 758, 764, 766, 768, 770, 776, 786, 788, 790, 796, 798, 800, 802, 804, 806, 808, 814, 820, 822, 830, 832, 838, 840, 842, 844, 846, 852, 854, 860, 862, 870, 872, 874, 876, 878, 880, 888, 890, 892, 894, 896, 898, 900, 906, 908, 910, 912, 920, 922, 928, 938, 940, 942, 944, 946, 952, 954, 956, 962, 964, 966, 972, 974, 976, 978, 984, 986, 988, 990, 996, 998, 1000, 1006, 1008, 1010, 1012, 1014, 1020, 1022, 1024, 1030, 1036, 1038, 1040, 1042, 1048, 1054, 1060, 1062, 1068, 1070, 1072, 1074, 1080, 1082, 1088, 1094, 1096, 1102, 1104, 1106, 1108, 1110, 1112, 1118, 1120, 1126, 1132, 1134, 1136, 1138, 1140, 1142, 1144, 1146, 1148, 1154, 1160, 1162, 1164, 1172, 1184, 1186, 1188, 1190, 1196, 1198, 1200, 1206, 1208, 1214, 1216, 1218, 1220, 1222, 1238, 1240, 1242, 1244, 1246, 1248, 1250, 1252, 1254, 1256, 1258, 1266, 1268, 1270, 1278, 1284, 1286, 1288, 1290, 1296, 1298, 1300, 1306, 1316, 1318, 1329, 1331, 1333, 1335, 1337, 1339, 1341, 1343, 1345, 1347, 1355, 1357, 1363, 1365, 1367, 1369, 1371, 1377, 1379, 1381, 1387, 1389, 1391, 1393, 1399, 1401, 1403, 1409, 1419, 1425, 1427, 1435, 1437, 1439, 1441, 1447, 1457, 1459, 1461, 1469, 1471, 1473, 1475, 1481, 1487, 1496, 1498, 1500, 1506, 1508, 1510, 1516, 1518, 1520, 1526, 1528, 1536, 1538, 1550, 1552, 1554, 1560, 1562, 1564, 1572, 1574, 1576, 1588, 1590, 1592, 1594, 1608, 1610, 1612, 1618, 1620, 1622, 1624, 1630, 1632, 1634, 1636, 1638, 1648, 1650, 1656, 1664, 1666, 1668, 1670, 1672, 1674, 1676, 1678, 1686, 1688, 1690, 1702, 1704, 1706, 1712, 1714, 1720, 1722, 1724, 1726, 1728, 1730, 1736, 1738, and 1740).

[0021] Also provided herein is a method for diagnosing or determining the propensity to cancers, especially lymphoma or leukemia or carcinoma by sequencing at least one carcinoma or lymphoma gene of an individual. In yet another aspect of the invention, a method is provided for determining cancer including lymphoma and leukemia gene copy numbers in an individual.

[0022] The invention provides an isolated nucleic acid comprising at least 10, 12, 15, or 30 contiguous nucleotides of a sequence selected from the group consisting of the polynucleotide sequences SEQ ID NOS: 7, 13, 15, 17, 19, 25, 27, 29, 31, 33, 39, 41, 47, 49, 57, 59, 65, 67, 69, 71, 73, 79, 81, 83, 85, 91, 100, 102, 104, 106, 112, 114, 116, 118, 120, 122, 124, 126, 132, 134, 140, 142, 148, 156, 158, 160, 162, 178, 180, 182, 188, 190, 192, 194, 196, 202, 208, 210, 212, 218, 220, 222, 224, 235, 237, 239, 241, 243, 245, 247, 250, 252, 254, 256, 258, 260, 262, 272, 274, 276, 293, 295, 301, 303, 311, 313, 315, 317, 323, 329, 331, 337, 351, 353, 355, 357, 359, 361, 363, 365, 367, 369, 375, 377, 379, 381, 383, 385, 387, 395, 397, 408, 410, 412, 414, 420, 422, 424, 426, 428, 430, 438, 440, 442, 444, 446, 448, 450, 456, 458, 466, 468, 470, 472, 474, 476, 478, 486, 488, 490, 499, 501, 507, 509, 519, 527, 529, 535, 537, 543, 545, 551, 557, 559, 565, 567, 573, 575, 577, 579, 581, 583, 589, 591, 593, 595, 603, 605, 611, 613, 619, 621, 623, 625, 627, 633, 635, 637, 639, 645, 647, 649, 655, 661, 663, 669, 675, 677, 679, 687, 689, 691, 693, 695, 701, 703, 705, 707, 713, 715, 721, 733, 735, 750, 752, 754, 756, 758, 764, 766, 768, 770, 776, 786, 788, 790, 796, 798, 800, 802, 804, 806, 808, 814, 820, 822, 830, 832, 838, 840, 842, 844, 846, 852, 854, 860, 862, 870, 872, 874, 876, 878, 880, 888, 890, 892, 894, 896, 898, 900, 906, 908, 910, 912, 920, 922, 928, 938, 940, 942, 944, 946, 952, 954, 956, 962, 964, 966, 972, 974, 976, 978, 984, 986, 988, 990, 996, 998, 1000, 1006, 1008, 1010, 1012, 1014, 1020, 1022, 1024, 1030, 1036, 1038, 1040, 1042, 1048, 1054, 1060, 1062, 1068, 1070, 1072, 1074, 1080, 1082, 1088, 1094, 1096, 1102, 1104, 1106, 1108, 1110, 1112, 1118, 1120, 1126, 1132, 1134, 1136, 1138, 1140, 1142, 1144, 1146, 1148, 1154, 1160, 1162, 1164, 1172, 1184, 1186, 1188, 1190, 1196, 1198, 1200, 1206, 1208, 1214, 1216, 1218, 1220, 1222, 1238, 1240, 1242, 1244, 1246, 1248, 1250, 1252, 1254, 1256, 1258, 1266, 1268, 1270, 1278, 1284, 1286, 1288, 1290, 1296, 1298, 1300, 1306, 1316, 1318, 1329, 1331, 1333, 1335, 1337, 1339, 1341, 1343, 1345, 1347, 1355, 1357, 1363, 1365, 1367, 1369, 1371, 1377, 1379, 1381, 1387, 1389, 1391, 1393, 1399, 1401, 1403, 1409, 1419, 1425, 1427, 1435, 1437, 1439, 1441, 1447, 1457, 1459, 1461, 1469, 1471, 1473, 1475, 1481, 1487, 1496, 1498, 1500, 1506, 1508, 1510, 1516, 1518, 1520, 1526, 1528, 1536, 1538, 1550, 1552, 1554, 1560, 1562, 1564, 1572, 1574, 1576, 1588, 1590, 1592, 1594, 1608, 1610, 1612, 1618, 1620, 1622, 1624, 1630, 1632, 1634, 1636, 1638, 1648, 1650, 1656, 1664, 1666, 1668, 1670, 1672, 1674, 1676, 1678, 1686, 1688, 1690, 1702, 1704, 1706, 1712, 1714, 1720, 1722, 1724, 1726, 1728, 1730, 1736, 1738, and 1740 shown in Tables 1-152, or its complement, or an expression vector comprising the isolated nucleic acids and host cells comprising them.

[0023] In some embodiments, the polynucleotide, or its complement or a fragment thereof, further comprises a detectable label, is attached to a solid support, is prepared at least in part by chemical synthesis, is an antisense fragment, is single stranded, is double stranded or comprises a microarray.

[0024] The invention provides an isolated polypeptide, encoded within an open reading frame of a CA sequence selected from the group consisting of the polynucleotide sequences of SEQ ID NOS: 6, 12, 24, 38, 46, 56, 64, 78, 90, 99, 111, 131, 139, 147, 155, 177, 187, 201, 207, 217, 234, 249, 271, 292, 300, 310, 322, 328, 336, 350, 374, 394, 407, 419, 437, 455, 465, 485, 498, 506, 518, 526, 534, 542, 550, 556, 564, 572, 588, 602, 610, 618, 632, 644, 654, 660, 668, 674, 686, 700, 712, 720, 732, 749, 763, 775, 785, 795, 813, 819, 829, 837, 851, 859, 869, 887, 905, 919, 927, 937, 951, 961, 971, 983, 995, 1005, 1019, 1029, 1035, 1047, 1053, 1059, 1067, 1079, 1087, 1093, 1101, 1117, 1125, 1131, 1153, 1159, 1171, 1183, 1195, 1205, 1213, 1237, 1265, 1277, 1283, 1295, 1305, 1315, 1328, 1354, 1362, 1376, 1386, 1398, 1408, 1418, 1424, 1434, 1446, 1456, 1468, 1480, 1486, 1495, 1505, 1515, 1525, 1535, 1549, 1559, 1571, 1587, 1607, 1617, 1629, 1647, 1655, 1663, 1685, 1701, 1711, 1719, and 1735, or its complement. The invention provides an isolated polypeptide, wherein said polypeptide comprises the amino acid sequence encoded by a polynucleotide selected from the group consisting of SEQ ID NOS: 7, 13, 15, 17, 19, 25, 27, 29, 31, 33, 39, 41, 47, 49, 57, 59, 65, 67, 69, 71, 73, 79, 81, 83, 85, 91, 100, 102, 104, 106, 112, 114, 116, 118, 120, 122, 124, 126, 132, 134, 140, 142, 148, 156, 158, 160, 162, 178, 180, 182, 188, 190, 192, 194, 196, 202, 208, 210, 212, 218, 220, 222, 224, 235, 237, 239, 241, 243, 245, 247, 250, 252, 254, 256, 258, 260, 262, 272, 274, 276, 293, 295, 301, 303, 311, 313, 315, 317, 323, 329, 331, 337, 351, 353, 355, 357, 359, 361, 363, 365, 367, 369, 375, 377, 379, 381, 383, 385, 387, 395, 397, 408, 410, 412, 414, 420, 422, 424, 426, 428, 430, 438, 440, 442, 444, 446, 448, 450, 456, 458, 466, 468, 470, 472, 474, 476, 478, 486, 488, 490, 499, 501, 507, 509, 519, 527, 529, 535, 537, 543, 545, 551, 557, 559, 565, 567, 573, 575, 577, 579, 581, 583, 589, 591, 593, 595, 603, 605, 611, 613, 619, 621, 623, 625, 627, 633, 635, 637, 639, 645, 647, 649, 655, 661, 663, 669, 675, 677, 679, 687, 689, 691, 693, 695, 701, 703, 705, 707, 713, 715, 721, 733, 735, 750, 752, 754, 756, 758, 764, 766, 768, 770, 776, 786, 788, 790, 796, 798, 800, 802, 804, 806, 808, 814, 820, 822, 830, 832, 838, 840, 842, 844, 846, 852, 854, 860, 862, 870, 872, 874, 876, 878, 880, 888, 890, 892, 894, 896, 898, 900, 906, 908, 910, 912, 920, 922, 928, 938, 940, 942, 944, 946, 952, 954, 956, 962, 964, 966, 972, 974, 976, 978, 984, 986, 988, 990, 996, 998, 1000, 1006, 1008, 1010, 1012, 1014, 1020, 1022, 1024, 1030, 1036, 1038, 1040, 1042, 1048, 1054, 1060, 1062, 1068, 1070, 1072, 1074, 1080, 1082, 1088, 1094, 1096, 1102, 1104, 1106, 1108, 1110, 1112, 1118, 1120, 1126, 1132, 1134, 1136, 1138, 1140, 1142, 1144, 1146, 1148, 1154, 1160, 1162, 1164, 1172, 1184, 1186, 1188, 1190, 1196, 1198, 1200, 1206, 1208, 1214, 1216, 1218, 1220, 1222, 1238, 1240, 1242, 1244, 1246, 1248, 1250, 1252, 1254, 1256, 1258, 1266, 1268, 1270, 1278, 1284, 1286, 1288, 1290, 1296, 1298, 1300, 1306, 1316, 1318, 1329, 1331, 1333, 1335, 1337, 1339, 1341, 1343, 1345, 1347, 1355, 1357, 1363, 1365, 1367, 1369, 1371, 1377, 1379, 1381, 1387, 1389, 1391, 1393, 1399, 1401, 1403, 1409, 1419, 1425, 1427, 1435, 1437, 1439, 1441, 1447, 1457, 1459, 1461, 1469, 1471, 1473, 1475, 1481, 1487, 1496, 1498, 1500, 1506, 1508, 1510, 1516, 1518, 1520, 1526, 1528, 1536, 1538, 1550, 1552, 1554, 1560, 1562, 1564, 1572, 1574, 1576, 1588, 1590, 1592, 1594, 1608, 1610, 1612, 1618, 1620, 1622, 1624, 1630, 1632, 1634, 1636, 1638, 1648, 1650, 1656, 1664, 1666, 1668, 1670, 1672, 1674, 1676, 1678, 1686, 1688, 1690, 1702, 1704, 1706, 1712, 1714, 1720, 1722, 1724, 1726, 1728, 1730, 1736, 1738, and 1740 shown in Tables 1-152. The invention provides an isolated polypeptide, wherein said polypeptide comprises the amino acid sequence encoded by a polypeptide selected from the group consisting of SEQ ID NOS: 8, 14, 16, 18, 20, 26, 28, 30, 32, 34, 40, 42, 48, 50, 58, 60, 66, 68, 70, 72, 74, 80, 82, 84, 86, 92, 101, 103, 105, 107, 113, 115, 117, 119, 121, 123, 125, 127, 133, 135, 141, 143, 149, 157, 159, 161, 163, 179, 181, 183, 189, 191, 193, 195, 197, 203, 209, 211, 213, 219, 221, 223, 225, 236, 238, 240, 242, 244, 246, 248, 251, 253, 255, 257, 259, 261, 263, 273, 275, 277, 294, 296, 302, 304, 312, 314, 316, 318, 324, 330, 332, 338, 352, 354, 356, 358, 360, 362, 364, 366, 368, 370, 376, 378, 380, 382, 384, 386, 388, 396, 398, 409, 411, 413, 415, 421, 423, 425, 427, 429, 431, 439, 441, 443, 445, 447, 449, 451, 457, 459, 467, 469, 471, 473, 475, 477, 479, 487, 489, 491, 500, 502, 508, 510, 520, 528, 530, 536, 538, 544, 546, 552, 558, 560, 566, 568, 574, 576, 578, 580, 582, 584, 590, 592, 594, 596, 604, 606, 612, 614, 620, 622, 624, 626, 628, 634, 636, 638, 640, 646, 648, 650, 656, 662, 664, 670, 676, 678, 680, 688, 690, 692, 694, 696, 702, 704, 706, 708, 714, 716, 722, 734, 736, 751, 753, 755, 757, 759, 765, 767, 769, 771, 777, 787, 789, 791, 797, 799, 801, 803, 805, 807, 809, 815, 821, 823, 831, 833, 839, 841, 843, 845, 847, 853, 855, 861, 863, 871, 873, 875, 877, 879, 881, 889, 891, 893, 895, 897, 899, 901, 907, 909, 911, 913, 921, 923, 929, 939, 941, 943, 945, 947, 953, 955, 957, 963, 965, 967, 973, 975, 977, 979, 985, 987, 989, 991, 997, 999, 1001, 1007, 1009, 1011, 1013, 1015, 1021, 1023, 1025, 1031, 1037, 1039, 1041, 1043, 1049, 1055, 1061, 1063, 1069, 1071, 1073, 1075, 1081, 1083, 1089, 1095, 1097, 1103, 1105, 1107, 1109, 1111, 1113, 1119, 1121, 1127, 1133, 1135, 1137, 1139, 1141, 1143, 1145, 1147, 1149, 1155, 1161, 1163, 1165, 1173, 1185, 1187, 1189, 1191, 1197, 1199, 1201, 1207, 1209, 1215, 1217, 1219, 1221, 1223, 1239, 1241, 1243, 1245, 1247, 1249, 1251, 1253, 1255, 1257, 1259, 1267, 1269, 1271, 1279, 1285, 1287, 1289, 1291, 1297, 1299, 1301, 1307, 1317, 1319, 1330, 1332, 1334, 1336, 1338, 1340, 1342, 1344, 1346, 1348, 1356, 1358, 1364, 1366, 1368, 1370, 1372, 1378, 1380, 1382, 1388, 1390, 1392, 1394, 1400, 1402, 1404, 1410, 1420, 1426, 1428, 1436, 1438, 1440, 1442, 1448, 1458, 1460, 1462, 1470, 1472, 1474, 1476, 1482, 1488, 1497, 1499, 1501, 1507, 1509, 1511, 1517, 1519, 1521, 1527, 1529, 1537, 1539, 1551, 1553, 1555, 1561, 1563, 1565, 1573, 1575, 1577, 1589, 1591, 1593, 1595, 1609, 1611, 1613, 1619, 1621, 1623, 1625, 1631, 1633, 1635, 1637, 1639, 1649, 1651, 1657, 1665, 1667, 1669, 1671, 1673, 1675, 1677, 1679, 1687, 1689, 1691, 1703, 1705, 1707, 1713, 1715, 1721, 1723, 1725, 1727, 1729, 1731, 1737, 1739, and 1741 shown in Tables 1-152.

[0025] The invention further provides an isolated polypeptide, comprising the amino acid sequence of an epitope of the amino acid sequence of a CA polypeptide selected from the group consisting of SEQ ID NOS: 8, 14, 16, 18, 20, 26, 28, 30, 32, 34, 40, 42, 48, 50, 58, 60, 66, 68, 70, 72, 74, 80, 82, 84, 86, 92, 101, 103, 105, 107, 113, 115, 117, 119, 121, 123, 125, 127, 133, 135, 141, 143, 149, 157, 159, 161, 163, 179, 181, 183, 189, 191, 193, 195, 197, 203, 209, 211, 213, 219, 221, 223, 225, 236, 238, 240, 242, 244, 246, 248, 251, 253, 255, 257, 259, 261, 263, 273, 275, 277, 294, 296, 302, 304, 312, 314, 316, 318, 324, 330, 332, 338, 352, 354, 356, 358, 360, 362, 364, 366, 368, 370, 376, 378, 380, 382, 384, 386, 388, 396, 398, 409, 411, 413, 415, 421, 423, 425, 427, 429, 431, 439, 441, 443, 445, 447, 449, 451, 457, 459, 467, 469, 471, 473, 475, 477, 479, 487, 489, 491, 500, 502, 508, 510, 520, 528, 530, 536, 538, 544, 546, 552, 558, 560, 566, 568, 574, 576, 578, 580, 582, 584, 590, 592, 594, 596, 604, 606, 612, 614, 620, 622, 624, 626, 628, 634, 636, 638, 640, 646, 648, 650, 656, 662, 664, 670, 676, 678, 680, 688, 690, 692, 694, 696, 702, 704, 706, 708, 714, 716, 722, 734, 736, 751, 753, 755, 757, 759, 765, 767, 769, 771, 777, 787, 789, 791, 797, 799, 801, 803, 805, 807, 809, 815, 821, 823, 831, 833, 839, 841, 843, 845, 847, 853, 855, 861, 863, 871, 873, 875, 877, 879, 881, 889, 891, 893, 895, 897, 899, 901, 907, 909, 911, 913, 921, 923, 929, 939, 941, 943, 945, 947, 953, 955, 957, 963, 965, 967, 973, 975, 977, 979, 985, 987, 989, 991, 997, 999, 1001, 1007, 1009, 1011, 1013, 1015, 1021, 1023, 1025, 1031, 1037, 1039, 1041, 1043, 1049, 1055, 1061, 1063, 1069, 1071, 1073, 1075, 1081, 1083, 1089, 1095, 1097, 1103, 1105, 1107, 1109, 1111, 1113, 1119, 1121, 1127, 1133, 1135, 1137, 1139, 1141, 1143, 1145, 1147, 1149, 1155, 1161, 1163, 1165, 1173, 1185, 1187, 1189, 1191, 1197, 1199, 1201, 1207, 1209, 1215, 1217, 1219, 1221, 1223, 1239, 1241, 1243, 1245, 1247, 1249, 1251, 1253, 1255, 1257, 1259, 1267, 1269, 1271, 1279, 1285, 1287, 1289, 1291, 1297, 1299, 1301, 1307, 1317, 1319, 1330, 1332, 1334, 1336, 1338, 1340, 1342, 1344, 1346, 1348, 1356, 1358, 1364, 1366, 1368, 1370, 1372, 1378, 1380, 1382, 1388, 1390, 1392, 1394, 1400, 1402, 1404, 1410, 1420, 1426, 1428, 1436, 1438, 1440, 1442, 1448, 1458, 1460, 1462, 1470, 1472, 1474, 1476, 1482, 1488, 1497, 1499, 1501, 1507, 1509, 1511, 1517, 1519, 1521, 1527, 1529, 1537, 1539, 1551, 1553, 1555, 1561, 1563, 1565, 1573, 1575, 1577, 1589, 1591, 1593, 1595, 1609, 1611, 1613, 1619, 1621, 1623, 1625, 1631, 1633, 1635, 1637, 1639, 1649, 1651, 1657, 1665, 1667, 1669, 1671, 1673, 1675, 1677, 1679, 1687, 1689, 1691, 1703, 1705, 1707, 1713, 1715, 1721, 1723, 1725, 1727, 1729, 1731, 1737, 1739, and 1741 shown in Tables 1-152, wherein the polypeptide or fragment thereof may be attached to a solid support. In one embodiment the invention provides an isolated antibody (monoclonal or polyclonal) or antigen binding fragment thereof, that binds to such a polypeptide. The isolated antibody or antigen binding fragment thereof may be attached to a solid support, or further comprises a detectable label.

[0026] In one embodiment, the invention provides a kit for diagnosing the presence of cancer in a test sample, said kit comprising at least one polynucleotide that selectively hybridizes to a CA polynucleotide sequence shown in Tables 1-152, or its complement. In another embodiment, the invention provides an electronic library comprising a CA polynucleotide, a CA polypeptide, or fragment thereof, shown in Tables 1-152.

[0027] In one embodiment, the invention provides a method of screening for anticancer activity comprising: (a) providing a cell that expresses a cancer associated (CA) gene encoded by a nucleic acid sequence selected from the group consisting of the CA sequences shown in Tables 1-152, or fragment thereof; (b) contacting a tissue sample derived from a cancer cell with an anticancer drug candidate; (c) monitoring an effect of the anticancer drug candidate on an expression of the CA polynucleotide in the tissue sample, and optionally (d) comparing the level of expression in the absence of said drug candidate to the level of expression in the presence of the drug candidate. The drug candidate may be an inhibitor of an activity of a human protein listed in Tables 1-152.

[0028] In one embodiment, the invention provides a method for detecting cancer associated with expression of a polypeptide in a test cell sample, comprising the steps of: (i) detecting a level of expression of at least one polypeptide selected from the group consisting of SEQ ID NOS: 8, 14, 16, 18, 20, 26, 28, 30, 32, 34, 40, 42, 48, 50, 58, 60, 66, 68, 70, 72, 74, 80, 82, 84, 86, 92, 101, 103, 105, 107, 113, 115, 117, 119, 121, 123, 125, 127, 133, 135, 141, 143, 149, 157, 159, 161, 163, 179, 181, 183, 189, 191, 193, 195, 197, 203, 209, 211, 213, 219, 221, 223, 225, 236, 238, 240, 242, 244, 246, 248, 251, 253, 255, 257, 259, 261, 263, 273, 275, 277, 294, 296, 302, 304, 312, 314, 316, 318, 324, 330, 332, 338, 352, 354, 356, 358, 360, 362, 364, 366, 368, 370, 376, 378, 380, 382, 384, 386, 388, 396, 398, 409, 411, 413, 415, 421, 423, 425, 427, 429, 431, 439, 441, 443, 445, 447, 449, 451, 457, 459, 467, 469, 471, 473, 475, 477, 479, 487, 489, 491, 500, 502, 508, 510, 520, 528, 530, 536, 538, 544, 546, 552, 558, 560, 566, 568, 574, 576, 578, 580, 582, 584, 590, 592, 594, 596, 604, 606, 612, 614, 620, 622, 624, 626, 628, 634, 636, 638, 640, 646, 648, 650, 656, 662, 664, 670, 676, 678, 680, 688, 690, 692, 694, 696, 702, 704, 706, 708, 714, 716, 722, 734, 736, 751, 753, 755, 757, 759, 765, 767, 769, 771, 777, 787, 789, 791, 797, 799, 801, 803, 805, 807, 809, 815, 821, 823, 831, 833, 839, 841, 843, 845, 847, 853, 855, 861, 863, 871, 873, 875, 877, 879, 881, 889, 891, 893, 895, 897, 899, 901, 907, 909, 911, 913, 921, 923, 929, 939, 941, 943, 945, 947, 953, 955, 957, 963, 965, 967, 973, 975, 977, 979, 985, 987, 989, 991, 997, 999, 1001, 1007, 1009, 1011, 1013, 1015, 1021, 1023, 1025, 1031, 1037, 1039, 1041, 1043, 1049, 1055, 1061, 1063, 1069, 1071, 1073, 1075, 1081, 1083, 1089, 1095, 1097, 1103, 1105, 1107, 1109, 1111, 1113, 1119, 1121, 1127, 1133, 1135, 1137, 1139, 1141, 1143, 1145, 1147, 1149, 1155, 1161, 1163, 1165, 1173, 1185, 1187, 1189, 1191, 1197, 1199, 1201, 1207, 1209, 1215, 1217, 1219, 1221, 1223, 1239, 1241, 1243, 1245, 1247, 1249, 1251, 1253, 1255, 1257, 1259, 1267, 1269, 1271, 1279, 1285, 1287, 1289, 1291, 1297, 1299, 1301, 1307, 1317, 1319, 1330, 1332, 1334, 1336, 1338, 1340, 1342, 1344, 1346, 1348, 1356, 1358, 1364, 1366, 1368, 1370, 1372, 1378, 1380, 1382, 1388, 1390, 1392, 1394, 1400, 1402, 1404, 1410, 1420, 1426, 1428, 1436, 1438, 1440, 1442, 1448, 1458, 1460, 1462, 1470, 1472, 1474, 1476, 1482, 1488, 1497, 1499, 1501, 1507, 1509, 1511, 1517, 1519, 1521, 1527, 1529, 1537, 1539, 1551, 1553, 1555, 1561, 1563, 1565, 1573, 1575, 1577, 1589, 1591, 1593, 1595, 1609, 1611, 1613, 1619, 1621, 1623, 1625, 1631, 1633, 1635, 1637, 1639, 1649, 1651, 1657, 1665, 1667, 1669, 1671, 1673, 1675, 1677, 1679, 1687, 1689, 1691, 1703, 1705, 1707, 1713, 1715, 1721, 1723, 1725, 1727, 1729, 1731, 1737, 1739, and 1741 shown in Tables 1-152, or a fragment thereof; and (ii) comparing the level of expression of the polypeptide in the test sample with a level of expression of polypeptide in a normal cell sample, wherein an altered level of expression of the polypeptide in the test cell sample relative to the level of polypeptide expression in the normal cell sample is indicative of the presence of cancer in the test cell sample.

[0029] In another embodiment, the invention provides a method for detecting cancer associated with expression of a polypeptide in a test cell sample, comprising the steps of: (i) detecting a level of activity of at least one polypeptide selected from the group consisting of SEQ ID NOS: 8, 14, 16, 18, 20, 26, 28, 30, 32, 34, 40, 42, 48, 50, 58, 60, 66, 68, 70, 72, 74, 80, 82, 84, 86, 92, 101, 103, 105, 107, 113, 115, 117, 119, 121, 123, 125, 127, 133, 135, 141, 143, 149, 157, 159, 161, 163, 179, 181, 183, 189, 191, 193, 195, 197, 203, 209, 211, 213, 219, 221, 223, 225, 236, 238, 240, 242, 244, 246, 248, 251, 253, 255, 257, 259, 261, 263, 273, 275, 277, 294, 296, 302, 304, 312, 314, 316, 318, 324, 330, 332, 338, 352, 354, 356, 358, 360, 362, 364, 366, 368, 370, 376, 378, 380, 382, 384, 386, 388, 396, 398, 409, 411, 413, 415, 421, 423, 425, 427, 429, 431, 439, 441, 443, 445, 447, 449, 451, 457, 459, 467, 469, 471, 473, 475, 477, 479, 487, 489, 491, 500, 502, 508, 510, 520, 528, 530, 536, 538, 544, 546, 552, 558, 560, 566, 568, 574, 576, 578, 580, 582, 584, 590, 592, 594, 596, 604, 606, 612, 614, 620, 622, 624, 626, 628, 634, 636, 638, 640, 646, 648, 650, 656, 662, 664, 670, 676, 678, 680, 688, 690, 692, 694, 696, 702, 704, 706, 708, 714, 716, 722, 734, 736, 751, 753, 755, 757, 759, 765, 767, 769, 771, 777, 787, 789, 791, 797, 799, 801, 803, 805, 807, 809, 815, 821, 823, 831, 833, 839, 841, 843, 845, 847, 853, 855, 861, 863, 871, 873, 875, 877, 879, 881, 889, 891, 893, 895, 897, 899, 901, 907, 909, 911, 913, 921, 923, 929, 939, 941, 943, 945, 947, 953, 955, 957, 963, 965, 967, 973, 975, 977, 979, 985, 987, 989, 991, 997, 999, 1001, 1007, 1009, 1011, 1013, 1015, 1021, 1023, 1025, 1031, 1037, 1039, 1041, 1043, 1049, 1055, 1061, 1063, 1069, 1071, 1073, 1075, 1081, 1083, 1089, 1095, 1097, 1103, 1105, 1107, 1109, 1111, 1113, 1119, 1121, 1127, 1133, 1135, 1137, 1139, 1141, 1143, 1145, 1147, 1149, 1155, 1161, 1163, 1165, 1173, 1185, 1187, 1189, 1191, 1197, 1199, 1201, 1207, 1209, 1215, 1217, 1219, 1221, 1223, 1239, 1241, 1243, 1245, 1247, 1249, 1251, 1253, 1255, 1257, 1259, 1267, 1269, 1271, 1279, 1285, 1287, 1289, 1291, 1297, 1299, 1301, 1307, 1317, 1319, 1330, 1332, 1334, 1336, 1338, 1340, 1342, 1344, 1346, 1348, 1356, 1358, 1364, 1366, 1368, 1370, 1372, 1378, 1380, 1382, 1388, 1390, 1392, 1394, 1400, 1402, 1404, 1410, 1420, 1426, 1428, 1436, 1438, 1440, 1442, 1448, 1458, 1460, 1462, 1470, 1472, 1474, 1476, 1482, 1488, 1497, 1499, 1501, 1507, 1509, 1511, 1517, 1519, 1521, 1527, 1529, 1537, 1539, 1551, 1553, 1555, 1561, 1563, 1565, 1573, 1575, 1577, 1589, 1591, 1593, 1595, 1609, 1611, 1613, 1619, 1621, 1623, 1625, 1631, 1633, 1635, 1637, 1639, 1649, 1651, 1657, 1665, 1667, 1669, 1671, 1673, 1675, 1677, 1679, 1687, 1689, 1691, 1703, 1705, 1707, 1713, 1715, 1721, 1723, 1725, 1727, 1729, 1731, 1737, 1739, and 1741 shown in Tables 1-152, or a fragment thereof, wherein said activity corresponds to at least one activity for the polypeptide listed in Tables 1-152; and (ii) comparing the level of activity of the polypeptide in the test sample with a level of activity of polypeptide in a normal cell sample, wherein an altered level of activity of the polypeptide in the test cell sample relative to the level of polypeptide activity in the normal cell sample is indicative of the presence of cancer in the test cell sample.

[0030] In another embodiment, the invention provides a method for detecting cancer associated with the presence of an antibody in a test serum sample, comprising the steps of: (i) detecting a level of an antibody against an antigenic polypeptide selected from the group consisting of SEQ ID NOS: 8, 14, 16, 18, 20, 26, 28, 30, 32, 34, 40, 42, 48, 50, 58, 60, 66, 68, 70, 72, 74, 80, 82, 84, 86, 92, 101, 103, 105, 107, 113, 115, 117, 119, 121, 123, 125, 127, 133, 135, 141, 143, 149, 157, 159, 161, 163, 179, 181, 183, 189, 191, 193, 195, 197, 203, 209, 211, 213, 219, 221, 223, 225, 236, 238, 240, 242, 244, 246, 248, 251, 253, 255, 257, 259, 261, 263, 273, 275, 277, 294, 296, 302, 304, 312, 314, 316, 318, 324, 330, 332, 338, 352, 354, 356, 358, 360, 362, 364, 366, 368, 370, 376, 378, 380, 382, 384, 386, 388, 396, 398, 409, 411, 413, 415, 421, 423, 425, 427, 429, 431, 439, 441, 443, 445, 447, 449, 451, 457, 459, 467, 469, 471, 473, 475, 477, 479, 487, 489, 491, 500, 502, 508, 510, 520, 528, 530, 536, 538, 544, 546, 552, 558, 560, 566, 568, 574, 576, 578, 580, 582, 584, 590, 592, 594, 596, 604, 606, 612, 614, 620, 622, 624, 626, 628, 634, 636, 638, 640, 646, 648, 650, 656, 662, 664, 670, 676, 678, 680, 688, 690, 692, 694, 696, 702, 704, 706, 708, 714, 716, 722, 734, 736, 751, 753, 755, 757, 759, 765, 767, 769, 771, 777, 787, 789, 791, 797, 799, 801, 803, 805, 807, 809, 815, 821, 823, 831, 833, 839, 841, 843, 845, 847, 853, 855, 861, 863, 871, 873, 875, 877, 879, 881, 889, 891, 893, 895, 897, 899, 901, 907, 909, 911, 913, 921, 923, 929, 939, 941, 943, 945, 947, 953, 955, 957, 963, 965, 967, 973, 975, 977, 979, 985, 987, 989, 991, 997, 999, 1001, 1007, 1009, 1011, 1013, 1015, 1021, 1023, 1025, 1031, 1037, 1039, 1041, 1043, 1049, 1055, 1061, 1063, 1069, 1071, 1073, 1075, 1081, 1083, 1089, 1095, 1097, 1103, 1105, 1107, 1109, 1111, 1113, 1119, 1121, 1127, 1133, 1135, 1137, 1139, 1141, 1143, 1145, 1147, 1149, 1155, 1161, 1163, 1165, 1173, 1185, 1187, 1189, 1191, 1197, 1199, 1201, 1207, 1209, 1215, 1217, 1219, 1221, 1223, 1239, 1241, 1243, 1245, 1247, 1249, 1251, 1253, 1255, 1257, 1259, 1267, 1269, 1271, 1279, 1285, 1287, 1289, 1291, 1297, 1299, 1301, 1307, 1317, 1319, 1330, 1332, 1334, 1336, 1338, 1340, 1342, 1344, 1346, 1348, 1356, 1358, 1364, 1366, 1368, 1370, 1372, 1378, 1380, 1382, 1388, 1390, 1392, 1394, 1400, 1402, 1404, 1410, 1420, 1426, 1428, 1436, 1438, 1440, 1442, 1448, 1458, 1460, 1462, 1470, 1472, 1474, 1476, 1482, 1488, 1497, 1499, 1501, 1507, 1509, 1511, 1517, 1519, 1521, 1527, 1529, 1537, 1539, 1551, 1553, 1555, 1561, 1563, 1565, 1573, 1575, 1577, 1589, 1591, 1593, 1595, 1609, 1611, 1613, 1619, 1621, 1623, 1625, 1631, 1633, 1635, 1637, 1639, 1649, 1651, 1657, 1665, 1667, 1669, 1671, 1673, 1675, 1677, 1679, 1687, 1689, 1691, 1703, 1705, 1707, 1713, 1715, 1721, 1723, 1725, 1727, 1729, 1731, 1737, 1739, and 1741 shown in Tables 1-152, or antigenic fragment thereof; and (ii) comparing said level of said antibody in the test sample with a level of said antibody in the control sample, wherein an altered level of antibody in said test sample relative to the level of antibody in the control sample is indicative of the presence of cancer in the test serum sample.

[0031] The invention provides a method for screening for a bioactive agent capable of modulating the activity of a CA protein (CAP), wherein said CAP is encoded by a nucleic acid comprising a nucleic acid sequence selected from the group consisting of the polynucleotide sequences SEQ ID NOS: 7, 13, 15, 17, 19, 25, 27, 29, 31, 33, 39, 41, 47, 49, 57, 59, 65, 67, 69, 71, 73, 79, 81, 83, 85, 91, 100, 102, 104, 106, 112, 114, 116, 118, 120, 122, 124, 126, 132, 134, 140, 142, 148, 156, 158, 160, 162, 178, 180, 182, 188, 190, 192, 194, 196, 202, 208, 210, 212, 218, 220, 222, 224, 235, 237, 239, 241, 243, 245, 247, 250, 252, 254, 256, 258, 260, 262, 272, 274, 276, 293, 295, 301, 303, 311, 313, 315, 317, 323, 329, 331, 337, 351, 353, 355, 357, 359, 361, 363, 365, 367, 369, 375, 377, 379, 381, 383, 385, 387, 395, 397, 408, 410, 412, 414, 420, 422, 424, 426, 428, 430, 438, 440, 442, 444, 446, 448, 450, 456, 458, 466, 468, 470, 472, 474, 476, 478, 486, 488, 490, 499, 501, 507, 509, 519, 527, 529, 535, 537, 543, 545, 551, 557, 559, 565, 567, 573, 575, 577, 579, 581, 583, 589, 591, 593, 595, 603, 605, 611, 613, 619, 621, 623, 625, 627, 633, 635, 637, 639, 645, 647, 649, 655, 661, 663, 669, 675, 677, 679, 687, 689, 691, 693, 695, 701, 703, 705, 707, 713, 715, 721, 733, 735, 750, 752, 754, 756, 758, 764, 766, 768, 770, 776, 786, 788, 790, 796, 798, 800, 802, 804, 806, 808, 814, 820, 822, 830, 832, 838, 840, 842, 844, 846, 852, 854, 860, 862, 870, 872, 874, 876, 878, 880, 888, 890, 892, 894, 896, 898, 900, 906, 908, 910, 912, 920, 922, 928, 938, 940, 942, 944, 946, 952, 954, 956, 962, 964, 966, 972, 974, 976, 978, 984, 986, 988, 990, 996, 998, 1000, 1006, 1008, 1010, 1012, 1014, 1020, 1022, 1024, 1030, 1036, 1038, 1040, 1042, 1048, 1054, 1060, 1062, 1068, 1070, 1072, 1074, 1080, 1082, 1088, 1094, 1096, 1102, 1104, 1106, 1108, 1110, 1112, 1118, 1120, 1126, 1132, 1134, 1136, 1138, 1140, 1142, 1144, 1146, 1148, 1154, 1160, 1162, 1164, 1172, 1184, 1186, 1188, 1190, 1196, 1198, 1200, 1206, 1208, 1214, 1216, 1218, 1220, 1222, 1238, 1240, 1242, 1244, 1246, 1248, 1250, 1252, 1254, 1256, 1258, 1266, 1268, 1270, 1278, 1284, 1286, 1288, 1290, 1296, 1298, 1300, 1306, 1316, 1318, 1329, 1331, 1333, 1335, 1337, 1339, 1341, 1343, 1345, 1347, 1355, 1357, 1363, 1365, 1367, 1369, 1371, 1377, 1379, 1381, 1387, 1389, 1391, 1393, 1399, 1401, 1403, 1409, 1419, 1425, 1427, 1435, 1437, 1439, 1441, 1447, 1457, 1459, 1461, 1469, 1471, 1473, 1475, 1481, 1487, 1496, 1498, 1500, 1506, 1508, 1510, 1516, 1518, 1520, 1526, 1528, 1536, 1538, 1550, 1552, 1554, 1560, 1562, 1564, 1572, 1574, 1576, 1588, 1590, 1592, 1594, 1608, 1610, 1612, 1618, 1620, 1622, 1624, 1630, 1632, 1634, 1636, 1638, 1648, 1650, 1656, 1664, 1666, 1668, 1670, 1672, 1674, 1676, 1678, 1686, 1688, 1690, 1702, 1704, 1706, 1712, 1714, 1720, 1722, 1724, 1726, 1728, 1730, 1736, 1738, and 1740 shown in Tables 1-152, said method comprising: a) combining said CAP and a candidate bioactive agent; and b) determining the effect of the candidate agent on the bioactivity of said CAP. According to the method the bioactive agent: affects the expression of the CA protein (CAP); affects the activity of the CA protein (CAP), wherein such activity is selected from the activities listed in Tables 1-152.

[0032] In one embodiment, the invention provides a method for diagnosing cancer comprising: a) determining the expression of one or more genes comprising a nucleic acid sequence selected from the group consisting of the human genomic and miRNA sequences outlined in Tables 1-152, in a first tissue type of a first individual; and b) comparing said expression of said gene(s) from a second normal tissue type from said first individual or a second unaffected individual; wherein a difference in said expression indicates that the first individual has cancer.

[0033] In another embodiment the invention provides a method for treating cancers comprising administering to a patient a bioactive agent modulating the activity of a CA protein (CAP), wherein said CAP is encoded by a nucleic acid comprising a nucleic acid sequence selected from the group consisting of the human nucleic acid sequences in Tables 1-152 and further wherein the bioactive agent binds to the CA protein; wherein the CA protein has a sequence shown in Tables 1-152 and has an activity selected from the group consisting of: has an activity selected from the group consisting of: G-protein coupled receptor, nucleotide binding, nucleic acid binding, calcium binding protein, apoptosis, cell cycle regulator, chromatin protein. transcription factor, transport protein, signal transduction, nuclear receptor, growth factor, protein kinase, protein phosphorylase, peptidase, electron transport, thioredoxin, semaphorin, signalling, motility and any other activity disclosed in Tables 1-152.

[0034] The invention provides monoclonal antibodies that preferentially binds to a CA protein (CAP) that is expressed on a cell surface, wherein the CA protein selected from the group consisting of SEQ ID NOS: 8, 14, 16, 18, 20, 26, 28, 30, 32, 34, 40, 42, 48, 50, 58, 60, 66, 68, 70, 72, 74, 80, 82, 84, 86, 92, 101, 103, 105, 107, 113, 115, 117, 119, 121, 123, 125, 127, 133, 135, 141, 143, 149, 157, 159, 161, 163, 179, 181, 183, 189, 191, 193, 195, 197, 203, 209, 211, 213, 219, 221, 223, 225, 236, 238, 240, 242, 244, 246, 248, 251, 253, 255, 257, 259, 261, 263, 273, 275, 277, 294, 296, 302, 304, 312, 314, 316, 318, 324, 330, 332, 338, 352, 354, 356, 358, 360, 362, 364, 366, 368, 370, 376, 378, 380, 382, 384, 386, 388, 396, 398, 409, 411, 413, 415, 421, 423, 425, 427, 429, 431, 439, 441, 443, 445, 447, 449, 451, 457, 459, 467, 469, 471, 473, 475, 477, 479, 487, 489, 491, 500, 502, 508, 510, 520, 528, 530, 536, 538, 544, 546, 552, 558, 560, 566, 568, 574, 576, 578, 580, 582, 584, 590, 592, 594, 596, 604, 606, 612, 614, 620, 622, 624, 626, 628, 634, 636, 638, 640, 646, 648, 650, 656, 662, 664, 670, 676, 678, 680, 688, 690, 692, 694, 696, 702, 704, 706, 708, 714, 716, 722, 734, 736, 751, 753, 755, 757, 759, 765, 767, 769, 771, 777, 787, 789, 791, 797, 799, 801, 803, 805, 807, 809, 815, 821, 823, 831, 833, 839, 841, 843, 845, 847, 853, 855, 861, 863, 871, 873, 875, 877, 879, 881, 889, 891, 893, 895, 897, 899, 901, 907, 909, 911, 913, 921, 923, 929, 939, 941, 943, 945, 947, 953, 955, 957, 963, 965, 967, 973, 975, 977, 979, 985, 987, 989, 991, 997, 999, 1001, 1007, 1009, 1011, 1013, 1015, 1021, 1023, 1025, 1031, 1037, 1039, 1041, 1043, 1049, 1055, 1061, 1063, 1069, 1071, 1073, 1075, 1081, 1083, 1089, 1095, 1097, 1103, 1105, 1107, 1109, 1111, 1113, 1119, 1121, 1127, 1133, 1135, 1137, 1139, 1141, 1143, 1145, 1147, 1149, 1155, 1161, 1163, 1165, 1173, 1185, 1187, 1189, 1191, 1197, 1199, 1201, 1207, 1209, 1215, 1217, 1219, 1221, 1223, 1239, 1241, 1243, 1245, 1247, 1249, 1251, 1253, 1255, 1257, 1259, 1267, 1269, 1271, 1279, 1285, 1287, 1289, 1291, 1297, 1299, 1301, 1307, 1317, 1319, 1330, 1332, 1334, 1336, 1338, 1340, 1342, 1344, 1346, 1348, 1356, 1358, 1364, 1366, 1368, 1370, 1372, 1378, 1380, 1382, 1388, 1390, 1392, 1394, 1400, 1402, 1404, 1410, 1420, 1426, 1428, 1436, 1438, 1440, 1442, 1448, 1458, 1460, 1462, 1470, 1472, 1474, 1476, 1482, 1488, 1497, 1499, 1501, 1507, 1509, 1511, 1517, 1519, 1521, 1527, 1529, 1537, 1539, 1551, 1553, 1555, 1561, 1563, 1565, 1573, 1575, 1577, 1589, 1591, 1593, 1595, 1609, 1611, 1613, 1619, 1621, 1623, 1625, 1631, 1633, 1635, 1637, 1639, 1649, 1651, 1657, 1665, 1667, 1669, 1671, 1673, 1675, 1677, 1679, 1687, 1689, 1691, 1703, 1705, 1707, 1713, 1715, 1721, 1723, 1725, 1727, 1729, 1731, 1737, 1739, and 1741; preferably to the extracellular domain of the CA protein; preferably to a CA protein differentially expressed on a cancer cell surface relative to a normal cell surface or preferably to at least one human cancer cell line; preferably linked to a therapeutic agent; or preferably humanized. Kits and pharmaceutical compositions for detecting a presence or an absence of cancer cells in an individual, and comprising such antibodies are also provided.

[0035] The invention also provides a method for detecting a presence or an absence of cancer cells in an individual, the method comprising: contacting cells from the individual with the antibody according to the invention; and detecting a complex of a CAP from the cancer cells and the antibody, wherein detection of the complex correlates with the presence of cancer cells in the individual. In one embodiment the invention provides a method for inhibiting growth of cancer cells in an individual, the method comprising: administering to the individual an effective amount of a pharmaceutical composition according to the invention. In another embodiment the invention provides a method for delivering a therapeutic agent to cancer cells in an individual, the method comprising: administering to the individual an effective amount of a pharmaceutical composition according to according to the invention.

[0036] Novel sequences associated with cancer are also provided herein. Other aspects of the invention will become apparent to the skilled artisan by the following description of the invention.

### BRIEF DESCRIPTION OF THE FIGURES

[0037] FIG. 1 depicts PCR amplification of host-provirus junction fragments.

[0038] FIG. 2 shows an example of average threshold cycle (C_{T}) values for a housekeeper gene and target gene.

[0039] FIG. 3 shows an example of the calculated difference (ΔC_{T}) between the C_{T} values of target and housekeeper genes (ΔC_{T}) for various samples.

[0040] FIG. 4 shows the ΔΔC_{T} and comparative expression level for each sample from FIG. 3.

### DETAILED DESCRIPTION OF PREFERRED EMBODIMENTS

[0041] The present invention is directed to a number of sequences associated with cancers, especially lymphoma, breast cancer or prostate cancer. The relatively tight linkage between clonally-integrated proviruses and protooncogenes forms “provirus tagging”, in which slow-transforming retroviruses that act by an insertion mutation mechanism are used to isolate protooncogenes. In some models, uninfected animals have low cancer rates, and infected animals have high cancer rates. It is known that many of the retroviruses involved do not carry transduced host protooncogenes or pathogenic trans-acting viral genes, and thus the cancer incidence must therefore be a direct consequence of proviral integration effects into host protooncogenes. Since proviral integration is random, rare integrants will “activate” host protooncogenes that provide a selective growth advantage, and these rare events result in new proviruses at clonal stoichiometries in tumors. In contrast to mutations caused by chemicals, radiation, or spontaneous errors, protooncogene insertion mutations can be easily located by virtue of the fact that a convenient-sized genetic marker of known sequence (the provirus) is present at the site of mutation. Host sequences that flank clonally integrated proviruses can be cloned using a variety of strategies. Once these sequences are in hand, the tagged protooncogenes can be subsequently identified. The presence of provirus at the same locus in two or more independent tumors is prima facie evidence that a protooncogene is present at or very near the provirus integration sites. This is because the genome is too large for random integrations to result in observable clustering. Any clustering that is detected is unequivocal evidence for biological selection (i.e. the tumor phenotype). Moreover, the pattern of proviral integrants (including orientations) provides compelling positional information that makes localization of the target gene at each cluster relatively simple. The three mammalian retroviruses that are known to cause cancer by an insertion mutation mechanism are FeLV (leukemia/lymphoma in cats), MLV (leukemia/lymphoma in mice and rats), and MMTV (mammary cancer in mice).

[0042] Thus, the use of oncogenic retroviruses, whose sequences insert into the genome of the host organism resulting in cancer, allows the identification of host sequences involved in cancer. These sequences may then be used in a number of different ways, including diagnosis, prognosis, screening for modulators (including both agonists and antagonists), antibody generation (for immunotherapy and imaging), etc. However, as will be appreciated by those in the art, oncogenes that are identified in one type of cancer such as lymphoma or leukemia have a strong likelihood of being involved in other types of cancers as well. Thus, while the sequences outlined herein are initially identified as correlated with lymphoma, they can also be found in other types of cancers as well, outlined below.

### DEFINITIONS

[0043] Accordingly, the present invention provides nucleic acid and protein sequences that are associated with cancer, herein termed “cancer associated” or “CA” sequences. In one embodiment, the present invention provides nucleic acid and protein sequences that are associated with cancers that originate in lymphatic tissue, herein termed “lymphoma associated,” “leukemia associated” or “LA” sequences. In another embodiment, the present invention provides nucleic acid and protein sequences that are associated with carcinomas which originate in breast tissue, herein termed “breast cancer associated” or “BC” sequences.

[0044] Suitable cancers that can be diagnosed or screened for using the methods of the present invention include cancers classified by site or by histological type. Cancers classified by site include cancer of the oral cavity and pharynx (lip, tongue, salivary gland, floor of mouth, gum and other mouth, nasopharynx, tonsil, oropharynx, hypopharynx, other oral/pharynx); cancers of the digestive system (esophagus; stomach; small intestine; colon and rectum; anus, anal canal, and anorectum; liver; intrahepatic bile duct; gallbladder; other biliary; pancreas; retroperitoneum; peritoneum, omentum, and mesentery; other digestive); cancers of the respiratory system (nasal cavity, middle ear, and sinuses; larynx; lung and bronchus; pleura; trachea, mediastinum, and other respiratory); cancers of the mesothelioma; bones and joints; and soft tissue, including heart; skin cancers, including melanomas and other non-epithelial skin cancers; Kaposi's sarcoma and breast cancer; cancer of the female genital system (cervix uteri; corpus uteri; uterus, nos; ovary; vagina; vulva; and other female genital); cancers of the male genital system (prostate gland; testis; penis; and other male genital); cancers of the urinary system (urinary bladder; kidney and renal pelvis; ureter; and other urinary); cancers of the eye and orbit; cancers of the brain and nervous system (brain; and other nervous system); cancers of the endocrine system (thyroid gland and other endocrine, including thymus); lymphomas (Hodgkin's disease and non-Hodgkin's lymphoma), multiple myeloma, and leukemias (lymphocytic leukemia; myeloid leukemia; monocytic leukemia; and other leukemias).

[0045] Other cancers, classified by histological type, that may be associated with the sequences of the invention include, but are not limited to, Neoplasm, malignant; Carcinoma, NOS; Carcinoma, undifferentiated, NOS; Giant and spindle cell carcinoma; Small cell carcinoma, NOS; Papillary carcinoma, NOS; Squamous cell carcinoma, NOS; Lymphoepithelial carcinoma; Basal cell carcinoma, NOS; Pilomatrix carcinoma; Transitional cell carcinoma, NOS; Papillary transitional cell carcinoma; Adenocarcinoma, NOS; Gastrinoma, malignant; Cholangiocarcinoma; Hepatocellular carcinoma, NOS; Combined hepatocellular carcinoma and cholangiocarcinoma; Trabecular adenocarcinoma; Adenoid cystic carcinoma; Adenocarcinoma in adenomatous polyp; Adenocarcinoma, familial polyposis coli; Solid carcinoma, NOS; Carcinoid tumor, malignant; Bronchiolo-alveolar adenocarcinoma; Papillary adenocarcinoma, NOS; Chromophobe carcinoma; Acidophil carcinoma; Oxyphilic adenocarcinoma; Basophil carcinoma; Clear cell adenocarcinoma, NOS; Granular cell carcinoma; Follicular adenocarcinoma, NOS; Papillary and follicular adenocarcinoma; Nonencapsulating sclerosing carcinoma; Adrenal cortical carcinoma; Endometroid carcinoma; Skin appendage carcinoma; Apocrine adenocarcinoma; Sebaceous adenocarcinoma; Ceruminous adenocarcinoma; Mucoepidennoid carcinoma; Cystadenocarcinoma, NOS; Papillary cystadenocarcinoma, NOS; Papillary serous cystadenocarcinoma; Mucinous cystadenocarcinoma, NOS; Mucinous adenocarcinoma; Signet ring cell carcinoma; Infiltrating duct carcinoma; Medullary carcinoma, NOS; Lobular carcinoma; Inflammatory carcinoma; Paget's disease, mammary; Acinar cell carcinoma; Adenosquamous carcinoma; Adenocarcinoma w/squamous metaplasia; Thymoma, malignant; Ovarian stromal tumor, malignant; Thecoma, malignant; Granulosa cell tumor, malignant; Androblastoma, malignant; Sertoli cell carcinoma; Leydig cell tumor, malignant; Lipid cell tumor, malignant; Paraganglioma, malignant; Extra-mammary paraganglioma, malignant; Pheochromocytoma; Glomangiosarcoma; Malignant melanoma, NOS; Amelanotic melanoma; Superficial spreading melanoma; Malig melanoma in giant pigmented nevas; Epithelioid cell melanoma; Blue nevus, malignant; Sarcoma, NOS; Fibrosarcoma, NOS; Fibrous histiocytoma, malignant; Myxosarcoma; Liposarcoma, NOS; Leiomyosarcoma, NOS; Rhabdomyosarcoma, NOS; Embryonal rhabdomyosarcoma; Alveolar rhabdomyosarcoma; Stromal sarcoma, NOS; Mixed tumor, malignant, NOS; Mullerian mixed tumor; Nephroblastoma; Hepatoblastoma; Carcinosarcoma, NOS; Mesenchymoma, malignant; Brenner tumor, malignant; Phyllodes tumor, malignant; Synovial sarcoma, NOS; Mesothelioma, malignant; Dysgerminoma; Embryonal carcinoma, NOS; Teratoma, malignant, NOS; Struma ovarii, malignant; Choriocarcinoma; Mesonephroma, malignant; Hemangiosarcoma; Hemangioendothelioma, malignant; Kaposi's sarcoma; Hemangiopericytoma, malignant; Lymphangiosarcoma; Osteosarcoma, NOS; Juxtacortical osteosarcoma; Chondrosarcoma, NOS; Chondroblastoma, malignant; Mesenchyrnal chondrosarcoma; Giant cell tumor of bone; Ewing's sarcoma; Odontogenic tumor, malignant; Ameloblastic odontosarcoma; Ameloblastoma, malignant; Ameloblastic fibrosarcoma; Pinealoma, malignant; Chordoma; Glioma, malignant; Ependymoma, NOS; Astrocytoma, NOS; Protoplasmic astrocytoma; Fibrillary astrocytoma; Astroblastoma; Glioblastoma, NOS; Oligodendroglioma, NOS; Oligodendroblastoma; Primitive neuroectodermal; Cerebellar sarcoma, NOS; Ganglioneuroblastoma; Neuroblastoma, NOS; Retinoblastoma, NOS; Olfactory neurogenic tumor; Meningioma, malignant; Neurofibrosarcoma; Neurilemmoma, malignant; Granular cell tumor, malignant; Malignant lymphoma, NOS; Hodgkin's disease, NOS; Hodgkin's; paragranuloma, NOS; Malignant lymphoma, small lymphocytic; Malignant lymphoma, large cell, diffuse; Malignant lymphoma, follicular, NOS; Mycosis fungoides; Other specified non-Hodgkin's lymphomas; Malignant histiocytosis; Multiple myeloma; Mast cell sarcoma; Immunoproliferative small intestinal disease; Leukemia, NOS; Lymphoid leukemia, NOS; Plasma cell leukemia; Erythroleukemia; Lymphosarcoma cell leukemia; Myeloid leukemia, NOS; Basophilic leukemia; Eosinophilic leukemia; Monocytic leukemia, NOS; Mast cell leukemia; Megakaryoblastic leukemia; Myeloid sarcoma; and Hairy cell leukemia.

[0046] In addition, the CA genes may be involved in other diseases such as, but not limited to, diseases associated with aging or neurodegeneration.

[0047] “Association” in this context means that the nucleotide or protein sequences are either differentially expressed, activated, inactivated or altered in cancers as compared to normal tissue. As outlined below, CA sequences include those that are up-regulated (i.e. expressed at a higher level), as well as those that are down-regulated (i.e. expressed at a lower level), in cancers. CA sequences also include sequences that have been altered (i.e., truncated sequences or sequences with substitutions, deletions or insertions, including point mutations) and show either the same expression profile or an altered profile. In a preferred embodiment, the CA sequences are from humans; however, as will be appreciated by those in the art, CA sequences from other organisms may be useful in animal models of disease and drug evaluation; thus, other CA sequences are provided, from vertebrates, including mammals, including rodents (rats, mice, hamsters, guinea pigs, etc.), primates, and farm animals (including sheep, goats, pigs, cows, horses, etc). In some cases, prokaryotic CA sequences may be useful. CA sequences from other organisms may be obtained using the techniques outlined below.

[0048] CA sequences include both nucleic acid and amino acid sequences. In a preferred embodiment, the CA sequences are recombinant nucleic acids. By the term “recombinant nucleic acid” herein is meant nucleic acid, originally formed in vitro, in general, by the manipulation of nucleic acid by polymerases and endonucleases, in a form not normally found in nature. Thus a recombinant nucleic acid is also an isolated nucleic acid, in a linear form, or cloned in a vector formed in vitro by ligating DNA molecules that are not normally joined, are both considered recombinant for the purposes of this invention. It is understood that once a recombinant nucleic acid is made and reintroduced into a host cell or organism, it will replicate using the in vivo cellular machinery of the host cell rather than in vitro manipulations; however, such nucleic acids, once produced recombinantly, although subsequently replicated in vivo, are still considered recombinant or isolated for the purposes of the invention. As used herein a “polynucleotide” or “nucleic acid” is a polymeric form of nucleotides of any length, either ribonucleotides or deoxyribonucleotides. This term refers only to the primary structure of the molecule. Thus, this term includes double- and single-stranded DNA and RNA. It also includes known types of modifications, for example, labels which are known in the art, methylation, “caps”, substitution of one or more of the naturally occurring nucleotides with an analog, internucleotide modifications such as, for example, those with uncharged linkages (e.g., phosphorothioates, phosphorodithioates, etc.), those containing pendant moieties, such as, for example proteins (including e.g., nucleases, toxins, antibodies, signal peptides, poly-L-lysine, etc.), those with intercalators (e.g., acridine, psoralen, etc.), those containing chelators (e.g., metals, radioactive metals, etc.), those containing alkylators, those with modified linkages (e.g., alpha anomeric nucleic acids, etc.), as well as unmodified forms of the polynucleotide.

[0049] As used herein, a polynucleotide “derived from” a designated sequence refers to a polynucleotide sequence which is comprised of a sequence of approximately at least about 6 nucleotides, preferably at least about 8 nucleotides, more preferably at least about 10-12 nucleotides, and even more preferably at least about 15-20 nucleotides corresponding to a region of the designated nucleotide sequence. “Corresponding” means homologous to or complementary to the designated sequence. Preferably, the sequence of the region from which the polynucleotide is derived is homologous to or complementary to a sequence that is unique to a CA gene.

[0050] Similarly, a “recombinant protein” is a protein made using recombinant techniques, i.e. through the expression of a recombinant nucleic acid as depicted above. A recombinant protein is distinguished from naturally occurring protein by at least one or more characteristics. For example, the protein may be isolated or purified away from some or all of the proteins and compounds with which it is normally associated in its wild type host, and thus may be substantially pure. For example, an isolated protein is unaccompanied by at least some of the material with which it is normally associated in its natural state, preferably constituting at least about 0.5%, more preferably at least about 5% by weight of the total protein in a given sample. A substantially pure protein comprises about 50-75% by weight of the total protein, with about 80% being preferred, and about 90% being particularly preferred. The definition includes the production of a CA protein from one organism in a different organism or host cell. Alternatively, the protein may be made at a significantly higher concentration than is normally seen, through the use of an inducible promoter or high expression promoter, such that the protein is made at increased concentration levels. Alternatively, the protein may be in a form not normally found in nature, as in the addition of an epitope tag or amino acid substitutions, insertions and deletions, as discussed below.

[0051] In a preferred embodiment, the CA sequences are nucleic acids. As will be appreciated by those in the art and is more fully outlined below, CA sequences are useful in a variety of applications, including diagnostic applications, which will detect naturally occurring nucleic acids, as well as screening applications; for example, biochips comprising nucleic acid probes to the CA sequences can be generated. In the broadest sense, use of “nucleic acid,” “polynucleotide” or “oligonucleotide” or equivalents herein means at least two nucleotides covalently linked together. In some embodiments, an oligonucleotide is an oligomer of 6, 8, 10, 12, 20, 30 or up to 100 nucleotides. A “polynucleotide” or “oligonucleotide” may comprise DNA, RNA, PNA or a polymer of nucleotides linked by phosphodiester and/or any alternate bonds.

[0052] A nucleic acid of the present invention generally contains phosphodiester bonds, although in some cases, as outlined below (for example, in antisense applications or when a nucleic acid is a candidate drug agent), nucleic acid analogs may have alternate backbones, comprising, for example, phosphoramidate (Beaucage et al., Tetrahedron 49(10):1925 (1993) and references therein; Letsinger, J. Org. Chem. 35:3800 (1970); Sprinzl et al., Eur. J. Biochem. 81:579 (1977); Letsinger et al., Nucl. Acids Res. 14:3487 (1986); Sawai et al, Chem. Lett. 805 (1984), Letsinger et al., J. Am. Chem. Soc. 110:4470 (1988); and Pauwels et al., Chemica Scripta 26:141 91986)), phosphorothioate (Mag et al., Nucleic Acids Res. 19:1437 (1991); and U.S. Pat. No. 5,644,048), phosphorodithioate (Briu et al., J. Am. Chem. Soc. 111:2321 (1989), O-methylphosphoroamidite linkages (see Eckstein, Oligonucleotides and Analogues: A Practical Approach, Oxford University Press), and peptide nucleic acid backbones and linkages (see Egholm, J. Am. Chem. Soc. 114:1895 (1992); Meier et al., Chem. Int. Ed. Engl. 31:1008 (1992); Nielsen, Nature, 365:566 (1993); Carlsson et al., Nature 380:207 (1996), all of which are incorporated by reference). Other analog nucleic acids include those with positive backbones (Denpcy et al., Proc. Natl. Acad. Sci. USA 92:6097 (1995); non-ionic backbones (U.S. Pat. Nos. 5,386,023, 5,637,684, 5,602,240, 5,216,141 and 4,469,863; Kiedrowshi et al., Angew. Chem. Intl. Ed. English 30:423 (1991); Letsinger et al., J. Am. Chem. Soc. 110:4470 (1988); Letsinger et al., Nucleoside & Nucleotide 13:1597 (1994); Chapters 2 and 3, ASC Symposium Series 580, “Carbohydrate Modifications in Antisense Research”, Ed. Y. S. Sanghui and P. Dan Cook; Mesmaeker et al., Bioorganic & Medicinal Chem. Lett. 4:395 (1994); Jeffs et al., J. Biomolecular NMR 34:17 (1994); Tetrahedron Lett. 37:743 (1996)) and non-ribose backbones, including those described in U.S. Pat. Nos. 5,235,033 and 5,034,506, and Chapters 6 and 7, ASC Symposium Series 580, “Carbohydrate Modifications in Antisense Research”, Ed. Y. S. Sanghui and P. Dan Cook. Nucleic acids containing one or more carbocyclic sugars are also included within one definition of nucleic acids (see Jenkins et al., Chem. Soc. Rev. (1995) pp 169-176). Several nucleic acid analogs are described in Rawls, C & E News Jun. 2, 1997 page 35. All of these references are hereby expressly incorporated by reference. These modifications of the ribose-phosphate backbone may be done for a variety of reasons, for example to increase the stability and half-life of such molecules in physiological environments for use in anti-sense applications or as probes on a biochip.

[0053] As will be appreciated by those in the art, all of these nucleic acid analogs may find use in the present invention. In addition, mixtures of naturally occurring nucleic acids and analogs can be made; alternatively, mixtures of different nucleic acid analogs, and mixtures of naturally occurring nucleic acids and analogs may be made.

[0054] The nucleic acids may be single stranded or double stranded, as specified, or contain portions of both double stranded or single stranded sequence. As will be appreciated by those in the art, the depiction of a single strand “Watson” also defines the sequence of the other strand “Crick”; thus the sequences described herein also includes the complement of the sequence. The nucleic acid may be DNA, both genomic and cDNA, RNA, or a hybrid, where the nucleic acid contains any combination of deoxyribo- and ribo-nucleotides, and any combination of bases, including uracil, adenine, thymine, cytosine, guanine, inosine, xanthine, hypoxanthine, isocytosine, isoguanine, etc. As used herein, the term “nucleoside” includes nucleotides and nucleoside and nucleotide analogs, and modified nucleosides such as amino modified nucleosides. In addition, “nucleoside” includes non-naturally occurring analog structures. Thus for example the individual units of a peptide nucleic acid, each containing a base, are referred to herein as a nucleoside.

[0055] As used herein, the term “tag,” “sequence tag” or “primer tag sequence” refers to an oligonucleotide with specific nucleic acid sequence that serves to identify a batch of polynucleotides bearing such tags therein. Polynucleotides from the same biological source are covalently tagged with a specific sequence tag so that in subsequent analysis the polynucleotide can be identified according to its source of origin. The sequence tags also serve as primers for nucleic acid amplification reactions.

[0056] A “microarray” is a linear or two-dimensional array of preferably discrete regions, each having a defined area, formed on the surface of a solid support. The density of the discrete regions on a microarray is determined by the total numbers of target polynucleotides to be detected on the surface of a single solid phase support, preferably at least about 50/cm², more preferably at least about 100/cm², even more preferably at least about 500/cm², and still more preferably at least about 1,000/cm². As used herein, a DNA microarray is an array of oligonucleotide primers placed on a chip or other surfaces used to amplify or clone target polynucleotides. Since the position of each particular group of primers in the array is known, the identities of the target polynucleotides can be determined based on their binding to a particular position in the microarray.

[0057] A “linker” is a synthetic oligodeoxyribonucleotide that contains a restriction site. A linker may be blunt end-ligated onto the ends of DNA fragments to create restriction sites that can be used in the subsequent cloning of the fragment into a vector molecule.

[0058] The term “label” refers to a composition capable of producing a detectable signal indicative of the presence of the target polynucleotide in an assay sample. Suitable labels include radioisotopes, nucleotide chromophores, enzymes, substrates, fluorescent molecules, chemiluminescent moieties, magnetic particles, bioluminescent moieties, and the like. As such, a label is any composition detectable by spectroscopic, photochemical, biochemical, immunochemical, electrical, optical, chemical, or any other appropriate means. The term “label” is used to refer to any chemical group or moiety having a detectable physical property or any compound capable of causing a chemical group or moiety to exhibit a detectable physical property, such as an enzyme that catalyzes conversion of a substrate into a detectable product. The term “label” also encompasses compounds that inhibit the expression of a particular physical property. The label may also be a compound that is a member of a binding pair, the other member of which bears a detectable physical property.

[0059] The term “support” refers to conventional supports such as beads, particles, dipsticks, fibers, filters, membranes, and silane or silicate supports such as glass slides.

[0060] The term “amplify” is used in the broad sense to mean creating an amplification product which may include, for example, additional target molecules, or target-like molecules or molecules complementary to the target molecule, which molecules are created by virtue of the presence of the target molecule in the sample. In the situation where the target is a nucleic acid, an amplification product can be made enzymatically with DNA or RNA polymerases or reverse transcriptases.

[0061] As used herein, a “biological sample” refers to a sample of tissue or fluid isolated from an individual, including but not limited to, for example, blood, plasma, serum, spinal fluid, lymph fluid, skin, respiratory, intestinal and genitourinary tracts, tears, saliva, milk, cells (including but not limited to blood cells), tumors, organs, and also samples of in vitro cell culture constituents.

[0062] The term “biological sources” as used herein refers to the sources from which the target polynucleotides are derived. The source can be of any form of “sample” as described above, including but not limited to, cell, tissue or fluid. “Different biological sources” can refer to different cells/tissues/organs of the same individual, or cells/tissues/organs from different individuals of the same species, or cells/tissues/organs from different species.

### Cancer-Associated Sequences

[0063] The CA sequences of the invention were initially identified by infection of mice with a retrovirus such as murine leukemia virus (MLV) resulting in lymphoma. Retroviruses have a genome that is made out of RNA. After a retrovirus infects a host cell, a double stranded DNA copy of the retrovirus genome (a “provirus”) is inserted into the genomic DNA of the host cell. The integrated provirus may affect the expression of host genes at or near the site of integration—a phenomenon known as retroviral insertional mutagenesis. Possible changes in the expression of host cell genes include: (i) increased expression of genes near the site of integration resulting from the proximity of elements in the provirus that act as transcriptional promoters and enhancers, (ii) functional inactivation of a gene caused by the integration of a provirus into the gene itself thus preventing the synthesis of a functional gene product, or (iii) expression of a mutated protein that has a different activity to the normal protein. Typically such a protein would be prematurely truncated and lack a regulatory domain near the C terminus. Such a protein might be constitutively active, or act as a dominant negative inhibitor of the normal protein. For example, retrovirus enhancers, including that of SL3-3, are known to act on genes up to approximately 200 kilobases from the insertion site. Moreover, many of these sequences are also involved in other cancers and disease states. Sequences of mouse genes according to this invention, that are identified in this manner are shown as mDxx-yyy in Tables 1-152.

[0064] A CA sequence can be initially identified by substantial nucleic acid and/or amino acid sequence homology to the CA sequences outlined herein. Such homology can be based upon the overall nucleic acid or amino acid sequence, and is generally determined as outlined below, using either homology programs or hybridization conditions.

[0065] In one embodiment, CA sequences are those that are up-regulated in cancers; that is, the expression of these genes is higher in cancer tissue as compared to normal tissue of the same differentiation stage. “Up-regulation” as used herein means increased expression by about 50%, preferably about 100%, more preferably about 150% to about 200%, with up-regulation from 300% to 1000% being preferred.

[0066] In another embodiment, CA sequences are those that are down-regulated in cancers; that is, the expression of these genes is lower in cancer tissue as compared to normal tissue of the same differentiation stage. “Down-regulation” as used herein means decreased expression by about 50%, preferably about 100%, more preferably about 150% to about 200%, with down-regulation from 300% to 1000% to no expression being preferred.

[0067] In yet another embodiment, CA sequences are those that have altered sequences but show either the same or an altered expression profile as compared to normal lymphoid tissue of the same differentiation stage. “Altered CA sequences” as used herein also refers to sequences that are truncated, contain insertions or contain point mutations.

[0068] CA proteins of the present invention may be classified as secreted proteins, transmembrane proteins or intracellular proteins. In a preferred embodiment the CA protein is an intracellular protein. Intracellular proteins may be found in the cytoplasm and/or in the nucleus. Intracellular proteins are involved in all aspects of cellular function and replication (including, for example, signaling pathways); aberrant expression of such proteins results in unregulated or disregulated cellular processes. For example, many intracellular proteins have enzymatic activity such as protein kinase activity, protein phosphatase activity, protease activity, nucleotide cyclase activity, polymerase activity and the like. Intracellular proteins also serve as docking proteins that are involved in organizing complexes of proteins, or targeting proteins to various subcellular localizations, and are involved in maintaining the structural integrity of organelles.

[0069] An increasingly appreciated concept in characterizing intracellular proteins is the presence in the proteins of one or more motifs for which defined functions have been attributed. In addition to the highly conserved sequences found in the enzymatic domain of proteins, highly conserved sequences have been identified in proteins that are involved in protein-protein interaction. For example, Src-homology-2 (SH2) domains bind tyrosine-phosphorylated targets in a sequence dependent manner. PTB domains, which are distinct from SH2 domains, also bind tyrosine phosphorylated targets. SH3 domains bind to proline-rich targets. In addition, PH domains, tetratricopeptide repeats and WD domains to name only a few, have been shown to mediate protein-protein interactions. Some of these may also be involved in binding to phospholipids or other second messengers. As will be appreciated by one of ordinary skill in the art, these motifs can be identified on the basis of primary sequence; thus, an analysis of the sequence of proteins may provide insight into both the enzymatic potential of the molecule and/or molecules with which the protein may associate.

[0070] In a preferred embodiment, the CA sequences are transmembrane proteins. Transmembrane proteins are molecules that span the phospholipid bilayer of a cell. They may have an intracellular domain, an extracellular domain, or both. The intracellular domains of such proteins may have a number of functions including those already described for intracellular proteins. For example, the intracellular domain may have enzymatic activity and/or may serve as a binding site for additional proteins. Frequently the intracellular domain of transmembrane proteins serves both roles. For example certain receptor tyrosine kinases have both protein kinase activity and SH2 domains. In addition, autophosphorylation of tyrosines on the receptor molecule itself creates binding sites for additional SH2 domain containing proteins.

[0071] Transmembrane proteins may contain from one to many transmembrane domains. For example, receptor tyrosine kinases, certain cytokine receptors, receptor guanylyl cyclases and receptor serine/threonine protein kinases contain a single transmembrane domain. However, various other proteins including channels and adenylyl cyclases contain numerous transmembrane domains. Many important cell surface receptors are classified as “seven transmembrane domain” proteins, as they contain 7 membrane spanning regions. Important transmembrane protein receptors include, but are not limited to insulin receptor, insulin-like growth factor receptor, human growth hormone receptor, glucose transporters, transferrin receptor, epidermal growth factor receptor, low density lipoprotein receptor, leptin receptor, interleukin receptors, e.g. IL-1 receptor, IL-2 receptor, etc. CA proteins may be derived from genes that regulate apoptosis (IL-3, GM-CSF and Bcl-x) or are shown to have a role in the regulation of apoptosis.

[0072] Characteristics of transmembrane domains include approximately 20 consecutive hydrophobic amino acids that may be followed by charged amino acids. Therefore, upon analysis of the amino acid sequence of a particular protein, the localization and number of transmembrane domains within the protein may be predicted.

[0073] The extracellular domains of transmembrane proteins are diverse; however, conserved motifs are found repeatedly among various extracellular domains. Conserved structure and/or functions have been ascribed to different extracellular motifs. For example, cytokine receptors are characterized by a cluster of cysteines and a WSXWS (W=tryptophan, S=serine, X=any amino acid) motif. Immounoglobulin-like domains are highly conserved. Mucin-like domains may be involved in cell adhesion and leucine-rich repeats participate in protein-protein interactions.

[0074] Many extracellular domains are involved in binding to other molecules. In one aspect, extracellular domains are receptors. Factors that bind the receptor domain include circulating ligands, which may be peptides, proteins, or small molecules such as adenosine and the like. For example, growth factors such as EGF, FGF and PDGF are circulating growth factors that bind to their cognate receptors to initiate a variety of cellular responses. Other factors include cytokines, mitogenic factors, neurotrophic factors and the like. Extracellular domains also bind to cell-associated molecules. In this respect, they mediate cell-cell interactions. Cell-associated ligands can be tethered to the cell for example via a glycosylphosphatidylinositol (GPI) anchor, or may themselves be transmembrane proteins. Extracellular domains also associate with the extracellular matrix and contribute to the maintenance of the cell structure.

[0075] CA proteins that are transmembrane are particularly preferred in the present invention as they are good targets for immunotherapeutics, as are described herein. In addition, as outlined below, transmembrane proteins can be also useful in imaging modalities.

[0076] It will also be appreciated by those in the art that a transmembrane protein can be made soluble by removing transmembrane sequences, for example through recombinant methods. Furthermore, transmembrane proteins that have been made soluble can be made to be secreted through recombinant means by adding an appropriate signal sequence.

[0077] In a preferred embodiment, the CA proteins are secreted proteins; the secretion of which can be either constitutive or regulated. These proteins have a signal peptide or signal sequence that targets the molecule to the secretory pathway. Secreted proteins are involved in numerous physiological events; by virtue of their circulating nature, they serve to transmit signals to various other cell types. The secreted protein may function in an autocrine manner (acting on the cell that secreted the factor), a paracrine manner (acting on cells in close proximity to the cell that secreted the factor) or an endocrine manner (acting on cells at a distance). Thus secreted molecules find use in modulating or altering numerous aspects of physiology. CA proteins that are secreted proteins are particularly preferred in the present invention as they serve as good targets for diagnostic markers, for example for blood tests.

### CA Sequences and Homologs

[0078] A CA sequence is initially identified by substantial nucleic acid and/or amino acid sequence homology to the CA sequences outlined herein. Such homology can be based upon the overall nucleic acid or amino acid sequence, and is generally determined as outlined below, using either homology programs or hybridization conditions.

[0079] As used herein, a nucleic acid is a “CA nucleic acid” if the overall homology of the nucleic acid sequence to one of the nucleic acids of Tables 1-152 is preferably greater than about 75%, more preferably greater than about 80%, even more preferably greater than about 85% and most preferably greater than 90%. In some embodiments the homology will be as high as about 93 to 95 or 98%. In a preferred embodiment, the sequences that are used to determine sequence identity or similarity are selected from those of the nucleic acids of Tables 1-152. In another embodiment, the sequences are naturally occurring allelic variants of the sequences of the nucleic acids of Tables I-152. In another embodiment, the sequences are sequence variants as further described herein.

[0080] Homology in this context means sequence similarity or identity, with identity being preferred. A preferred comparison for homology purposes is to compare the sequence containing sequencing errors to the correct sequence. This homology will be determined using standard techniques known in the art, including, but not limited to, the local homology algorithm of Smith & Waterman, Adv. Appl. Math. 2:482 (1981), by the homology alignment algorithm of Needleman & Wunsch, J. Mol. Biol. 48:443 (1970), by the search for similarity method of Pearson & Lipman, PNAS USA 85:2444 (1988), by computerized implementations of these algorithms (GAP, BESTFIT, FASTA, and TFASTA in the Wisconsin Genetics Software Package, Genetics Computer Group, 575 Science Drive, Madison, Wis.), the Best Fit sequence program described by Devereux et al., Nucl. Acid Res. 12:387-395 (1984), preferably using the default settings, or by inspection.

[0081] One example of a useful algorithm is PILEUP. PILEUP creates a multiple sequence alignment from a group of related sequences using progressive, pairwise alignments. It can also plot a tree showing the clustering relationships used to create the alignment. PILEUP uses a simplification of the progressive alignment method of Feng & Doolittle, J. Mol. Evol. 35:351-360 (1987); the method is similar to that described by Higgins & Sharp CABIOS 5:151-153 (1989). Useful PILEUP parameters include a default gap weight of 3.00, a default gap length weight of 0.10, and weighted end gaps.

[0082] Another example of a useful algorithm is the BLAST (Basic Local Alignment Search Tool) algorithm, described in Altschul et al., J. Mol. Biol. 215, 403-410, (1990) and Karlin et al., PNAS USA 90:5873-5787 (1993). A particularly useful BLAST program is the WU-BLAST-2 program which was obtained from Altschul et al., Methods in Enzymology, 266: 460-480 (1996); http://blast.wustl.edu/]. WU-BLAST-2 uses several search parameters, most of which are set to the default values. The adjustable parameters are set with the following values: overlap span=1, overlap fraction=0.125, word threshold (T)=11. The HSP S and HSP S2 parameters are dynamic values and are established by the program itself depending upon the composition of the particular sequence and composition of the particular database against which the sequence of interest is being searched; however, the values may be adjusted to increase sensitivity. A percent amino acid sequence identity value is determined by the number of matching identical residues divided by the total number of residues of the “longer” sequence in the aligned region. The “longer” sequence is the one having the most actual residues in the aligned region (gaps introduced by WU-Blast-2 to maximize the alignment score are ignored).

[0083] Thus, “percent (%) nucleic acid sequence identity” is defined as the percentage of nucleotide residues in a candidate sequence that are identical with the nucleotide residues of the nucleic acids of Tables 1-152. A preferred method utilizes the BLASTN module of WU-BLAST-2 set to the default parameters, with overlap span and overlap fraction set to 1 and 0.125, respectively.

[0084] The alignment may include the introduction of gaps in the sequences to be aligned. In addition, for sequences which contain either more or fewer nucleotides than those of the nucleic acids of Tables 1-152, it is understood that the percentage of homology will be determined based on the number of homologous nucleosides in relation to the total number of nucleosides. Thus homology of sequences shorter than those of the sequences identified herein will be determined using the number of nucleosides in the shorter sequence.

[0085] In another embodiment of the invention, polynucleotide compositions are provided that are capable of hybridizing under moderate to high stringency conditions to a polynucleotide sequence provided herein, or a fragment thereof, or a complementary sequence thereof. Hybridization techniques are well known in the art of molecular biology. For purposes of illustration, suitable moderately stringent conditions for testing the hybridization of a polynucleotide of this invention with other polynucleotides include prewashing in a solution of 5×SSC (“saline sodium citrate”; 9 mM NaCl, 0.9 mM sodium citrate), 0.5% SDS, 1.0 mM EDTA (pH 8.0); hybridizing at 50-60° C., 5×SSC, overnight; followed by washing twice at 65° C. for 20 minutes with each of 2×, 0.5× and 0.2×SSC containing 0.1% SDS. One skilled in the art will understand that the stringency of hybridization can be readily manipulated, such as by altering the salt content of the hybridization solution and/or the temperature at which the hybridization is performed. For example, in another embodiment, suitable highly stringent hybridization conditions include those described above, with the exception that the temperature of hybridization is increased, e.g., to 60-65° C., or 65-70° C. Stringent conditions may also be achieved with the addition of destabilizing agents such as formamide.

[0086] Thus nucleic acids that hybridize under high stringency to the nucleic acids identified in the figures, or their complements, are considered CA sequences. High stringency conditions are known in the art; see for example Maniatis et al., Molecular Cloning: A Laboratory Manual, 2d Edition, 1989, and Short Protocols in Molecular Biology, ed. Ausubel, et al., both of which are hereby incorporated by reference. Stringent conditions are sequence-dependent and will be different in different circumstances. Longer sequences hybridize specifically at higher temperatures. An extensive guide to the hybridization of nucleic acids is found in Tijssen, Techniques in Biochemistry and Molecular Biology—Hybridization with Nucleic Acid Probes, “Overview of principles of hybridization and the strategy of nucleic acid assays” (1993). Generally, stringent conditions are selected to be about 5-10° C. lower than the thermal melting point (Tₘ) for the specific sequence at a defined ionic strength pH. The Tₘ is the temperature (under defined ionic strength, pH and nucleic acid concentration) at which 50% of the probes complementary to the target hybridize to the target sequence at equilibrium (as the target sequences are present in excess, at Tₘ, 50% of the probes are occupied at equilibrium). Stringent conditions will be those in which the salt concentration is less than about 1.0 M sodium ion, typically about 0.01 to 1.0 M sodium ion concentration (or other salts) at pH 7.0 to 8.3 and the temperature is at least about 30° C. for short probes (e.g. 10 to 50 nucleotides) and at least about 60° C. for longer probes (e.g. greater than 50 nucleotides). In another embodiment, less stringent hybridization conditions are used; for example, moderate or low stringency conditions may be used, as are known in the art; see Maniatis and Ausubel, supra, and Tijssen, supra.

[0087] In addition, the CA nucleic acid sequences of the invention are fragments of larger genes, i.e. they are nucleic acid segments. Alternatively, the CA nucleic acid sequences can serve as indicators of oncogene position; for example, the CA sequence may be an enhancer that activates a protooncogene. “Genes” in this context includes coding regions, non-coding regions, and mixtures of coding and non-coding regions. Accordingly, as will be appreciated by those in the art, using the sequences provided herein, additional sequences of the CA genes can be obtained, using techniques well known in the art for cloning either longer sequences or the full-length sequences; see Maniatis et al., and Ausubel, et al., supra, hereby expressly incorporated by reference. In general, this is done using PCR, for example, kinetic PCR.

### Detection of CA Expression

[0088] Once the CA nucleic acid is identified, it can be cloned and, if necessary, its constituent parts recombined to form the entire CA nucleic acid. Once isolated from its natural source, e.g., contained within a plasmid or other vector or excised therefrom as a linear nucleic acid segment, the recombinant CA nucleic acid can be further used as a probe to identify and isolate other CA nucleic acids, for example additional coding regions. It can also be used as a “precursor” nucleic acid to make modified or variant CA nucleic acids and proteins. In a preferred embodiment, once a CA gene is identified its nucleotide sequence is used to design probes specific for the CA gene.

[0089] The CA nucleic acids of the present invention are used in several ways. In a first embodiment, nucleic acid probes hybridizable to CA nucleic acids are made and attached to biochips to be used in screening and diagnostic methods, or for gene therapy and/or antisense applications. Alternatively, the CA nucleic acids that include coding regions of CA proteins can be put into expression vectors for the expression of CA proteins, again either for screening purposes or for administration to a patient.

[0090] Recent developments in DNA microarray technology make it possible to conduct a large scale assay of a plurality of target CA nucleic acid molecules on a single solid phase support. U.S. Pat. No. 5,837,832 (Chee et al) and related patent applications describe immobilizing an array of oligonucleotide probes for hybridization and detection of specific nucleic acid sequences in a sample. Target polynucleotides of interest isolated from a tissue of interest are hybridized to the DNA chip and the specific sequences detected based on the target polynucleotides' preference and degree of hybridization at discrete probe locations. One important use of arrays is in the analysis of differential gene expression, where the profile of expression of genes in different cells, often a cell of interest and a control cell, is compared and any differences in gene expression among the respective cells are identified. Such information is useful for the identification of the types of genes expressed in a particular cell or tissue type and diagnosis of cancer conditions based on the expression profile.

[0091] Typically, RNA from the sample of interest is subjected to reverse transcription to obtain labeled cDNA. See U.S. Pat. No. 6,410,229 (Lockhart et al.) The cDNA is then hybridized to oligonucleotides or cDNAs of known sequence arrayed on a chip or other surface in a known order. The location of the oligonucleotide to which the labeled cDNA hybridizes provides sequence information on the cDNA, while the amount of labeled hybridized RNA or cDNA provides an estimate of the relative representation of the RNA or cDNA of interest. See Schena, et al. Science 270:467-470 (1995). For example, use of a cDNA microarray to analyze gene expression patterns in human cancer is described by DeRisi, et al. (Nature Genetics 14:457-460 (1996)).

[0092] In a preferred embodiment, nucleic acid probes corresponding to CA nucleic acids (both the nucleic acid sequences outlined in the figures and/or the complements thereof) are made. Typically, these probes are synthesized based on the disclosed sequences of this invention. The nucleic acid probes attached to the biochip are designed to be substantially complementary to the CA nucleic acids, i.e. the target sequence (either the target sequence of the sample or to other probe sequences, for example in sandwich assays), such that specific hybridization of the target sequence and the probes of the present invention occurs. As outlined below, this complementarity need not be perfect, in that there may be any number of base pair mismatches that will interfere with hybridization between the target sequence and the single stranded nucleic acids of the present invention. It is expected that the overall homology of the genes at the nucleotide level probably will be about 40% or greater, probably about 60% or greater, and even more probably about 80% or greater; and in addition that there will be corresponding contiguous sequences of about 8-12 nucleotides or longer. However, if the number of mutations is so great that no hybridization can occur under even the least stringent of hybridization conditions, the sequence is not a complementary target sequence. Thus, by “substantially complementary” herein is meant that the probes are sufficiently complementary to the target sequences to hybridize under normal reaction conditions, particularly high stringency conditions, as outlined herein. Whether or not a sequence is unique to a CA gene according to this invention can be determined by techniques known to those of skill in the art. For example, the sequence can be compared to sequences in databanks, e.g., GeneBank, to determine whether it is present in the uninfected host or other organisms. The sequence can also be compared to the known sequences of other viral agents, including those that are known to induce cancer.

[0093] A nucleic acid probe is generally single stranded but can be partly single and partly double stranded. The strandedness of the probe is dictated by the structure, composition, and properties of the target sequence. In general, the oligonucleotide probes range from about 6, 8, 10, 12, 15, 20, 30 to about 100 bases long, with from about 10 to about 80 bases being preferred, and from about 30 to about 50 bases being particularly preferred. That is, generally entire genes are rarely used as probes. In some embodiments, much longer nucleic acids can be used, up to hundreds of bases. The probes are sufficiently specific to hybridize to complementary template sequence under conditions known by those of skill in the art. The number of mismatches between the probes sequences and their complementary template (target) sequences to which they hybridize during hybridization generally do not exceed 15%, usually do not exceed 10% and preferably do not exceed 5%, as determined by FASTA (default settings).

[0094] Oligonucleotide probes can include the naturally-occurring heterocyclic bases normally found in nucleic acids (uracil, cytosine, thymine, adenine and guanine), as well as modified bases and base analogues. Any modified base or base analogue compatible with hybridization of the probe to a target sequence is useful in the practice of the invention. The sugar or glycoside portion of the probe can comprise deoxyribose, ribose, and/or modified forms of these sugars, such as, for example, 2′-O-alkyl ribose. In a preferred embodiment, the sugar moiety is 2′-deoxyribose; however, any sugar moiety that is compatible with the ability of the probe to hybridize to a target sequence can be used.

[0095] In one embodiment, the nucleoside units of the probe are linked by a phosphodiester backbone, as is well known in the art. In additional embodiments, internucleotide linkages can include any linkage known to one of skill in the art that is compatible with specific hybridization of the probe including, but not limited to phosphorothioate, methylphosphonate, sulfamate (e.g. U.S. Pat. No. 5,470,967) and polyamide (i.e., peptide nucleic acids). Peptide nucleic acids are described in Nielsen et al. (1991) Science 254: 1497-1500, U.S. Pat. No. 5,714,331, and Nielsen (1999) Curr. Opin. Biotechnol. 10:71-75.

[0096] In certain embodiments, the probe can be a chimeric molecule; i.e., can comprise more than one type of base or sugar subunit, and/or the linkages can be of more than one type within the same primer. The probe can comprise a moiety to facilitate hybridization to its target sequence, as are known in the art, for example, intercalators and/or minor groove binders. Variations of the bases, sugars, and internucleoside backbone, as well as the presence of any pendant group on the probe, will be compatible with the ability of the probe to bind, in a sequence-specific fashion, with its target sequence. A large number of structural modifications, both known and to be developed, are possible within these bounds. Advantageously, the probes according to the present invention may have structural characteristics such that they allow the signal amplification, such structural characteristics being, for example, branched DNA probes as those described by Urdea et al. (Nucleic Acids Symp. Ser., 24:197-200 (1991)) or in the European Patent No. EP-0225,807. Moreover, synthetic methods for preparing the various heterocyclic bases, sugars, nucleosides and nucleotides that form the probe, and preparation of oligonucleotides of specific predetermined sequence, are well-developed and known in the art. A preferred method for oligonucleotide synthesis incorporates the teaching of U.S. Pat. No. 5,419,966.

[0097] Multiple probes may be designed for a particular target nucleic acid to account for polymorphism and/or secondary structure in the target nucleic acid, redundancy of data and the like. In some embodiments, where more than one probe per sequence is used, either overlapping probes or probes to different sections of a single target CA gene are used. That is, two, three, four or more probes, with three being preferred, are used to build in a redundancy for a particular target. The probes can be overlapping (i.e. have some sequence in common), or specific for distinct sequences of a CA gene. When multiple target polynucleotides are to be detected according to the present invention, each probe or probe group corresponding to a particular target polynucleotide is situated in a discrete area of the microarray.

[0098] Probes may be in solution, such as in wells or on the surface of a micro-array, or attached to a solid support. Examples of solid support materials that can be used include a plastic, a ceramic, a metal, a resin, a gel and a membrane. Useful types of solid supports include plates, beads, magnetic material, microbeads, hybridization chips, membranes, crystals, ceramics and self-assembling monolayers. A preferred embodiment comprises a two-dimensional or three-dimensional matrix, such as a gel or hybridization chip with multiple probe binding sites (Pevzner et al., J. Biomol. Struc. & Dyn. 9:399-410, 1991; Maskos and Southern, Nuc. Acids Res. 20:1679-84, 1992). Hybridization chips can be used to construct very large probe arrays that are subsequently hybridized with a target nucleic acid. Analysis of the hybridization pattern of the chip can assist in the identification of the target nucleotide sequence. Patterns can be manually or computer analyzed, but it is clear that positional sequencing by hybridization lends itself to computer analysis and automation. Algorithms and software, which have been developed for sequence reconstruction, are applicable to the methods described herein (R. Drmanac et al., J. Biomol. Struc. & Dyn. 5:1085-1102, 1991; P. A. Pevzner, J. Biomol. Struc. & Dyn. 7:63-73, 1989).

[0099] As will be appreciated by those in the art, nucleic acids can be attached or immobilized to a solid support in a wide variety of ways. By “immobilized” herein is meant the association or binding between the nucleic acid probe and the solid support is sufficient to be stable under the conditions of binding, washing, analysis, and removal as outlined below. The binding can be covalent or non-covalent. By “non-covalent binding” and grammatical equivalents herein is meant one or more of either electrostatic, hydrophilic, and hydrophobic interactions. Included in non-covalent binding is the covalent attachment of a molecule, such as streptavidin, to the support and the non-covalent binding of the biotinylated probe to the streptavidin. By “covalent binding” and grammatical equivalents herein is meant that the two moieties, the solid support and the probe, are attached by at least one bond, including sigma bonds, pi bonds and coordination bonds. Covalent bonds can be formed directly between the probe and the solid support or can be formed by a cross linker or by inclusion of a specific reactive group on either the solid support or the probe or both molecules. Immobilization may also involve a combination of covalent and non-covalent interactions.

[0100] Nucleic acid probes may be attached to the solid support by covalent binding such as by conjugation with a coupling agent or by, covalent or non-covalent binding such as electrostatic interactions, hydrogen bonds or antibody-antigen coupling, or by combinations thereof. Typical coupling agents include biotin/avidin, biotin/streptavidin, Staphylococcus aureus protein A/IgG antibody F_{c} fragment, and streptavidin/protein A chimeras (T. Sano and C. R. Cantor, Bio/Technology 9:1378-81 (1991)), or derivatives or combinations of these agents. Nucleic acids may be attached to the solid support by a photocleavable bond, an electrostatic bond, a disulfide bond, a peptide bond, a diester bond or a combination of these sorts of bonds. The array may also be attached to the solid support by a selectively releasable bond such as 4,4′-dimethoxytrityl or its derivative. Derivatives which have been found to be useful include 3 or 4 [bis-(4-methoxyphenyl)]-methyl-benzoic acid, N-succinimidyl-3 or 4 [bis-(4-methoxyphenyl)]-methyl-benzoic acid, N-succinimidyl-3 or 4 [bis-(4-methoxyphenyl)]-hydroxymethyl-benzoic acid, N-succinimidyl-3 or 4 [bis-(4-methoxyphenyl)]-chloromethyl-benzoic acid, and salts of these acids.

[0101] In general, the probes are attached to the biochip in a wide variety of ways, as will be appreciated by those in the art. As described herein, the nucleic acids can either be synthesized first, with subsequent attachment to the biochip, or can be directly synthesized on the biochip.

[0102] The biochip comprises a suitable solid substrate. By “substrate” or “solid support” or other grammatical equivalents herein is meant any material that can be modified to contain discrete individual sites appropriate for the attachment or association of the nucleic acid probes and is amenable to at least one detection method. The solid phase support of the present invention can be of any solid materials and structures suitable for supporting nucleotide hybridization and synthesis. Preferably, the solid phase support comprises at least one substantially rigid surface on which the primers can be immobilized and the reverse transcriptase reaction performed. The substrates with which the polynucleotide microarray elements are stably associated may be fabricated from a variety of materials, including plastics, ceramics, metals, acrylamide, cellulose, nitrocellulose, glass, polystyrene, polyethylene vinyl acetate, polypropylene, polymethacrylate, polyethylene, polyethylene oxide, polysilicates, polyearbonates, Teflon®, fluorocarbons, nylon, silicon rubber, polyanhydrides, polyglycolic acid, polylactic acid, polyorthoesters, polypropylfumerate, collagen, glycosaminoglycans, and polyamino acids. Substrates may be two-dimensional or three-dimensional in form, such as gels, membranes, thin films, glasses, plates, cylinders, beads, magnetic beads, optical fibers, woven fibers, etc. A preferred form of array is a three-dimensional array. A preferred three-dimensional array is a collection of tagged beads. Each tagged bead has different primers attached to it. Tags are detectable by signaling means such as color (Luminex, Illumina) and electromagnetic field (Pharmaseq) and signals on tagged beads can even be remotely detected (e.g., using optical fibers). The size of the solid support can be any of the standard microarray sizes, useful for DNA micro array technology, and the size may be tailored to fit the particular machine being used to conduct a reaction of the invention. In general, the substrates allow optical detection and do not appreciably fluoresce.

[0103] In a preferred embodiment, the surface of the biochip and the probe may be derivatized with chemical functional groups for subsequent attachment of the two. Thus, for example, the biochip is derivatized with a chemical functional group including, but not limited to, amino groups, carboxy groups, oxo groups and thiol groups, with amino groups being particularly preferred. Using these functional groups, the probes can be attached using functional groups on the probes. For example, nucleic acids containing amino groups can be attached to surfaces comprising amino groups, for example using linkers as are known in the art; for example, homo- or hetero-biffunctional linkers as are well known (see 1994 Pierce Chemical Company catalog, technical section on cross-linkers, pages 155-200, incorporated herein by reference). In addition, in some cases, additional linkers, such as alkyl groups (including substituted and heteroalkyl groups) may be used.

[0104] In this embodiment, the oligonucleotides are synthesized as is known in the art, and then attached to the surface of the solid support. As will be appreciated by those skilled in the art, either the 5′ or 3′ terminus may be attached to the solid support, or attachment may be via an internal nucleoside. In an additional embodiment, the immobilization to the solid support may be very strong, yet non-covalent. For example, biotinylated oligonucleotides can be made, which bind to surfaces covalently coated with streptavidin, resulting in attachment.

[0105] The arrays may be produced according to any convenient methodology, such as preforming the polynucleotide microarray elements and then stably associating them with the surface. Alternatively, the oligonucleotides may be synthesized on the surface, as is known in the art. A number of different array configurations and methods for their production are known to those of skill in the art and disclosed in WO 95/25116 and WO 95/35505 (photolithographic techniques), U.S. Pat. No. 5,445,934 (in situ synthesis by photolithography), U.S. Pat. No. 5,384,261 (in situ synthesis by mechanically directed flow paths); and U.S. Pat. No. 5,700,637 (synthesis by spotting, printing or coupling); the disclosure of which are herein incorporated in their entirety by reference. Another method for coupling DNA to beads uses specific ligands attached to the end of the DNA to link to ligand-binding molecules attached to a bead. Possible ligand-binding partner pairs include biotin-avidin/streptavidin, or various antibody/antigen pairs such as digoxygenin-antidigoxygenin antibody (Smith et al., “Direct Mechanical Measurements of the Elasticity of Single DNA Molecules by Using Magnetic Beads,” Science 258:1122-1126 (1992)). Covalent chemical attachment of DNA to the support can be accomplished by using standard coupling agents to link the 5′-phosphate on the DNA to coated microspheres through a phosphoamidate bond. Methods for immobilization of oligonucleotides to solid-state substrates are well established. See Pease et al, Proc. Natl. Acad. Sci. USA 91(11):5022-5026 (1994). A preferred method of attaching oligonucleotides to solid-state substrates is described by Guo et al, Nucleic Acids Res. 22:5456-5465 (1994). Immobilization can be accomplished either by in situ DNA synthesis (Maskos and Southern, Nucleic Acids Research, 20:1679-1684 (1992) or by covalent attachment of chemically synthesized oligonucleotides (Guo et al., supra) in combination with robotic arraying technologies.

[0106] In addition to the solid-phase technology represented by biochip arrays, gene expression can also be quantified using liquid-phase arrays. One such system is kinetic polymerase chain reaction (PCR). Kinetic PCR allows for the simultaneous amplification and quantification of specific nucleic acid sequences. The specificity is derived from synthetic oligonucleotide primers designed to preferentially adhere to single-stranded nucleic acid sequences bracketing the target site. This pair of oligonucleotide primers form specific, non-covalently bound complexes on each strand of the target sequence. These complexes facilitate in vitro transcription of double-stranded DNA in opposite orientations. Temperature cycling of the reaction mixture creates a continuous cycle of primer binding, transcription, and re-melting of the nucleic acid to individual strands. The result is an exponential increase of the target dsDNA product. This product can be quantified in real time either through the use of an intercalating dye or a sequence specific probe. SYBR® Greene I, is an example of an intercalating dye, that preferentially binds to dsDNA resulting in a concomitant increase in the fluorescent signal. Sequence specific probes, such as used with TaqMan® technology, consist of a fluorochrome and a quenching molecule covalently bound to opposite ends of an oligonucleotide. The probe is designed to selectively bind the target DNA sequence between the two primers. When the DNA strands are synthesized during the PCR reaction, the fluorochrome is cleaved from the probe by the exonuclease activity of the polymerase resulting in signal dequenching. The probe signaling method can be more specific than the intercalating dye method, but in each case, signal strength is proportional to the dsDNA product produced. Each type of quantification method can be used in multi-well liquid phase arrays with each well representing primers and/or probes specific to nucleic acid sequences of interest. When used with messenger RNA preparations of tissues or cell lines, an array of probe/primer reactions can simultaneously quantify the expression of multiple gene products of interest. See Germer, S., et al., Genome Res. 10:258-266 (2000); Heid, C. A., et al., Genome Res. 6, 986-994 (1996).

### Expression of CA Proteins

[0107] In a preferred embodiment, CA nucleic acids encoding CA proteins are used to make a variety of expression vectors to express CA proteins which can then be used in screening assays, as described below. The expression vectors may be either self-replicating extrachromosomal vectors or vectors which integrate into a host genome. Generally, these expression vectors include transcriptional and translational regulatory nucleic acid operably linked to the nucleic acid encoding the CA protein. The term “control sequences” refers to DNA sequences necessary for the expression of an operably linked coding sequence in a particular host organism. The control sequences that are suitable for prokaryotes, for example, include a promoter, optionally an operator sequence, and a ribosome binding site. Eukaryotic cells are known to utilize promoters, polyadenylation signals, and enhancers.

[0108] Nucleic acid is “operably linked” when it is placed into a functional relationship with another nucleic acid sequence. For example, DNA for a presequence or secretory leader is operably linked to DNA for a polypeptide if it is expressed as a preprotein that participates in the secretion of the polypeptide; a promoter or enhancer is operably linked to a coding sequence if it affects the transcription of the sequence; or a ribosome binding site is operably linked to a coding sequence if it is positioned so as to facilitate translation. Generally, “operably linked” means that the DNA sequences being linked are contiguous, and, in the case of a secretory leader, contiguous and in reading phase. However, enhancers do not have to be contiguous. Linking is accomplished by ligation at convenient restriction sites. If such sites do not exist, synthetic oligonucleotide adaptors or linkers are used in accordance with conventional practice. The transcriptional and translational regulatory nucleic acid will generally be appropriate to the host cell used to express the CA protein; for example, transcriptional and translational regulatory nucleic acid sequences from Bacillus are preferably used to express the CA protein in Bacillus. Numerous types of appropriate expression vectors, and suitable regulatory sequences are known in the art for a variety of host cells.

[0109] In general, the transcriptional and translational regulatory sequences may include, but are not limited to, promoter sequences, ribosomal binding sites, transcriptional start and stop sequences, translational start and stop sequences, and enhancer or activator sequences. In a preferred embodiment, the regulatory sequences include a promoter and transcriptional start and stop sequences.

[0110] Promoter sequences encode either constitutive or inducible promoters. The promoters may be either naturally occurring promoters or hybrid promoters. Hybrid promoters, which combine elements of more than one promoter, are also known in the art, and are useful in the present invention.

[0111] In addition, the expression vector may comprise additional elements. For example, the expression vector may have two replication systems, thus allowing it to be maintained in two organisms, for example in mammalian or insect cells for expression and in a prokaryotic host for cloning and amplification. Furthermore, for integrating expression vectors, the expression vector contains at least one sequence homologous to the host cell genome, and preferably two homologous sequences that flank the expression construct. The integrating vector may be directed to a specific locus in the host cell by selecting the appropriate homologous sequence for inclusion in the vector. Constructs for integrating vectors are well known in the art.

[0112] In addition, in a preferred embodiment, the expression vector contains a selectable marker gene to allow the selection of transformed host cells. Selection genes are well known in the art and will vary with the host cell used.

[0113] The CA proteins of the present invention are produced by culturing a host cell transformed with an expression vector containing nucleic acid encoding a CA protein, under the appropriate conditions to induce or cause expression of the CA protein. The conditions appropriate for CA protein expression will vary with the choice of the expression vector and the host cell, and will be easily ascertained by one skilled in the art through routine experimentation. For example, the use of constitutive promoters in the expression vector will require optimizing the growth and proliferation of the host cell, while the use of an inducible promoter requires the appropriate growth conditions for induction. In addition, in some embodiments, the timing of the harvest is important. For example, the baculoviral systems used in insect cell expression are lytic viruses, and thus harvest time selection can be crucial for product yield.

[0114] Appropriate host cells include yeast, bacteria, archaebacteria, fungi, and insect, plant and animal cells, including mammalian cells. Of particular interest are Drosophila melanogaster cells, Saccharomyces cerevisiae and other yeasts, E. coli, Bacillus subtilis, Sf9 cells, C129 cells, 293 cells, Neurospora, BHK, CHO, COS, HeLa cells, THP1 cell line (a macrophage cell line) and human cells and cell lines.

[0115] In a preferred embodiment, the CA proteins are expressed in mammalian cells. Mammalian expression systems are also known in the art, and include retroviral systems. A preferred expression vector system is a retroviral vector system such as is generally described in PCT/US97/01019 and PCT/US97/01048, both of which are hereby expressly incorporated by reference. Of particular use as mammalian promoters are the promoters from mammalian viral genes, since the viral genes are often highly expressed and have a broad host range. Examples include the SV40 early promoter, mouse mammary tumor virus LTR promoter, adenovirus major late promoter, herpes simplex virus promoter, and the CMV promoter. Typically, transcription termination and polyadenylation sequences recognized by mammalian cells are regulatory regions located 3′ to the translation stop codon and thus, together with the promoter elements, flank the coding sequence. Examples of transcription terminator and polyadenylation signals include those derived form SV40.

[0116] The methods of introducing exogenous nucleic acid into mammalian hosts, as well as other hosts, are well known in the art, and will vary with the host cell used. Techniques include dextran-mediated transfection, calcium phosphate precipitation, polybrene mediated transfection, protoplast fusion, electroporation, viral infection, encapsulation of the polynucleotide(s) in liposomes, and direct microinjection of the DNA into nuclei.

[0117] In a preferred embodiment, CA proteins are expressed in bacterial systems. Bacterial expression systems are well known in the art. Promoters from bacteriophage may also be used and are known in the art. In addition, synthetic promoters and hybrid promoters are also useful; for example, the tac promoter is a hybrid of the trp and lac promoter sequences. Furthermore, a bacterial promoter can include naturally occurring promoters of non-bacterial origin that have the ability to bind bacterial RNA polymerase and initiate transcription. In addition to a functioning promoter sequence, an efficient ribosome binding site is desirable. The expression vector may also include a signal peptide sequence that provides for secretion of the CA protein in bacteria. The protein is either secreted into the growth media (gram-positive bacteria) or into the periplasmic space, located between the inner and outer membrane of the cell (gram-negative bacteria). The bacterial expression vector may also include a selectable marker gene to allow for the selection of bacterial strains that have been transformed. Suitable selection genes include genes that render the bacteria resistant to drugs such as ampicillin, chloramphenicol, erythromycin, kanamycin, neomycin and tetracycline. Selectable markers also include biosynthetic genes, such as those in the histidine, tryptophan and leucine biosynthetic pathways. These components are assembled into expression vectors. Expression vectors for bacteria are well known in the art, and include vectors for Bacillus subtilis, E. coli, Streptococcus cremoris, and Streptococcus lividans, among others. The bacterial expression vectors are transformed into bacterial host cells using techniques well known in the art, such as calcium chloride treatment, electroporation, and others.

[0118] In one embodiment, CA proteins are produced in insect cells. Expression vectors for the transformation of insect cells, and in particular, baculovirus-based expression vectors, are well known in the art.

[0119] In a preferred embodiment, CA protein is produced in yeast cells. Yeast expression systems are well known in the art, and include expression vectors for Saccharomyces cerevisiae, Candida albicans and C. maltosa, Hansenula polymorpha, Kluyveromyces fragilis and K. lactis, Pichia guillerimondii and P. pastoris, Schizosaccharomyces pombe, and Yarrowia lipolytica.

[0120] The CA protein may also be made as a fusion protein, using techniques well known in the art. Thus, for example, for the creation of monoclonal antibodies. If the desired epitope is small, the CA protein may be fused to a carrier protein to form an immunogen. Alternatively, the CA protein may be made as a fusion protein to increase expression, or for other reasons. For example, when the CA protein is a CA peptide, the nucleic acid encoding the peptide may be linked to other nucleic acid for expression purposes.

[0121] In one embodiment, the CA nucleic acids, proteins and antibodies of the invention are labeled. By “labeled” herein is meant that a compound has at least one element, isotope or chemical compound attached to enable the detection of the compound. In general, labels fall into three classes: a) isotopic labels, which may be radioactive or heavy isotopes; b) immune labels, which may be antibodies or antigens; and c) colored or fluorescent dyes. The labels may be incorporated into the CA nucleic acids, proteins and antibodies at any position. For example, the label should be capable of producing, either directly or indirectly, a detectable signal. The detectable moiety may be a radioisotope, such as ³H, ¹⁴C, ³²P, ³⁵S, or ¹²⁵I, a fluorescent or chemiluminescent compound, such as fluorescein isothiocyanate, rhodamine, or luciferin, or an enzyme, such as alkaline phosphatase, beta-galactosidase or horseradish peroxidase. Any method known in the art for conjugating the antibody to the label may be employed, including those methods described by Hunter et al., Nature, 144:945 (1962); David et al., Biochemistry, 13:1014 (1974); Pain et al., J. Immunol. Meth., 40:219 (1981); and Nygren, J. Histochem. and Cytochem., 30:407 (1982).

[0122] Accordingly, the present invention also provides CA protein sequences. A CA protein of the present invention may be identified in several ways. “Protein” in this sense includes proteins, polypeptides, and peptides. As will be appreciated by those in the art, the nucleic acid sequences of the invention can be used to generate protein sequences. There are a variety of ways to do this, including cloning the entire gene and verifying its frame and amino acid sequence, or by comparing it to known sequences to search for homology to provide a frame, assuming the CA protein has homology to some protein in the database being used. Generally, the nucleic acid sequences are input into a program that will search all three frames for homology. This is done in a preferred embodiment using the following NCBI Advanced BLAST parameters. The program is blastx or blastn. The database is nr. The input data is as “Sequence in FASTA format”. The organism list is “none”. The “expect” is 10; the filter is default. The “descriptions” is 500, the “alignments” is 500, and the “alignment view” is pairwise. The “query Genetic Codes” is standard (1). The matrix is BLOSUM 62; gap existence cost is 11, per residue gap cost is 1; and the lambda ratio is 0.85 default. This results in the generation of a putative protein sequence.

[0123] In general, the term “polypeptide” as used herein refers to both the full-length polypeptide encoded by the recited polynucleotide, the polypeptide encoded by the gene represented by the recited polynucleotide, as well as portions or fragments thereof. The present invention encompasses variants of the naturally occurring proteins, wherein such variants are homologous or substantially similar to the naturally occurring protein, and can be of an origin of the same or different species as the naturally occurring protein (e.g., human, murine, or some other species that naturally expresses the recited polypeptide, usually a mammalian species). In general, variant polypeptides have a sequence that has at least about 80%, at least about 81%, at least about 82%, at least about 83%, at least about 84%, at least about 85%, at least about 86%, at least about 87%, at least about 88%, at least about 89%, usually at least about 90%, at least 91%, at least 92%, at least 93%, at least 94%, at least 95%, at least 96%, at least 97%, at least 98% and more usually at least about 99% sequence identity with a differentially expressed polypeptide described herein, as determined by the Smith-Watermnan homology search algorithm using an affine gap search with a gap open penalty of 12 and a gap extension penalty of 2, BLOSUM matrix of 62. The Smith-Waterman homology search algorithm is taught in Smith and Waterman, Adv. Appl. Math. (1981) 2: 482-489. The variant polypeptides can be naturally or non-naturally glycosylated, i.e., the polypeptide has a glycosylation pattern that differs from the glycosylation pattern found in the corresponding naturally occurring protein.

[0124] Also within the scope of the invention are variants. Variants of polypeptides include mutants, fragments, and fusions. Mutants can include amino acid substitutions, additions or deletions. The amino acid substitutions can be conservative amino acid substitutions or substitutions to eliminate non-essential amino acids, such as to alter a glycosylation site, a phosphorylation site or an acetylation site, or to minimize misfolding by substitution or deletion of one or more cysteine residues that are not necessary for function. Conservative amino acid substitutions are those that preserve the general charge, hydrophobicity/hydrophilicity, and/or steric bulk of the amino acid substituted. Variants can be designed so as to retain or have enhanced biological activity of a particular region of the protein (e.g., a functional domain and/or, where the polypeptide is a member of a protein family, a region associated with a consensus sequence). Selection of amino acid alterations for production of variants can be based upon the accessibility (interior vs. exterior) of the amino acid (see, e.g., Go et al, Int. J. Peptide Protein Res. (1980) 15:211), the thermostability of the variant polypeptide (see, e.g., Querol et al., Prot. Eng. (1996) 9:265), desired glycosylation sites (see, e.g., Olsen and Thomsen, J. Gen. Microbiol. (1991) 137:579), desired disulfide bridges (see, e.g., Clarke et al., Biochemistry (1993) 32:4322; and Wakarchuk et al., Protein Eng. (1994) 7:1379), desired metal binding sites (see, e.g., Toma et al., Biochemistry (1991) 30:97, and Haezerbrouck et al., Protein Eng. (1993) 6:643), and desired substitutions within proline loops (see, e.g., Masul et al., Appl. Env. Microbiol. (1994) 60:3579). Cysteine-depleted muteins can be produced as disclosed in U.S. Pat. No. 4,959,314.

[0125] Variants also include fragments of the polypeptides disclosed herein, particularly biologically active fragments and/or fragments corresponding to functional domains. Fragments of interest will typically be at least about 8 amino acids (aa) 10 aa, 15 aa, 20 aa, 25 aa, 30 aa, 35 aa, 40 aa, to at least about 45 aa in length, usually at least about 50 aa in length, at least about 75 aa, at least about 100 aa, at least about 125 aa, at least about 150 aa in length, at least about 200 aa, at least about 300 aa, at least about 400 aa and can be as long as 500 aa in length or longer, but will usually not exceed about 1000 aa in length, where the fragment will have a stretch of amino acids that is identical to a polypeptide encoded by a polynucleotide having a sequence of any one of the polynucleotide sequences provided herein, or a homolog thereof. The protein variants described herein are encoded by polynucleotides that are within the scope of the invention. The genetic code can be used to select the appropriate codons to construct the corresponding variants.

[0126] While altered expression of the polynucleotides associated with cancer is observed, altered levels of expression of the polypeptides encoded by these polynucleotides may likely play a role in cancers.

[0127] Also included within one embodiment of CA proteins are amino acid variants of the naturally occurring sequences, as determined herein. Preferably, the variants are preferably greater than about 75% homologous to the wild-type sequence, more preferably greater than about 80%, even more preferably greater than about 85% and most preferably greater than 90%. The present application is also directed to proteins containing polypeptides at least 80%, 85%, 90%, 95%, 96%, 97%, 98% or 99% identical to a CA polypeptide sequence set forth herein. As for nucleic acids, homology in this context means sequence similarity or identity, with identity being preferred. This homology will be determined using standard techniques known in the art as are outlined above for the nucleic acid homologies.

[0128] CA proteins of the present invention may be shorter or longer than the wild type amino acid sequences. Thus, in a preferred embodiment, included within the definition of CA proteins are portions or fragments of the wild type sequences herein. In addition, as outlined above, the CA nucleic acids of the invention may be used to obtain additional coding regions, and thus additional protein sequence, using techniques known in the art.

[0129] In a preferred embodiment, the CA proteins are derivative or variant CA proteins as compared to the wild-type sequence. That is, as outlined more fully below, the derivative CA peptide will contain at least one amino acid substitution, deletion or insertion, with amino acid substitutions being particularly preferred. The amino acid substitution, insertion or deletion may occur at any residue within the CA peptide.

[0130] Also included in an embodiment of CA proteins of the present invention are amino acid sequence variants. These variants fall into one or more of three classes: substitutional, insertional or deletional variants. These variants ordinarily are prepared by site-specific mutagenesis of nucleotides in the DNA encoding the CA protein, using cassette or PCR mutagenesis or other techniques well known in the art, to produce DNA encoding the variant, and thereafter expressing the DNA in recombinant cell culture as outlined above. However, variant CA protein fragments having up to about 100-150 residues may be prepared by in vitro synthesis using established techniques. Amino acid sequence variants are characterized by the predetermined nature of the variation, a feature that sets them apart from naturally occurring allelic or interspecies variation of the CA protein amino acid sequence. The variants typically exhibit the same qualitative biological activity as the naturally occurring analogue, although variants can also be selected which have modified characteristics as will be more fully outlined below.

[0131] While the site or region for introducing an amino acid sequence variation is predetermined, the mutation per se need not be predetermined. For example, in order to optimize the performance of a mutation at a given site, random mutagenesis may be conducted at the target codon or region and the expressed CA variants screened for the optimal combination of desired activity. Techniques for making substitution mutations at predetermined sites in DNA having a known sequence are well known, for example, M13 primer mutagenesis and LAR mutagenesis. Screening of the mutants is done using assays of CA protein activities.

[0132] Amino acid substitutions are typically of single residues; insertions usually will be on the order of from about 1 to 20 amino acids, although considerably larger insertions may be tolerated. Deletions range from about 1 to about 20 residues, although in some cases deletions may be much larger.

[0133] Substitutions, deletions, insertions or any combination thereof may be used to arrive at a final derivative. Generally these changes are done on a few amino acids to minimize the alteration of the molecule. However, larger changes may be tolerated in certain circumstances. When small alterations in the characteristics of the CA protein are desired, substitutions are generally made in accordance with the following chart:

CHART 1

| Original Residue | Exemplary Substitutions |
|---|---|
| Ala | Ser |
| Arg | Lys |
| Asn | Gln, His |
| Asp | Glu |
| Cys | Ser |
| Gln | Asn |
| Glu | Asp |
| Gly | Pro |
| His | Asn, Gln |
| Ile | Leu, Val |
| Leu | Ile, Val |
| Lys | Arg, Gln, Glu |
| Met | Leu, Ile |
| Phe | Met, Leu, Tyr |
| Ser | Thr |
| Thr | Ser |
| Trp | Tyr |
| Tyr | Trp, Phe |
| Val | Ile, Leu |

[0134] Substantial changes in function or immunological identity are made by selecting substitutions that are less conservative than those shown in Chart I. For example, substitutions may be made full length to more significantly affect one or more of the following: the structure of the polypeptide backbone in the area of the alteration (e.g., the alpha-helical or beta-sheet structure); the charge or hydrophobicity of the molecule at the target site; and the bulk of the side chain. The substitutions which in general are expected to produce the greatest changes in the polypeptide's properties are those in which (a) a hydrophilic residue, e.g. seryl or threonyl is substituted for (or by) a hydrophobic residue, e.g. leucyl, isoleucyl, phenylalanyl, valyl or alanyl; (b) a cysteine or proline is substituted for (or by) any other residue; (c) a residue having an electropositive side chain, e.g. lysyl, arginyl, or histidyl, is substituted for (or by) an electronegative residue, e.g. glutamyl or aspartyl; or (d) a residue having a bulky side chain, e.g. phenylalanine, is substituted for (or by) one not having a side chain, e.g. glycine.

[0135] The variants typically exhibit the same qualitative biological activity and will elicit the same immune response as the naturally-occurring analogue, although variants also are selected to modify the characteristics of the CA proteins as needed. Alternatively, the variant may be designed such that the biological activity of the CA protein is altered. For example, glycosylation sites may be altered or removed, dominant negative mutations created, etc.

[0136] Covalent modifications of CA polypeptides are included within the scope of this invention, for example for use in screening. One type of covalent modification includes reacting targeted amino acid residues of a CA polypeptide with an organic derivatizing agent that is capable of reacting with selected side chains or the N- or C-terminal residues of a CA polypeptide. Derivatization with bifunctional agents is useful, for instance, for crosslinking CA polypeptides to a water-insoluble support matrix or surface for use in the method for purifying anti-CA antibodies or screening assays, as is more fully described below. Commonly used crosslinking agents include, e.g., 1,1-bis(diazoacetyl)-2-phenylethane, glutaraldehyde, N-hydroxysuccinimide esters, for example, esters with 4-azidosalicylic acid, homobifunctional imidoesters, including disuccinimidyl esters such as 3,3′-dithiobis(succinimidylpropionate), bifunctional maleimides such as bis-N-maleimido-1,8-octane and agents such as methyl-3-[(p-azidophenyl)dithio]propioimidate.

[0137] Other modifications include deamidation of glutaminyl and asparaginyl residues to the corresponding glutamyl and aspartyl residues, respectively, hydroxylation of proline and lysine, phosphorylation of hydroxyl groups of seryl, threonyl or tyrosyl residues, methylation of the α-amino groups of lysine, arginine, and histidine side chains [T. E. Creighton, Proteins: Structure and Molecular Properties, W.H. Freeman & Co., San Francisco, pp. 79-86 (1983)], acetylation of the N-terminal amine, and amidation of any C-terminal carboxyl group.

[0138] Another type of covalent modification of the CA polypeptide included within the scope of this invention comprises altering the native glycosylation pattern of the polypeptide. “Altering the native glycosylation pattern” is intended for purposes herein to mean deleting one or more carbohydrate moieties found in native sequence CA polypeptide, and/or adding one or more glycosylation sites that are not present in the native sequence CA polypeptide.

[0139] Addition of glycosylation sites to CA polypeptides may be accomplished by altering the amino acid sequence thereof. The alteration may be made, for example, by the addition of, or substitution by, one or more serine or threonine residues to the native sequence CA polypeptide (for O-linked glycosylation sites). The CA amino acid sequence may optionally be altered through changes at the DNA level, particularly by mutating the DNA encoding the CA polypeptide at preselected bases such that codons are generated that will translate into the desired amino acids.

[0140] Another means of increasing the number of carbohydrate moieties on the CA polypeptide is by chemical or enzymatic coupling of glycosides to the polypeptide. Such methods are described in the art, e.g., in WO 87/05330 published 11 Sep. 1987, and in Aplin and Wriston, LA Crit. Rev. Biochem., pp. 259-306 (1981).

[0141] Removal of carbohydrate moieties present on the CA polypeptide may be accomplished chemically or enzymatically or by mutational substitution of codons encoding for amino acid residues that serve as targets for glycosylation. Chemical deglycosylation techniques are known in the art and described, for instance, by Halimuddin, et al., Arch. Biochem. Biophys., 259:52 (1987) and by Edge et al., Anal. Biochem., 118:131 (1981). Enzymatic cleavage of carbohydrate moieties on polypeptides can be achieved by the use of a variety of endo- and exo-glycosidases as described by Thotakura et al., Meth. Enzymol., 138:350 (1987).

[0142] Another type of covalent modification of CA comprises linking the CA polypeptide to one of a variety of nonproteinaceous polymers, e.g., polyethylene glycol, polypropylene glycol, or polyoxyalkylenes, in the manner set forth in U.S. Pat. No. 4,640,835; 4,496,689; 4,301,144; 4,670,417; 4,791,192 or 4,179,337.

[0143] CA polypeptides of the present invention may also be modified in a way to form chimeric molecules comprising a CA polypeptide fused to another, heterologous polypeptide or amino acid sequence. In one embodiment, such a chimeric molecule comprises a fusion of a CA polypeptide with a tag polypeptide that provides an epitope to which an anti-tag antibody can selectively bind. The epitope tag is generally placed at the amino- or carboxyl-terminus of the CA polypeptide, although internal fusions may also be tolerated in some instances. The presence of such epitope-tagged forms of a CA polypeptide can be detected using an antibody against the tag polypeptide. Also, provision of the epitope tag enables the CA polypeptide to be readily purified by affinity purification using an anti-tag antibody or another type of affinity matrix that binds to the epitope tag. In an alternative embodiment, the chimeric molecule may comprise a fusion of a CA polypeptide with an immunoglobulin or a particular region of an immunoglobulin. For a bivalent form of the chimeric molecule, such a fusion could be to the Fc region of an IgG molecule.

[0144] Various tag polypeptides and their respective antibodies are well known in the art. Examples include poly-histidine (poly-his) or poly-histidine-glycine (poly-his-gly) tags; the flu HA tag polypeptide and its antibody 12CA5 [Field et al., Mol. Cell. Biol., 8:2159-2165 (1988)]; the c-myc tag and the 8F9, 3C7, 6E10, G4, B7 and 9E10 antibodies thereto [Evan et al., Molecular and Cellular Biology, 5:3610-3616 (1985)]; and the Herpes Simplex virus glycoprotein D (gD) tag and its antibody [Paborsky et al., Protein Engineering, 3(6):547-553 (1990)]. Other tag polypeptides include the Flag-peptide [Hopp et al., BioTechnology, 6:1204-1210 (1988)]; the KT3 epitope peptide [Martin et al., Science, 255:192-194 (1992)]; tubulin epitope peptide [Skinner et al., J. Biol. Chem., 266:15163-15166 (1991)]; and the T7 gene 10 protein peptide tag [Lutz-Freyermuth et al., Proc. Natl. Acad. Sci. USA, 87:6393-6397 (1990)].

[0145] Also included with the definition of CA protein in one embodiment are other CA proteins of the CA family, and CA proteins from other organisms, which are cloned and expressed as outlined below. Thus, probe or degenerate polymerase chain reaction (PCR) primer sequences may be used to find other related CA proteins from humans or other organisms. As will be appreciated by those in the art, particularly useful probe and/or PCR primer sequences include the unique areas of the CA nucleic acid sequence. As is generally known in the art, preferred PCR primers are from about 15 to about 35 nucleotides in length, with from about 20 to about 30 being preferred, and may contain inosine as needed. The conditions for the PCR reaction are well known in the art.

[0146] In addition, as is outlined herein, CA proteins can be made that are longer than those encoded by the nucleic acids of the figures, for example, by the elucidation of additional sequences, the addition of epitope or purification tags, the addition of other fusion sequences, etc.

[0147] CA proteins may also be identified as being encoded by CA nucleic acids. Thus, CA proteins are encoded by nucleic acids that will hybridize to the sequences of the sequence listings, or their complements, as outlined herein.

### CA Antigens and Antibodies Thereto

[0148] In one embodiment, the invention provides CA specific antibodies. In a preferred embodiment, when the CA protein is to be used to generate antibodies, for example for immunotherapy, the CA protein should share at least one epitope or determinant with the full-length protein. By “epitope” or “determinant” herein is meant a portion of a protein that will generate and/or bind an antibody or T-cell receptor in the context of MHC. Thus, in most instances, antibodies made to a smaller CA protein will be able to bind to the full-length protein. In a preferred embodiment, the epitope is unique; that is, antibodies generated to a unique epitope show little or no cross-reactivity.

[0149] Any polypeptide sequence encoded by the CA polynucleotide sequences may be analyzed to determine certain preferred regions of the polypeptide. Regions of high antigenicity are determined from data by DNASTAR analysis by choosing values that represent regions of the polypeptide that are likely to be exposed on the surface of the polypeptide in an environment in which antigen recognition may occur in the process of initiation of an immune response. For example, the amino acid sequence of a polypeptide encoded by a CA polynucleotide sequence may be analyzed using the default parameters of the DNASTAR computer algorithm (DNASTAR, Inc., Madison, Wis.; http://www.dnastar.com/).

[0150] Polypeptide features that may be routinely obtained using the DNASTAR computer algorithm include, but are not limited to, Garnier-Robson alpha-regions, beta-regions, turn-regions, and coil-regions (Garnier et al. J. Mol. Biol., 120: 97 (1978)); Chou-Fasman alpha-regions, beta-regions, and turn-regions (Adv. in Enzymol, 47:45-148 (1978)); Kyte-Doolittle hydrophilic regions and hydrophobic regions (J. Mol. Biol., 157:105-132 (1982)); Eisenberg alpha- and beta-amphipathic regions; Karplus-Schulz flexible regions; Emini surface-forming regions (J. Virol., 55(3):836-839 (1985)); and Jameson-Wolf regions of high antigenic index (CABIOS, 4(1):181-186 (1988)). Kyte-Doolittle hydrophilic regions and hydrophobic regions, Emini surface-forming regions, and Jameson-Wolf regions of high antigenic index (i.e., containing four or more contiguous amino acids having an antigenic index of greater than or equal to 1.5, as identified using the default parameters of the Jameson-Wolf program) can routinely be used to determine polypeptide regions that exhibit a high degree of potential for antigenicity. One approach for preparing antibodies to a protein is the selection and preparation of an amino acid sequence of all or part of the protein, chemically synthesizing the sequence and injecting it into an appropriate animal, typically a rabbit, hamster or a mouse. Oligopeptides can be selected as candidates for the production of an antibody to the CA protein based upon the oligopeptides lying in hydrophilic regions, which are thus likely to be exposed in the mature protein. Additional oligopeptides can be determined using, for example, the Antigenicity Index, Welling, G. W. et al., FEBS Lett. 188:215-218 (1985), incorporated herein by reference.

[0151] In one embodiment, the term “antibody” includes antibody fragments, as are known in the art, including Fab, Fab₂, single chain antibodies (Fv for example), chimeric antibodies, etc., either produced by the modification of whole antibodies or those synthesized de novo using recombinant DNA technologies.

[0152] Methods of preparing polyclonal antibodies are known to the skilled artisan. Polyclonal antibodies can be raised in a mammal, for example, by one or more injections of an immunizing agent and, if desired, an adjuvant. Typically, the immunizing agent and/or adjuvant will be injected in the mammal by multiple subcutaneous or intraperitoneal injections. The immunizing agent may include a protein encoded by a nucleic acid of the figures or fragment thereof or a fusion protein thereof. It may be useful to conjugate the immunizing agent to a protein known to be immunogenic in the mammal being immunized. Examples of such immunogenic proteins include but are not limited to keyhole limpet hemocyanin, serum albumin, bovine thyroglobulin, and soybean trypsin inhibitor. Examples of adjuvants that may be employed include Freund's complete adjuvant and MPL-TDM adjuvant (monophosphoryl Lipid A, synthetic trehalose dicorynomycolate). The immunization protocol may be selected by one skilled in the art without undue experimentation.

[0153] The antibodies may, alternatively, be monoclonal antibodies. Monoclonal antibodies may be prepared using hybridoma methods, such as those described by Kohler and Milstein, Nature, 256:495 (1975). In a hybridoma method, a mouse, hamster, or other appropriate host animal, is typically immunized with an immunizing agent to elicit lymphocytes that produce or are capable of producing antibodies that will specifically bind to the immunizing agent. Alternatively, the lymphocytes may be immunized in vitro. The immunizing agent will typically include a polypeptide encoded by a nucleic acid of Tables 1-152, or fragment thereof or a fusion protein thereof. Generally, either peripheral blood lymphocytes (“PBLs”) are used if cells of human origin are desired, or spleen cells or lymph node cells are used if non-human mammalian sources are desired. The lymphocytes are then fused with an immortalized cell line using a suitable fusing agent, such as polyethylene glycol, to form a hybridoma cell (Goding, Monoclonal Antibodies: Principles and Practice, Academic Press, (1986) pp. 59-103). Immortalized cell lines are usually transformed mammalian cells, particularly myeloma cells of rodent, bovine and human origin. Usually, rat or mouse myeloma cell lines are employed. The hybridoma cells may be cultured in a suitable culture medium that preferably contains one or more substances that inhibit the growth or survival of the unfused, immortalized cells. For example, if the parental cells lack the enzyme hypoxanthine guanine phosphoribosyl transferase (HGPRT or HPRT), the culture medium for the hybridomas typically will include hypoxanthine, aminopterin, and thymidine (“HAT medium”), which substances prevent the growth of HGPRT-deficient cells.

[0154] Monoclonal antibody technology is used in implementing research, diagnosis and therapy. Monoclonal antibodies are used in radioimmunoassays, enzyme-linked immunosorbent assays, immunocytopathology, and flow cytometry for in vitro diagnosis, and in vivo for diagnosis and immunotherapy of human disease. Waldmann, T. A. (1991) Science 252:1657-1662. In particular, monoclonal antibodies have been widely applied to the diagnosis and therapy of cancer, wherein it is desirable to target malignant lesions while avoiding normal tissue. See, e.g., U.S. Pat. Nos. 4,753,894 to Frankel, et al.; 4,938,948 to Ring et al.; and 4,956,453 to Bjorn et al.

[0155] In one embodiment, the antibodies are bispecific antibodies. Bispecific antibodies are monoclonal, preferably human or humanized, antibodies that have binding specificities for at least two different antigens. A number of “humanized” antibody molecules comprising an antigen-binding site derived from a non-human immunoglobulin have been described, including chimeric antibodies having rodent V regions and their associated CDRs fused to human constant domains (Winter et al. (1991) Nature 349:293-299; Lobugho et al. (1989) Proc. Nat. Acad. Sci. USA 86:4220-4224; Shaw et al. (1987) J. Immunol. 138:4534-4538; and Brown et al. (1987) Cancer Res. 47:3577-3583), rodent CDRs grafted into a human supporting FR prior to fusion with an appropriate human antibody constant domain (Riechmann et al. (1988) Nature 332:323-327; Verhoeyen et al. (1988) Science 239:1534-1536; and Jones et al. (1986) Nature 321:522-525), and rodent CDRs supported by recombinantly veneered rodent FRs (European Patent Publication No. 519,596, published Dec. 23, 1992). These “humanized” molecules are designed to minimize unwanted immunological response toward rodent antihuman antibody molecules which limits the duration and effectiveness of therapeutic applications of those moieties in human recipients. In the present case, one of the binding specificities is for a protein encoded by a nucleic acid of Tables 1-152, or a fragment thereof, the other one is for any other antigen, and preferably for a cell-surface protein or receptor or receptor subunit, preferably one that is tumor specific.

[0156] In a preferred embodiment, the antibodies to CA are capable of reducing or eliminating the biological function of CA, as is described below. That is, the addition of anti-CA antibodies (either polyclonal or preferably monoclonal) to CA (or cells containing CA) may reduce or eliminate the CA activity. Generally, at least a 25% decrease in activity is preferred, with at least about 50% being particularly preferred and about a 95-100% decrease being especially preferred.

[0157] In a preferred embodiment the antibodies to the CA proteins are humanized antibodies. “Humanized” antibodies refer to a molecule having an antigen binding site that is substantially derived from an immunoglobulin from a non-human species and the remaining immunoglobulin structure of the molecule based upon the structure and/or sequence of a human immunoglobulin. The antigen binding site may comprise either complete variable domains fused onto constant domains or only the complementarity determining regions (CDRs) grafted onto appropriate framework regions in the variable domains. Antigen binding sites may be wild type or modified by one or more amino acid substitutions, e.g., modified to resemble human immunoglobulin more closely. Alternatively, a humanized antibody may be derived from a chimeric antibody that retains or substantially retains the antigen-binding properties of the parental, non-human, antibody but which exhibits diminished immunogenicity as compared to the parental antibody when administered to humans. The phrase “chimeric antibody,” as used herein, refers to an antibody containing sequence derived from two different antibodies (see, e.g., U.S. Pat. No. 4,816,567) that typically originate from different species. Typically, in these chimeric antibodies, the variable region of both light and heavy chains mimics the variable regions of antibodies derived from one species of mammals, while the constant portions are homologous to the sequences in antibodies derived from another. Most typically, chimeric antibodies comprise human and murine antibody fragments, generally human constant and mouse variable regions. Humanized antibodies include human immunoglobulins (recipient antibody) in which residues form a complementary determining region (CDR) of the recipient are replaced by residues from a CDR of a non-human species (donor antibody) such as mouse, rat or rabbit having the desired specificity, affinity and capacity. In some instances, Fv framework residues of the human immunoglobulin are replaced by corresponding non-human residues. Humanized antibodies may also comprise residues that are found neither in the recipient antibody nor in the imported CDR or framework sequences. In general, the humanized antibody will comprise substantially all of at least one, and typically two, variable domains, in which all or substantially all of the CDR regions correspond to those of a non-human immunoglobulin and all or substantially all of the framework residues (FR) regions are those of a human immunoglobulin consensus sequence. The humanized antibody optimally also will comprise at least a portion of an immunoglobulin constant region (Fc), typically that of a human immunoglobulin (Jones et al., Nature, 321:522-525 (1986); Riechmann et al., Nature, 332:323-329 (1988); and Presta, Curr. Op. Struct. Biol., 2:593-596 (1992)). One clear advantage to such chimeric forms is that, for example, the variable regions can conveniently be derived from presently known sources using readily available hybridomas or B cells from non human host organisms in combination with constant regions derived from, for example, human cell preparations. While the variable region has the advantage of ease of preparation, and the specificity is not affected by its source, the constant region being human, is less likely to elicit an immune response from a human subject when the antibodies are injected than would the constant region from a non-human source. However, the definition is not limited to this particular example.

[0158] Because humanized antibodies are far less immunogenic in humans than the parental mouse monoclonal antibodies, they can be used for the treatment of humans with far less risk of anaphylaxis. Thus, these antibodies may be preferred in therapeutic applications that involve in vivo administration to a human such as, e.g., use as radiation sensitizers for the treatment of neoplastic disease or use in methods to reduce the side effects of, e.g., cancer therapy. Methods for humanizing non-human antibodies are well known in the art. Generally, a humanized antibody has one or more amino acid residues introduced into it from a source that is non-human. These non-human amino acid residues are often referred to as import residues, which are typically taken from an import variable domain. Humanization can be essentially performed following the method of Winter and co-workers (Jones et al., Nature 321:522-525 (1986); Riechmann et al., Nature 332:323-327 (1988); Verhoeyen et al., Science 239:1534-1536 (1988)), by substituting rodent CDRs or CDR sequences for the corresponding sequences of a human antibody. Accordingly, such humanized antibodies are chimeric antibodies (U.S. Pat. No. 4,816,567), wherein substantially less than an intact human variable domain has been substituted by the corresponding sequence from a non-human species. In practice, humanized antibodies are typically human antibodies in which some CDR residues and possibly some FR residues are substituted by residues from analogous sites in rodent antibodies.

[0159] Human antibodies can also be produced using various techniques known in the art, including phage display libraries [Hoogenboom and Winter, J. Mol. Biol., 227:381 (1991); Marks et al., J. Mol. Biol., 222:581 (1991)]. The techniques of Cole et al. and Boerner et al. are also available for the preparation of human monoclonal antibodies [Cole et al., Monoclonal Antibodies and Cancer Therapy, Alan R. Liss, p. 77 (1985) and Boerner et al., J. Immunol., 147(1):86-95 (1991)]. Humanized antibodies may be achieved by a variety of methods including, for example: (1) grafting the non-human complementarity determining regions (CDRs) onto a human framework and constant region (a process referred to in the art as “humanizing”), or, alternatively, (2) transplanting the entire non-human variable domains, but “cloaking” them with a human-like surface by replacement of surface residues (a process referred to in the art as “veneering”). In the present invention, humanized antibodies will include both “humanized” and “veneered” antibodies. Similarly, human antibodies can be made by introducing human immunoglobulin loci into transgenic animals, e.g., mice in which the endogenous immunoglobulin genes have been partially or completely inactivated. Upon challenge, human antibody production is observed, which closely resembles that seen in humans in all respects, including gene rearrangement, assembly, and antibody repertoire. This approach is described, for example, in U.S. Pat. Nos. 5,545,807; 5,545,806; 5,569,825; 5,625,126; 5,633,425; 5,661,016, and in the following scientific publications: Marks et al., Bio/Technology 10, 779-783 (1992); Lonberg et al., Nature 368 856-859 (1994); Morrison, Nature 368, 812-13 (1994); Fishwild et al., Nature Biotechnology 14, 845-51 (1996); Neuberger, Nature Biotechnology 14, 826 (1996); Lonberg and Huszar, Intern. Rev. Immunol. 13 65-93 (1995); Jones et al., Nature 321:522-525 (1986); Morrison et al., Proc. Natl. Acad. Sci, U.S.A., 81:6851-6855 (1984); Morrison and Oi, Adv. Immunol., 44:65-92 (1988); Verhoeyer et al., Science 239:1534-1536 (1988); Padlan, Molec. Immun. 28:489-498 (1991); Padlan, Molec. Immunol. 31(3):169-217 (1994); and Kettleborough, C. A. et al., Protein Eng. 4(7):773-83 (1991) each of which is incorporated herein by reference.

[0160] The phrase “complementarity determining region” refers to amino acid sequences which together define the binding affinity and specificity of the natural Fv region of a native immunoglobulin binding site. See, e.g., Chothia et al., J. Mol Biol 196:901-917 (1987); Kabat et al., U.S. Dept. of Health and Human Services NIH Publication No. 91-3242 (1991). The phrase “constant region” refers to the portion of the antibody molecule that confers effector functions. In the present invention, mouse constant regions are substituted by human constant regions. The constant regions of the subject humanized antibodies are derived from human immunoglobulins. The heavy chain constant region can be selected from any of the five isotypes: alpha, delta, epsilon, gamma or mu. One method of humanizing antibodies comprises aligning the non-human heavy and light chain sequences to human heavy and light chain sequences, selecting and replacing the non-human framework with a human framework based on such alignment, molecular modeling to predict the conformation of the humanized sequence and comparing to the conformation of the parent antibody. This process is followed by repeated back mutation of residues in the CDR region that disturb the structure of the CDRs until the predicted conformation of the humanized sequence model closely approximates the conformation of the non-human CDRs of the parent non-human antibody. Such humanized antibodies may be further derivatized to facilitate uptake and clearance, e.g. via Ashwell receptors. See, e.g., U.S. Pat. Nos. 5,530,101 and 5,585,089 which are incorporated herein by reference.

[0161] Humanized antibodies to CA polypeptides can also be produced using transgenic animals that are engineered to contain human immunoglobulin loci. For example, WO 98/24893 discloses transgenic animals having a human Ig locus wherein the animals do not produce functional endogenous immunoglobulins due to the inactivation of endogenous heavy and light chain loci. WO 91/10741 also discloses transgenic non-primate mammalian hosts capable of mounting an immune response to an immunogen, wherein the antibodies have primate constant and/or variable regions, and wherein the endogenous immunoglobulin-encoding loci are substituted or inactivated. WO 96/30498 discloses the use of the Cre/Lox system to modify the immunoglobulin locus in a mammal, such as to replace all or a portion of the constant or variable region to form a modified antibody molecule. WO 94/02602 discloses non-human mammalian hosts having inactivated endogenous Ig loci and functional human Ig loci. U.S. Pat. No. 5,939,598 discloses methods of making transgenic mice in which the mice lack endogenous heavy chains, and express an exogenous immunoglobulin locus comprising one or more xenogeneic constant regions.

[0162] Using a transgenic animal described above, an immune response can be produced to a selected antigenic molecule, and antibody-producing cells can be removed from the animal and used to produce hybridomas that secrete human monoclonal antibodies. Immunization protocols, adjuvants, and the like are known in the art, and are used in immunization of, for example, a transgenic mouse as described in WO 96/33735. The monoclonal antibodies can be tested for the ability to inhibit or neutralize the biological activity or physiological effect of the corresponding protein.

[0163] In the present invention, CA polypeptides of the invention and variants thereof are used to immunize a transgenic animal as described above. Monoclonal antibodies are made using methods known in the art, and the specificity of the antibodies is tested using isolated CA polypeptides. Methods for preparation of the human or primate CA or an epitope thereof include, but are not limited to chemical synthesis, recombinant DNA techniques or isolation from biological samples. Chemical synthesis of a peptide can be performed, for example, by the classical Merrifeld method of solid phase peptide synthesis (Merrifeld, J. Am. Chem. Soc. 85:2149, 1963 which is incorporated by reference) or the FMOC strategy on a Rapid Automated Multiple Peptide Synthesis system (E. I. du Pont de Nemours Company, Wilmington, Del.) (Caprino and Han, J. Org. Chem. 37:3404, 1972 which is incorporated by reference).

[0164] Polyclonal antibodies can be prepared by immunizing rabbits or other animals by injecting antigen followed by subsequent boosts at appropriate intervals. The animals are bled and sera assayed against purified CA proteins usually by ELISA or by bioassay based upon the ability to block the action of CA proteins. When using avian species, e.g., chicken, turkey and the like, the antibody can be isolated from the yolk of the egg. Monoclonal antibodies can be prepared after the method of Milstein and Kohler by fusing splenocytes from immunized mice with continuously replicating tumor cells such as myeloma or lymphoma cells. (Milstein and Kohler, Nature 256:495-497, 1975; Gulfre and Milstein, Methods in Enzymology: Immunochemical Techniques 73:1-46, Langone and Banatis eds., Academic Press, 1981 which are incorporated by reference). The hybridoma cells so formed are then cloned by limiting dilution methods and supernates assayed for antibody production by ELISA, RIA or bioassay.

[0165] The unique ability of antibodies to recognize and specifically bind to target proteins provides an approach for treating an overexpression of the protein. Thus, another aspect of the present invention provides for a method for preventing or treating diseases involving overexpression of a CA polypeptide by treatment of a patient with specific antibodies to the CA protein.

[0166] Specific antibodies, either polyclonal or monoclonal, to the CA proteins can be produced by any suitable method known in the art as discussed above. For example, murine or human monoclonal antibodies can be produced by hybridoma technology or, alternatively, the CA proteins, or an immunologically active fragment thereof, or an anti-idiotypic antibody, or fragment thereof can be administered to an animal to elicit the production of antibodies capable of recognizing and binding to the CA proteins. Such antibodies can be from any class of antibodies including, but not limited to IgG, IgA, IgM, IgD, and IgE or in the case of avian species, IgY and from any subclass of antibodies.

[0167] By immunotherapy is meant treatment of a cancer with an antibody raised against a CA protein. As used herein, immunotherapy can be passive or active. Passive immunotherapy as defined herein is the passive transfer of antibody to a recipient (patient). Active immunization is the induction of antibody and/or T-cell responses in a recipient (patient). Induction of an immune response is the result of providing the recipient with an antigen to which antibodies are raised. As appreciated by one of ordinary skill in the art, the antigen may be provided by injecting a polypeptide against which antibodies are desired to be raised into a recipient, or contacting the recipient with a nucleic acid capable of expressing the antigen and under conditions for expression of the antigen.

[0168] In a preferred embodiment, oncogenes which encode secreted growth factors may be inhibited by raising antibodies against CA proteins that are secreted proteins as described above. Without being bound by theory, antibodies used for treatment, bind and prevent the secreted protein from binding to its receptor, thereby inactivating the secreted CA protein.

[0169] In another preferred embodiment, the CA protein to which antibodies are raised is a transmembrane protein. Without being bound by theory, antibodies used for treatment, bind the extracellular domain of the CA protein and prevent it from binding to other proteins, such as circulating ligands or cell-associated molecules. The antibody may cause down-regulation of the transmembrane CA protein. As will be appreciated by one of ordinary skill in the art, the antibody may be a competitive, non-competitive or uncompetitive inhibitor of protein binding to the extracellular domain of the CA protein. The antibody is also an antagonist of the CA protein. Further, the antibody prevents activation of the transmembrane CA protein. In one aspect, when the antibody prevents the binding of other molecules to the CA protein, the antibody prevents growth of the cell. The antibody may also sensitize the cell to cytotoxic agents, including, but not limited to TNF-α; TNF-β, IL-1, INF-γ and IL-2, or chemotherapeutic agents including 5FU, vinblastine, actinomycin D, cisplatin, methotrexate, and the like. In some instances the antibody belongs to a sub-type that activates serum complement when complexed with the transmembrane protein thereby mediating cytotoxicity. Thus, cancers may be treated by administering to a patient antibodies directed against the transmembrane CA protein.

[0170] In another preferred embodiment, the antibody is conjugated to a therapeutic moiety. In one aspect the therapeutic moiety is a small molecule that modulates the activity of the CA protein. In another aspect the therapeutic moiety modulates the activity of molecules associated with or in close proximity to the CA protein. The therapeutic moiety may inhibit enzymatic activity such as protease or protein kinase activity associated with cancer.

[0171] In a preferred embodiment, the therapeutic moiety may also be a cytotoxic agent. In this method, radioisotopes, natural toxins, chemotherapy agents, or other substances (such as biological response modifiers) are chemically linked or conjugated to a monoclonal antibody to form “immunoconjugates” and “immtunotoxins” which target the cytotoxic agent to tumor tissue or cells resulting in a reduction in the number of afflicted cells, thereby reducing symptoms associated with cancers, including lymphoma. Cytotoxic agents are numerous and varied and include, but are not limited to, cytotoxic drugs or toxins or active fragments of such toxins. Suitable toxins and their corresponding fragments include diphtheria A chain, exotoxin A chain, ricin A chain, abrin A chain, curcin, crotin, phenomycin, enomycin and the like. Cytotoxic agents also include radiochemicals made by conjugating radioisotopes to antibodies raised against CA proteins, or binding of a radionuclide to a chelating agent that has been covalently attached to the antibody. Targeting the therapeutic moiety to transmembrane CA proteins not only serves to increase the local concentration of therapeutic moiety in the cancer of interest, i.e., lymphoma, but also serves to reduce deleterious side effects that may be associated with the therapeutic moiety. A number of investigators have used monoclonal antibodies as carriers of cytotoxic substances in attempts to selectively direct those agents to malignant tissue. More particularly, a number of monoclonal antibodies have been conjugated to toxins such as ricin, abrin, diphtheria toxin and Pseudomonas exotoxin or to enzymatically active portions (A chains) thereof via heterobifunctional agents. See, e.g., U.S. Pat. No. 4,753,894 to Frankel et al.; Nevelle, et al. (1982) Immunol Rev 62:75-91; Ross et al. (1980) Eur. J. Biochem 104; Vitteta et al. (1982) Immunol Rev 62:158-183; Raso et al. (1982) Cancer Res 42:457-464, and Trowbridge et al. (1981) Nature 294:171-173.

[0172] In another preferred embodiment, the CA protein against which the antibodies are raised is an intracellular protein. In this case, the antibody may be conjugated to a protein that facilitates entry into the cell. In one case, the antibody enters the cell by endocytosis. In another embodiment, a nucleic acid encoding the antibody is administered to the individual or cell. Moreover, wherein the CA protein can be targeted within a cell, e.g., the nucleus, an antibody thereto contains a signal for that target localization, e.g., a nuclear localization signal.

[0173] The CA antibodies of the invention specifically bind to CA proteins. By “specifically bind” herein is meant that the antibodies bind to the protein with a binding constant in the range of 104-10⁻⁶ M⁻¹, with a preferred range being 10⁻⁷-10⁻⁹ M⁻¹.

[0174] In a preferred embodiment, the CA protein is purified or isolated after expression. CA proteins may be isolated or purified in a variety of ways known to those skilled in the art depending on what other components are present in the sample. Standard purification methods include electrophoretic, molecular, immunological and chromatographic techniques, including ion exchange, hydrophobic, affinity, and reverse-phase HPLC chromatography, and chromatofocusing. For example, the CA protein may be purified using a standard anti-CA antibody column. Ultrafiltration and diafiltration techniques, in conjunction with protein concentration, are also useful. For general guidance in suitable purification techniques, see Scopes, R., Protein Purification, Springer-Verlag, NY (1982). The degree of purification necessary will vary depending on the use of the CA protein. In some instances no purification will be necessary.

### Detection of Cancer Phenotype

[0175] Once expressed and purified if necessary, the CA proteins and nucleic acids are useful in a number of applications. In one aspect, the expression levels of genes are determined for different cellular states in the cancer phenotype; that is, the expression levels of genes in normal tissue and in cancer tissue (and in some cases, for varying severities of lymphoma that relate to prognosis, as outlined below) are evaluated to provide expression profiles. An expression profile of a particular cell state or point of development is essentially a “fingerprint” of the state; while two states may have any particular gene similarly expressed, the evaluation of a number of genes simultaneously allows the generation of a gene expression profile that is unique to the state of the cell. By comparing expression profiles of cells in different states, information regarding which genes are important (including both up- and down-regulation of genes) in each of these states is obtained. Then, diagnosis may be done or confirmed: does tissue from a particular patient have the gene expression profile of normal or cancer tissue.

[0176] “Differential expression,” or equivalents used herein, refers to both qualitative as well as quantitative differences in the temporal and/or cellular expression patterns of genes, within and among the cells. Thus, a differentially expressed gene can qualitatively have its expression altered, including an activation or inactivation, in, for example, normal versus cancer tissue. That is, genes may be turned on or turned off in a particular state, relative to another state. As is apparent to the skilled artisan, any comparison of two or more states can be made. Such a qualitatively regulated gene will exhibit an expression pattern within a state or cell type which is detectable by standard techniques in one such state or cell type, but is not detectable in both. Alternatively, the determination is quantitative in that expression is increased or decreased; that is, the expression of the gene is either up-regulated, resulting in an increased amount of transcript, or down-regulated, resulting in a decreased amount of transcript. The degree to which expression differs need only be large enough to quantify via standard characterization techniques as outlined below, such as by use of Affymetrix GeneChip® expression arrays, Lockhart, Nature Biotechnology, 14:1675-1680 (1996), hereby expressly incorporated by reference. Other techniques include, but are not limited to, quantitative reverse transcriptase PCR, Northern analysis and RNase protection. As outlined above, preferably the change in expression (i.e. upregulation or downregulation) is at least about 50%, more preferably at least about 100%, more preferably at least about 150%, more preferably, at least about 200%, with from 300 to at least 1000% being especially preferred.

[0177] As will be appreciated by those in the art, this may be done by evaluation at either the gene transcript, or the protein level; that is, the amount of gene expression may be monitored using nucleic acid probes to the DNA or RNA equivalent of the gene transcript, and the quantification of gene expression levels, or, alternatively, the final gene product itself (protein) can be monitored, for example through the use of antibodies to the CA protein and standard immunoassays (ELISAs, etc.) or other techniques, including mass spectroscopy assays, 2D gel electrophoresis assays, etc. Thus, the proteins corresponding to CA genes, i.e. those identified as being important in a particular cancer phenotype, i.e., lymphoma, can be evaluated in a diagnostic test specific for that cancer.

[0178] In a preferred embodiment, gene expression monitoring is done and a number of genes, i.e. an expression profile, is monitored simultaneously, although multiple protein expression monitoring can be done as well. Similarly, these assays may be done on an individual basis as well.

[0179] In this embodiment, the CA nucleic acid probes may be attached to biochips as outlined herein for the detection and quantification of CA sequences in a particular cell. The assays are done as is known in the art. As will be appreciated by those in the art, any number of different CA sequences may be used as probes, with single sequence assays being used in some cases, and a plurality of the sequences described herein being used in other embodiments. In addition, while solid-phase assays are described, any number of solution based assays may be done as well.

[0180] In a preferred embodiment, both solid and solution based assays may be used to detect CA sequences that are up-regulated or down-regulated in cancers as compared to normal tissue. In instances where the CA sequence has been altered but shows the same expression profile or an altered expression profile, the protein will be detected as outlined herein.

[0181] In a preferred embodiment nucleic acids encoding the CA protein are detected. Although DNA or RNA encoding the CA protein may be detected, of particular interest are methods wherein the mRNA encoding a CA protein is detected. The presence of mRNA in a sample is an indication that the CA gene has been transcribed to form the mRNA, and suggests that the protein is expressed. Probes to detect the mRNA can be any nucleotide/deoxynucleotide probe that is complementary to and base pairs with the mRNA and includes but is not limited to oligonucleotides, cDNA or RNA. Probes also should contain a detectable label, as defined herein. In one method the mRNA is detected after immobilizing the nucleic acid to be examined on a solid support such as nylon membranes and hybridizing the probe with the sample. Following washing to remove the non-specifically bound probe, the label is detected. In another method detection of the mRNA is performed in situ. In this method permeabilized cells or tissue samples are contacted with a detectably labeled nucleic acid probe for sufficient time to allow the probe to hybridize with the target mRNA. Following washing to remove the non-specifically bound probe, the label is detected. For example a digoxygenin labeled riboprobe (RNA probe) that is complementary to the mRNA encoding a CA protein is detected by binding the digoxygenin with an anti-digoxygenin secondary antibody and developed with nitro blue tetrazolium and 5-bromo-4-chloro-3-indoyl phosphate.

[0182] In a preferred embodiment, any of the three classes of proteins as described herein (secreted, transmembrane or intracellular proteins) are used in diagnostic assays. The CA proteins, antibodies, nucleic acids, modified proteins and cells containing CA sequences are used in diagnostic assays. This can be done on an individual gene or corresponding polypeptide level, or as sets of assays.

[0183] As described and defined herein, CA proteins find use as markers of cancers, including lymphomas such as, but not limited to, Hodgkin's and non-Hodgkin's lymphoma. Detection of these proteins in putative cancer tissue or patients allows for a determination or diagnosis of the type of cancer. Numerous methods known to those of ordinary skill in the art find use in detecting cancers. In one embodiment, antibodies are used to detect CA proteins. A preferred method separates proteins from a sample or patient by electrophoresis on a gel (typically a denaturing and reducing protein gel, but may be any other type of gel including isoelectric focusing gels and the like). Following separation of proteins, the CA protein is detected by immunoblotting with antibodies raised against the CA protein. Methods of immunoblotting are well known to those of ordinary skill in the art.

[0184] In another preferred method, antibodies to the CA protein find use in in situ imaging techniques. In this method cells are contacted with from one to many antibodies to the CA protein(s). Following washing to remove non-specific antibody binding, the presence of the antibody or antibodies is detected. In one embodiment the antibody is detected by incubating with a secondary antibody that contains a detectable label. In another method the primary antibody to the CA protein(s) contains a detectable label. In another preferred embodiment each one of multiple primary antibodies contains a distinct and detectable label. This method finds particular use in simultaneous screening for a plurality of CA proteins. As will be appreciated by one of ordinary skill in the art, numerous other histological imaging techniques are useful in the invention.

[0185] In a preferred embodiment the label is detected in a fluorometer that has the ability to detect and distinguish emissions of different wavelengths. In addition, a fluorescence activated cell sorter (FACS) can be used in the method.

[0186] In another preferred embodiment, antibodies find use in diagnosing cancers from blood samples. As previously described, certain CA proteins are secreted/circulating molecules. Blood samples, therefore, are useful as samples to be probed or tested for the presence of secreted CA proteins. Antibodies can be used to detect the CA proteins by any of the previously described immunoassay techniques including ELISA, immunoblotting (Western blotting), immunoprecipitation, BIACORE technology and the like, as will be appreciated by one of ordinary skill in the art.

[0187] In a preferred embodiment, in situ hybridization of labeled CA nucleic acid probes to tissue arrays is done. For example, arrays of tissue samples, including CA tissue and/or normal tissue, are made. In situ hybridization as is known in the art can then be done.

[0188] It is understood that when comparing the expression fingerprints between an individual and a standard, the skilled artisan can make a diagnosis as well as a prognosis. It is further understood that the genes that indicate diagnosis may differ from those that indicate prognosis.

[0189] In a preferred embodiment, the CA proteins, antibodies, nucleic acids, modified proteins and cells containing CA sequences are used in prognosis assays. As above, gene expression profiles can be generated that correlate to cancer, especially lymphoma, severity, in terms of long term prognosis. Again, this may be done on either a protein or gene level, with the use of genes being preferred. As above, the CA probes are attached to biochips for the detection and quantification of CA sequences in a tissue or patient. The assays proceed as outlined for diagnosis.

### Screening for CA-Targeted Drugs

[0190] In one embodiment, any of the CA sequences as described herein are used in drug screening assays. The CA proteins, antibodies, nucleic acids, modified proteins and cells containing CA sequences are used in drug screening assays or by evaluating the effect of drug candidates on a “gene expression profile” or expression profile of polypeptides. In one embodiment, the expression profiles are used, preferably in conjunction with high throughput screening techniques to allow monitoring for expression profile genes after treatment with a candidate agent, Zlokarnik, et al., Science 279, 84-8 (1998), Heid, et al., Genome Res., 6:986-994 (1996).

[0191] In another embodiment, the CA proteins, antibodies, nucleic acids, modified proteins and cells containing the native or modified CA proteins are used in screening assays. That is, the present invention provides novel methods for screening for compositions that modulate the cancer phenotype. As above, this can be done by screening for modulators of gene expression or for modulators of protein activity. Similarly, this may be done on an individual gene or protein level or by evaluating the effect of drug candidates on a “gene expression profile”. In a preferred embodiment, the expression profiles are used, preferably in conjunction with high throughput screening techniques to allow monitoring for expression profile genes after treatment with a candidate agent, see Zlokarnik, supra.

[0192] Having identified the CA genes herein, a variety of assays to evaluate the effects of agents on gene expression may be executed. In a preferred embodiment, assays may be run on an individual gene or protein level. That is, having identified a particular gene as aberrantly regulated in cancer, candidate bioactive agents may be screened to modulate the gene's regulation. “Modulation” thus includes both an increase and a decrease in gene expression or activity. The preferred amount of modulation will depend on the original change of the gene expression in normal versus tumor tissue, with changes of at least 10%, preferably 50%, more preferably 100-300%, and in some embodiments 300-1000% or greater. Thus, if a gene exhibits a 4 fold increase in tumor compared to normal tissue, a decrease of about four fold is desired; a 10 fold decrease in tumor compared to normal tissue gives a 10 fold increase in expression for a candidate agent is desired, etc. Alternatively, where the CA sequence has been altered but shows the same expression profile or an altered expression profile, the protein will be detected as outlined herein.

[0193] As will be appreciated by those in the art, this may be done by evaluation at either the gene or the protein level; that is, the amount of gene expression may be monitored using nucleic acid probes and the quantification of gene expression levels, or, alternatively, the level of the gene product itself can be monitored, for example through the use of antibodies to the CA protein and standard immunoassays. Alternatively, binding and bioactivity assays with the protein may be done as outlined below.

[0194] In a preferred embodiment, gene expression monitoring is done and a number of genes, i.e. an expression profile, is monitored simultaneously, although multiple protein expression monitoring can be done as well.

[0195] In this embodiment, the CA nucleic acid probes are attached to biochips as outlined herein for the detection and quantification of CA sequences in a particular cell. The assays are further described below.

[0196] Generally, in a preferred embodiment, a candidate bioactive agent is added to the cells prior to analysis. Moreover, screens are provided to identify a candidate bioactive agent that modulates a particular type of cancer, modulates CA proteins, binds to a CA protein, or interferes between the binding of a CA protein and an antibody.

[0197] The term “candidate bioactive agent” or “drug candidate” or granunatical equivalents as used herein describes any molecule, e.g., protein, oligopeptide, small organic or inorganic molecule, polysaccharide, polynucleotide, etc., to be tested for bioactive agents that are capable of directly or indirectly altering either the cancer phenotype, binding to and/or modulating the bioactivity of a CA protein, or the expression of a CA sequence, including both nucleic acid sequences and protein sequences. In a particularly preferred embodiment, the candidate agent suppresses a CA phenotype, for example to a normal tissue fingerprint. Similarly, the candidate agent preferably suppresses a severe CA phenotype. Generally a plurality of assay mixtures are run in parallel with different agent concentrations to obtain a differential response to the various concentrations. Typically, one of these concentrations serves as a negative control, i.e., at zero concentration or below the level of detection.

[0198] In one aspect, a candidate agent will neutralize the effect of a CA protein. By “neutralize” is meant that activity of a protein is either inhibited or counter acted against so as to have substantially no effect on a cell.

[0199] Candidate agents encompass numerous chemical classes, though typically they are organic or inorganic molecules, preferably small organic compounds having a molecular weight of more than 100 and less than about 2,500 Daltons. Preferred small molecules are less than 2000, or less than 1500 or less than 1000 or less than 500 D. Candidate agents comprise functional groups necessary for structural interaction with proteins, particularly hydrogen bonding, and typically include at least an amine, carbonyl, hydroxyl or carboxyl group, preferably at least two of the functional chemical groups. The candidate agents often comprise cyclical carbon or heterocyclic structures and/or aromatic or polyaromatic structures substituted with one or more of the above functional groups. Candidate agents are also found among biomolecules including peptides, saccharides, fatty acids, steroids, purines, pyrimidines, derivatives, structural analogs or combinations thereof. Particularly preferred are peptides.

[0200] Candidate agents are obtained from a wide variety of sources including libraries of synthetic or natural compounds. For example, numerous means are available for random and directed synthesis of a wide variety of organic compounds and biomolecules, including expression of randomized oligonucleotides. Alternatively, libraries of natural compounds in the form of bacterial, fungal, plant and animal extracts are available or readily produced. Additionally, natural or synthetically produced libraries and compounds are readily modified through conventional chemical, physical and biochemical means. Known pharmacological agents may be subjected to directed or random chemical modifications, such as acylation, alkylation, esterification, or amidification to produce structural analogs.

[0201] In one embodiment, the candidate bioactive agents are proteins. By “protein” herein is meant at least two covalently attached amino acids, which includes proteins, polypeptides, oligopeptides and peptides. The protein may be made up of naturally occurring amino acids and peptide bonds, or synthetic peptidomimetic structures. Thus “amino acid”, or “peptide residue”, as used herein means both naturally occurring and synthetic amino acids. For example, homo-phenylalanine, citrulline and norleucine are considered amino acids for the purposes of the invention. “Amino acid” also includes imino acid residues such as proline and hydroxyproline. The side chains may be in either the (R) or the (S) configuration. In the preferred embodiment, the amino acids are in the (S) or L-configuration. If non-naturally occurring side chains are used, non-amino acid substituents may be used, for example to prevent or retard in vivo degradations.

[0202] In a preferred embodiment, the candidate bioactive agents are naturally occurring proteins or fragments of naturally occurring proteins. Thus, for example, cellular extracts containing proteins, or random or directed digests of proteinaceous cellular extracts, may be used. In this way libraries of prokaryotic and eukaryotic proteins may be made for screening in the methods of the invention. Particularly preferred in this embodiment are libraries of bacterial, fungal, viral, and mammalian proteins, with the latter being preferred, and human proteins being especially preferred.

[0203] In another preferred embodiment, the candidate bioactive agents are peptides of from about 5 to about 30 amino acids, with from about 5 to about 20 amino acids being preferred, and from about 7 to about 15 being particularly preferred. The peptides may be digests of naturally occurring proteins as is outlined above, random peptides, or “biased” random peptides. By “randomized” or grammatical equivalents herein is meant that each nucleic acid and peptide consists of essentially random nucleotides and amino acids, respectively. Since generally these random peptides (or nucleic acids, discussed below) are chemically synthesized, they may incorporate any nucleotide or amino acid at any position. The synthetic process can be designed to generate randomized proteins or nucleic acids, to allow the formation of all or most of the possible combinations over the length of the sequence, thus forming a library of randomized candidate bioactive proteinaceous agents.

[0204] In one embodiment, the library is fully randomized, with no sequence preferences or constants at any position. In a preferred embodiment, the library is biased. That is, some positions within the sequence are either held constant, or are selected from a limited number of possibilities. For example, in a preferred embodiment, the nucleotides or amino acid residues are randomized within a defined class, for example, of hydrophobic amino acids, hydrophilic residues, sterically biased (either small or large) residues, towards the creation of nucleic acid binding domains, the creation of cysteines, for cross-linking, prolines for SH-3 domains, serines, threonines, tyrosines or histidines for phosphorylation sites, etc., or to purines, etc.

[0205] In one embodiment, the candidate bioactive agents are nucleic acids. As described generally for proteins, nucleic acid candidate bioactive agents may be naturally occurring nucleic acids, random nucleic acids, or “biased” random nucleic acids. In another embodiment, the candidate bioactive agents are organic chemical moieties, a wide variety of which are available in the literature.

[0206] In assays for testing alteration of the expression profile of one or more CA genes, after the candidate agent has been added and the cells allowed to incubate for some period of time, a nucleic acid sample containing the target sequences to be analyzed is prepared. The target sequence is prepared using known techniques (e.g., converted from RNA to labeled cDNA, as described above) and added to a suitable microarray. For example, an in vitro reverse transcription with labels covalently attached to the nucleosides is performed. Generally, the nucleic acids are labeled with a label as defined herein, especially with biotin-FITC or PE, Cy3 and Cy5.

[0207] As will be appreciated by those in the art, these assays can be direct hybridization assays or can comprise “sandwich assays”, which include the use of multiple probes, as is generally outlined in U.S. Pat. Nos. 5,681,702, 5,597,909, 5,545,730, 5,594,117, 5,591,584, 5,571,670, 5,580,731, 5,571,670, 5,591,584, 5,624,802, 5,635,352, 5,594,118, 5,359,100, 5,124,246 and 5,681,697, all of which are hereby incorporated by reference. In this embodiment, in general, the target nucleic acid is prepared as outlined above, and then added to the biochip comprising a plurality of nucleic acid probes, under conditions that allow the formation of a hybridization complex.

[0208] A variety of hybridization conditions may be used in the present invention, including high, moderate and low stringency conditions as outlined above. The assays are generally run under stringency conditions that allow formation of the label probe hybridization complex only in the presence of target. Stringency can be controlled by altering a step parameter that is a thermodynamic variable, including, but not limited to, temperature, formamide concentration, salt concentration, chaotropic salt concentration, pH, organic solvent concentration, etc. These parameters may also be used to control non-specific binding, as is generally outlined in U.S. Pat. No. 5,681,697. Thus it may be desirable to perform certain steps at higher stringency conditions to reduce non-specific binding.

[0209] The reactions outlined herein may be accomplished in a variety of ways, as will be appreciated by those in the art. Components of the reaction may be added simultaneously, or sequentially, in any order, with preferred embodiments outlined below. In addition, the reaction may include a variety of other reagents in the assays. These include reagents like salts, buffers, neutral proteins, e.g. albumin, detergents, etc which may be used to facilitate optimal hybridization and detection, and/or reduce non-specific or background interactions. Also reagents that otherwise improve the efficiency of the assay, such as protease inhibitors, nuclease inhibitors, anti-microbial agents, etc., may be used, depending on the sample preparation methods and purity of the target. In addition, either solid phase or solution based (i.e., kinetic PCR) assays may be used.

[0210] Once the assay is run, the data are analyzed to determine the expression levels, and changes in expression levels as between states, of individual genes, forming a gene expression profile.

[0211] In a preferred embodiment, as for the diagnosis and prognosis applications, having identified the differentially expressed gene(s) or mutated gene(s) important in any one state, screens can be run to test for alteration of the expression of the CA genes individually. That is, screening for modulation of regulation of expression of a single gene can be done. Thus, for example, in the case of target genes whose presence or absence is unique between two states, screening is done for modulators of the target gene expression.

[0212] In addition, screens can be done for novel genes that are induced in response to a candidate agent. After identifying a candidate agent based upon its ability to suppress a CA expression pattern leading to a normal expression pattern, or modulate a single CA gene expression profile so as to mimic the expression of the gene from normal tissue, a screen as described above can be performed to identify genes that are specifically modulated in response to the agent. Comparing expression profiles between normal tissue and agent treated CA tissue reveals genes that are not expressed in normal tissue or CA tissue, but are expressed in agent treated tissue. These agent specific sequences can be identified and used by any of the methods described herein for CA genes or proteins. In particular these sequences and the proteins they encode find use in marking or identifying agent-treated cells. In addition, antibodies can be raised against the agent-induced proteins and used to target novel therapeutics to the treated CA tissue sample.

[0213] Thus, in one embodiment, a candidate agent is administered to a population of CA cells, that thus has an associated CA expression profile. By “administration” or “contacting” herein is meant that the candidate agent is added to the cells in such a manner as to allow the agent to act upon the cell, whether by uptake and intracellular action, or by action at the cell surface. In some embodiments, nucleic acid encoding a proteinaceous candidate agent (i.e. a peptide) may be put into a viral construct such as a retroviral construct and added to the cell, such that expression of the peptide agent is accomplished; see PCT US97/01019, hereby expressly incorporated by reference.

[0214] Once the candidate agent has been administered to the cells, the cells can be washed if desired and are allowed to incubate under preferably physiological conditions for some period of time. The cells are then harvested and a new gene expression profile is generated, as outlined herein.

[0215] Thus, for example, CA tissue may be screened for agents that reduce or suppress the CA phenotype. A change in at least one gene of the expression profile indicates that the agent has an effect on CA activity. By defining such a signature for the CA phenotype, screens for new drugs that alter the phenotype can be devised. With this approach, the drug target need not be known and need not be represented in the original expression screening platform, nor does the level of transcript for the target protein need to change.

[0216] In a preferred embodiment, as outlined above, screens may be done on individual genes and gene products (proteins). That is, having identified a particular differentially expressed gene as important in a particular state, screening of modulators of either the expression of the gene or the gene product itself can be done. The gene products of differentially expressed genes are sometimes referred to herein as “CA proteins” or “CAP”. The CAP may be a fragment, or alternatively, be the full-length protein to the fragment encoded by the nucleic acids of Tables 1-152 (human genomic sequences of SEQ ID NOS: 6, 12, 24, 38, 46, 56, 64, 78, 90, 99, 111, 131, 139, 147, 155, 177, 187, 201, 207, 217, 234, 249, 271, 292, 300, 310, 322, 328, 336, 350, 374, 394, 407, 419, 437, 455, 465, 485, 498, 506, 518, 526, 534, 542, 550, 556, 564, 572, 588, 602, 610, 618, 632, 644, 654, 660, 668, 674, 686, 700, 712, 720, 732, 749, 763, 775, 785, 795, 813, 819, 829, 837, 851, 859, 869, 887, 905, 919, 927, 937, 951, 961, 971, 983, 995, 1005, 1019, 1029, 1035, 1047, 1053, 1059, 1067, 1079, 1087, 1093, 1101, 1117, 1125, 1131, 1153, 1159, 1171, 1183, 1195, 1205, 1213, 1237, 1265, 1277, 1283, 1295, 1305, 1315, 1328, 1354, 1362, 1376, 1386, 1398, 1408, 1418, 1424, 1434, 1446, 1456, 1468, 1480, 1486, 1495, 1505, 1515, 1525, 1535, 1549, 1559, 1571, 1587, 1607, 1617, 1629, 1647, 1655, 1663, 1685, 1701, 1711, 1719, and 1735, and sequences of SEQ ID NOS: 7, 13, 15, 17, 19, 25, 27, 29, 31, 33, 39, 41, 47, 49, 57, 59, 65, 67, 69, 71, 73, 79, 81, 83, 85, 91, 100, 102, 104, 106, 112, 114, 116, 118, 120, 122, 124, 126, 132, 134, 140, 142, 148, 156, 158, 160, 162, 178, 180, 182, 188, 190, 192, 194, 196, 202, 208, 210, 212, 218, 220, 222, 224, 235, 237, 239, 241, 243, 245, 247, 250, 252, 254, 256, 258, 260, 262, 272, 274, 276, 293, 295, 301, 303, 311, 313, 315, 317, 323, 329, 331, 337, 351, 353, 355, 357, 359, 361, 363, 365, 367, 369, 375, 377, 379, 381, 383, 385, 387, 395, 397, 408, 410, 412, 414, 420, 422, 424, 426, 428, 430, 438, 440, 442, 444, 446, 448, 450, 456, 458, 466, 468, 470, 472, 474, 476, 478, 486, 488, 490, 499, 501, 507, 509, 519, 527, 529, 535, 537, 543, 545, 551, 557, 559, 565, 567, 573, 575, 577, 579, 581, 583, 589, 591, 593, 595, 603, 605, 611, 613, 619, 621, 623, 625, 627, 633, 635, 637, 639, 645, 647, 649, 655, 661, 663, 669, 675, 677, 679, 687, 689, 691, 693, 695, 701, 703, 705, 707, 713, 715, 721, 733, 735, 750, 752, 754, 756, 758, 764, 766, 768, 770, 776, 786, 788, 790, 796, 798, 800, 802, 804, 806, 808, 814, 820, 822, 830, 832, 838, 840, 842, 844, 846, 852, 854, 860, 862, 870, 872, 874, 876, 878, 880, 888, 890, 892, 894, 896, 898, 900, 906, 908, 910, 912, 920, 922, 928, 938, 940, 942, 944, 946, 952, 954, 956, 962, 964, 966, 972, 974, 976, 978, 984, 986, 988, 990, 996, 998, 1000, 1006, 1008, 1010, 1012, 1014, 1020, 1022, 1024, 1030, 1036, 1038, 1040, 1042, 1048, 1054, 1060, 1062, 1068, 1070, 1072, 1074, 1080, 1082, 1088, 1094, 1096, 1102, 1104, 1106, 1108, 1110, 1112, 1118, 1120, 1126, 1132, 1134, 1136, 1138, 1140, 1142, 1144, 1146, 1148, 1154, 1160, 1162, 1164, 1172, 1184, 1186, 1188, 1190, 1196, 1198, 1200, 1206, 1208, 1214, 1216, 1218, 1220, 1222, 1238, 1240, 1242, 1244, 1246, 1248, 1250, 1252, 1254, 1256, 1258, 1266, 1268, 1270, 1278, 1284, 1286, 1288, 1290, 1296, 1298, 1300, 1306, 1316, 1318, 1329, 1331, 1333, 1335, 1337, 1339, 1341, 1343, 1345, 1347, 1355, 1357, 1363, 1365, 1367, 1369, 1371, 1377, 1379, 1381, 1387, 1389, 1391, 1393, 1399, 1401, 1403, 1409, 1419, 1425, 1427, 1435, 1437, 1439, 1441, 1447, 1457, 1459, 1461, 1469, 1471, 1473, 1475, 1481, 1487, 1496, 1498, 1500, 1506, 1508, 1510, 1516, 1518, 1520, 1526, 1528, 1536, 1538, 1550, 1552, 1554, 1560, 1562, 1564, 1572, 1574, 1576, 1588, 1590, 1592, 1594, 1608, 1610, 1612, 1618, 1620, 1622, 1624, 1630, 1632, 1634, 1636, 1638, 1648, 1650, 1656, 1664, 1666, 1668, 1670, 1672, 1674, 1676, 1678, 1686, 1688, 1690, 1702, 1704, 1706, 1712, 1714, 1720, 1722, 1724, 1726, 1728, 1730, 1736, 1738, and 1740 corresponding to the human mRNAs generated therefrom).

[0217] In a preferred embodiment, the CAP is selected from the human protein sequences shown in Tables 1-152 (of SEQ ID NOS: 8, 14, 16, 18, 20, 26, 28, 30, 32, 34, 40, 42, 48, 50, 58, 60, 66, 68, 70, 72, 74, 80, 82, 84, 86, 92, 101, 103, 105, 107, 113, 115, 117, 119, 121, 123, 125, 127, 133, 135, 141, 143, 149, 157, 159, 161, 163, 179, 181, 183, 189, 191, 193, 195, 197, 203, 209, 211, 213, 219, 221, 223, 225, 236, 238, 240, 242, 244, 246, 248, 251, 253, 255, 257, 259, 261, 263, 273, 275, 277, 294, 296, 302, 304, 312, 314, 316, 318, 324, 330, 332, 338, 352, 354, 356, 358, 360, 362, 364, 366, 368, 370, 376, 378, 380, 382, 384, 386, 388, 396, 398, 409, 411, 413, 415, 421, 423, 425, 427, 429, 431, 439, 441, 443, 445, 447, 449, 451, 457, 459, 467, 469, 471, 473, 475, 477, 479, 487, 489, 491, 500, 502, 508, 510, 520, 528, 530, 536, 538, 544, 546, 552, 558, 560, 566, 568, 574, 576, 578, 580, 582, 584, 590, 592, 594, 596, 604, 606, 612, 614, 620, 622, 624, 626, 628, 634, 636, 638, 640, 646, 648, 650, 656, 662, 664, 670, 676, 678, 680, 688, 690, 692, 694, 696, 702, 704, 706, 708, 714, 716, 722, 734, 736, 751, 753, 755, 757, 759, 765, 767, 769, 771, 777, 787, 789, 791, 797, 799, 801, 803, 805, 807, 809, 815, 821, 823, 831, 833, 839, 841, 843, 845, 847, 853, 855, 861, 863, 871, 873, 875, 877, 879, 881, 889, 891, 893, 895, 897, 899, 901, 907, 909, 911, 913, 921, 923, 929, 939, 941, 943, 945, 947, 953, 955, 957, 963, 965, 967, 973, 975, 977, 979, 985, 987, 989, 991, 997, 999, 1001, 1007, 1009, 1011, 1013, 1015, 1021, 1023, 1025, 1031, 1037, 1039, 1041, 1043, 1049, 1055, 1061, 1063, 1069, 1071, 1073, 1075, 1081, 1083, 1089, 1095, 1097, 1103, 1105, 1107, 1109, 1111, 1113, 1119, 1121, 1127, 1133, 1135, 1137, 1139, 1141, 1143, 1145, 1147, 1149, 1155, 1161, 1163, 1165, 1173, 1185, 1187, 1189, 1191, 1197, 1199, 1201, 1207, 1209, 1215, 1217, 1219, 1221, 1223, 1239, 1241, 1243, 1245, 1247, 1249, 1251, 1253, 1255, 1257, 1259, 1267, 1269, 1271, 1279, 1285, 1287, 1289, 1291, 1297, 1299, 1301, 1307, 1317, 1319, 1330, 1332, 1334, 1336, 1338, 1340, 1342, 1344, 1346, 1348, 1356, 1358, 1364, 1366, 1368, 1370, 1372, 1378, 1380, 1382, 1388, 1390, 1392, 1394, 1400, 1402, 1404, 1410, 1420, 1426, 1428, 1436, 1438, 1440, 1442, 1448, 1458, 1460, 1462, 1470, 1472, 1474, 1476, 1482, 1488, 1497, 1499, 1501, 1507, 1509, 1511, 1517, 1519, 1521, 1527, 1529, 1537, 1539, 1551, 1553, 1555, 1561, 1563, 1565, 1573, 1575, 1577, 1589, 1591, 1593, 1595, 1609, 1611, 1613, 1619, 1621, 1623, 1625, 1631, 1633, 1635, 1637, 1639, 1649, 1651, 1657, 1665, 1667, 1669, 1671, 1673, 1675, 1677, 1679, 1687, 1689, 1691, 1703, 1705, 1707, 1713, 1715, 1721, 1723, 1725, 1727, 1729, 1731, 1737, 1739, and 1741). In another embodiment, the sequences are sequence variants as further described herein.

[0218] Preferably, the CAP is a fragment approximately 14 to 24 amino acids in length. More preferably the fragment is a soluble fragment. Preferably, the fragment includes a non-transmembrane region. In a preferred embodiment, the fragment has an N-terminal Cys to aid in solubility. In one embodiment, the C-terminus of the fragment is kept as a free acid and the N-terminus is a free amine to aid in coupling, e.g., to a cysteine.

[0219] In one embodiment the CA proteins are conjugated to an immunogenic agent as discussed herein. In one embodiment the CA protein is conjugated to BSA.

[0220] In a preferred embodiment, screening is done to alter the biological function of the expression product of the CA gene. Again, having identified the importance of a gene in a particular state, screening for agents that bind and/or modulate the biological activity of the gene product can be run as is more fully outlined below.

[0221] In a preferred embodiment, screens are designed to first find candidate agents that can bind to CA proteins, and then these agents may be used in assays that evaluate the ability of the candidate agent to modulate the CAP activity and the cancer phenotype. Thus, as will be appreciated by those in the art, there are a number of different assays that may be run; binding assays and activity assays.

[0222] In a preferred embodiment, binding assays are done. In general, purified or isolated gene product is used; that is, the gene products of one or more CA nucleic acids are made. In general, this is done as is known in the art. For example, antibodies are generated to the protein gene products, and standard immunoassays are run to determine the amount of protein present. Alternatively, cells comprising the CA proteins can be used in the assays.

[0223] Thus, in a preferred embodiment, the methods comprise combining a CA protein and a candidate bioactive agent, and determining the binding of the candidate agent to the CA protein. Preferred embodiments utilize the human or mouse CA protein, although other mammalian proteins may also be used, for example for the development of animal models of human disease. In some embodiments, as outlined herein, variant or derivative CA proteins may be used.

[0224] Generally, in a preferred embodiment of the methods herein, the CA protein or the candidate agent is non-diffusably bound to an insoluble support having isolated sample receiving areas (e.g. a microtiter plate, an array, etc.). The insoluble support may be made of any composition to which the compositions can be bound, is readily separated from soluble material, and is otherwise compatible with the overall method of screening. The surface of such supports may be solid or porous and of any convenient shape. Examples of suitable insoluble supports include microtiter plates, arrays, membranes and beads. These are typically made of glass, plastic (e.g., polystyrene), polysaccharides, nylon or nitrocellulose, Teflon®, etc. Microtiter plates and arrays are especially convenient because a large number of assays can be carried out simultaneously, using small amounts of reagents and samples.

[0225] The particular manner of binding of the composition is not crucial so long as it is compatible with the reagents and overall methods of the invention, maintains the activity of the composition and is nondiffusable. Preferred methods of binding include the use of antibodies (which do not sterically block either the ligand binding site or activation sequence when the protein is bound to the support), direct binding to “sticky” or ionic supports, chemical crosslinking, the synthesis of the protein or agent on the surface, etc. Following binding of the protein or agent, excess unbound material is removed by washing. The sample receiving areas may then be blocked through incubation with bovine serum albumin (BSA), casein or other innocuous protein or other moiety.

[0226] In a preferred embodiment, the CA protein is bound to the support, and a candidate bioactive agent is added to the assay. Alternatively, the candidate agent is bound to the support and the CA protein is added. Novel binding agents include specific antibodies, non-natural binding agents identified in screens of chemical libraries, peptide analogs, etc. Of particular interest are screening assays for agents that have a low toxicity for human cells. A wide variety of assays may be used for this purpose, including labeled in vitro protein-protein binding assays, electrophoretic mobility shift assays, immunoassays for protein binding, functional assays (phosphorylation assays, etc.) and the like.

[0227] The determination of the binding of the candidate bioactive agent to the CA protein may be done in a number of ways. In a preferred embodiment, the candidate bioactive agent is labeled, and binding determined directly. For example, this may be done by attaching all or a portion of the CA protein to a solid support, adding a labeled candidate agent (for example a fluorescent label), washing off excess reagent, and determining whether the label is present on the solid support. Various blocking and washing steps may be utilized as is known in the art.

[0228] By “labeled” herein is meant that the compound is either directly or indirectly labeled with a label which provides a detectable signal, e.g. radioisotope, fluorescers, enzyme, antibodies, particles such as magnetic particles, chemiluminescers, or specific binding molecules, etc. Specific binding molecules include pairs, such as biotin and streptavidin, digoxin and antidigoxin etc. For the specific binding members, the complementary member would normally be labeled with a molecule which provides for detection, in accordance with known procedures, as outlined above. The label can directly or indirectly provide a detectable signal.

[0229] In some embodiments, only one of the components is labeled. For example, the proteins (or proteinaceous candidate agents) may be labeled at tyrosine positions using ¹²⁵I, or with fluorophores. Alternatively, more than one component may be labeled with different labels; using ¹²⁵I for the proteins, for example, and a fluorophore for the candidate agents.

[0230] In a preferred embodiment, the binding of the candidate bioactive agent is determined through the use of competitive binding assays. In this embodiment, the competitor is a binding moiety known to bind to the target molecule (i.e. CA protein), such as an antibody, peptide, binding partner, ligand, etc. Under certain circumstances, there may be competitive binding as between the bioactive agent and the binding moiety, with the binding moiety displacing the bioactive agent.

[0231] In one embodiment, the candidate bioactive agent is labeled. Either the candidate bioactive agent, or the competitor, or both, is added first to the protein for a time sufficient to allow binding, if present. Incubations may be performed at any temperature which facilitates optimal activity, typically between 4 and 40° C. Incubation periods are selected for optimum activity, but may also be optimized to facilitate rapid high throughput screening. Typically between 0.1 and 1 hour will be sufficient. Excess reagent is generally removed or washed away. The second component is then added, and the presence or absence of the labeled component is followed, to indicate binding.

[0232] In a preferred embodiment, the competitor is added first, followed by the candidate bioactive agent. Displacement of the competitor is an indication that the candidate bioactive agent is binding to the CA protein and thus is capable of binding to, and potentially modulating, the activity of the CA protein. In this embodiment, either component can be labeled. Thus, for example, if the competitor is labeled, the presence of label in the wash solution indicates displacement by the agent. Alternatively, if the candidate bioactive agent is labeled, the presence of the label on the support indicates displacement.

[0233] In an alternative embodiment, the candidate bioactive agent is added first, with incubation and washing, followed by the competitor. The absence of binding by the competitor may indicate that the bioactive agent is bound to the CA protein with a higher affinity. Thus, if the candidate bioactive agent is labeled, the presence of the label on the support, coupled with a lack of competitor binding, may indicate that the candidate agent is capable of binding to the CA protein.

[0234] In a preferred embodiment, the methods comprise differential screening to identity bioactive agents that are capable of modulating the activity of the CA proteins. In this embodiment, the methods comprise combining a CA protein and a competitor in a first sample. A second sample comprises a candidate bioactive agent, a CA protein and a competitor. The binding of the competitor is determined for both samples, and a change, or difference in binding between the two samples indicates the presence of an agent capable of binding to the CA protein and potentially modulating its activity. That is, if the binding of the competitor is different in the second sample relative to the first sample, the agent is capable of binding to the CA protein.

[0235] Alternatively, a preferred embodiment utilizes differential screening to identify drug candidates that bind to the native CA protein, but cannot bind to modified CA proteins. The structure of the CA protein may be modeled, and used in rational drug design to synthesize agents that interact with that site. Drug candidates that affect CA bioactivity are also identified by screening drugs for the ability to either enhance or reduce the activity of the protein.

[0236] Positive controls and negative controls may be used in the assays. Preferably all control and test samples are performed in at least triplicate to obtain statistically significant results. Incubation of all samples is for a time sufficient for the binding of the agent to the protein. Following incubation, all samples are washed free of non-specifically bound material and the amount of bound, generally labeled agent determined. For example, where a radiolabel is employed, the samples may be counted in a scintillation counter to determine the amount of bound compound.

[0237] A variety of other reagents may be included in the screening assays. These include reagents like salts, neutral proteins, e.g. albumin, detergents, etc which may be used to facilitate optimal protein-protein binding and/or reduce non-specific or background interactions. Also reagents that otherwise improve the efficiency of the assay, such as protease inhibitors, nuclease inhibitors, anti-microbial agents, etc., may be used. The mixture of components may be added in any order that provides for the requisite binding.

[0238] Screening for agents that modulate the activity of CA proteins may also be done. In a preferred embodiment, methods for screening for a bioactive agent capable of modulating the activity of CA proteins comprise the steps of adding a candidate bioactive agent to a sample of CA proteins, as above, and determining an alteration in the biological activity of CA proteins. “Modulating the activity of a CA protein” includes an increase in activity, a decrease in activity, or a change in the type or kind of activity present. Thus, in this embodiment, the candidate agent should both bind to CA proteins (although this may not be necessary), and alter its biological or biochemical activity as defined herein. The methods include both in vitro screening methods, as are generally outlined above, and in vivo screening of cells for alterations in the presence, distribution, activity or amount of CA proteins.

[0239] Thus, in this embodiment, the methods comprise combining a CA sample and a candidate bioactive agent, and evaluating the effect on CA activity. By “CA activity” or grammatical equivalents herein is meant one of the CA protein's biological activities, including, but not limited to, its role in tumorigenesis, including cell division, preferably in lymphatic tissue, cell proliferation, tumor growth and transformation of cells. In one embodiment, CA activity includes activation of or by a protein encoded by a nucleic acid of Tables 1-152. An inhibitor of CA activity is the inhibition of any one or more CA activities.

[0240] In a preferred embodiment, the activity of the CA protein is increased; in another preferred embodiment, the activity of the CA protein is decreased. Thus, bioactive agents that are antagonists are preferred in some embodiments, and bioactive agents that are agonists may be preferred in other embodiments.

[0241] In a preferred embodiment, the invention provides methods for screening for bioactive agents capable of modulating the activity of a CA protein. The methods comprise adding a candidate bioactive agent, as defined above, to a cell comprising CA proteins. Preferred cell types include almost any cell. The cells contain a recombinant nucleic acid that encodes a CA protein. In a preferred embodiment, a library of candidate agents is tested on a plurality of cells.

[0242] In one aspect, the assays are evaluated in the presence or absence or previous or subsequent exposure of physiological signals, for example hormones, antibodies, peptides, antigens, cytokines, growth factors, action potentials, pharmacological agents including chemotherapeutics, radiation, carcinogenics, or other cells (i.e. cell-cell contacts). In another example, the determinations are determined at different stages of the cell cycle process.

[0243] In this way, bioactive agents are identified. Compounds with pharmacological activity are able to enhance or interfere with the activity of the CA protein.

### APPLICATIONS OF THE INVENTION

[0244] In one embodiment, a method of inhibiting cancer cell division is provided. In another embodiment, a method of inhibiting tumor growth is provided. In a further embodiment, methods of treating cells or individuals with cancer are provided.

[0245] The method comprises administration of a cancer inhibitor. In particular embodiments, the cancer inhibitor is an antisense molecule, a pharmaceutical composition, a therapeutic agent or small molecule, or a monoclonal, polyclonal, chimeric or humanized antibody. In particular embodiments, a therapeutic agent is coupled with a an antibody, preferable a monoclonal antibody.

[0246] In other embodiments, methods for detection or diagnosis of cancer cells in an individual are provided. In particular embodiments, the diagnostic/detection agent is a small molecule that preferentially binds to a CAP according to the invention. In one embodiment, the diagnostic/detection agent is an antibody, preferably a monoclonal antibody, preferably linked to a detectable agent.

[0247] In other embodiments of the invention, animal models and transgenic animals are provided, which find use in generating animal models of cancers, particularly lymphomas and carcinomas.

### (a) Antisense Molecules

[0248] In one embodiment, the cancer inhibitor is an antisense molecule. Antisense molecules as used herein include antisense or sense oligonucleotides comprising a single-stranded nucleic acid sequence (either RNA or DNA) capable of binding to target mRNA (sense) or DNA (antisense) sequences for cancer molecules. Antisense or sense oligonucleotides, according to the present invention, comprise a fragment generally at least about 14 nucleotides, preferably from about 14 to 30 nucleotides. The ability to derive an antisense or a sense oligonucleotide, based upon a cDNA sequence encoding a given protein is described in, for example, Stein and Cohen, Cancer Res. 48:2659, (1988) and van der Krol et al., BioTechniques 6:958, (1988).

[0249] Antisense molecules can be modified or unmodified RNA, DNA, or mixed polymer oligonucleotides. These molecules function by specifically binding to matching sequences resulting in inhibition of peptide synthesis (Wu-Pong, November 1994, BioPharm, 20-33) either by steric blocking or by activating an RNase H enzyme. Antisense molecules can also alter protein synthesis by interfering with RNA processing or transport from the nucleus into the cytoplasm (Mukhopadhyay & Roth, 1996, Crit. Rev. in Oncogenesis 7, 151-190). In addition, binding of single stranded DNA to RNA can result in nuclease-mediated degradation of the heteroduplex (Wu-Pong, supra). Backbone modified DNA chemistry which have thus far been shown to act as substrates for RNase H are phosphorothioates, phosphorodithioates, borontrifluoridates, and 2′-arabino and 2′-fluoro arabino-containing oligonucleotides.

[0250] Antisense molecules may be introduced into a cell containing the target nucleotide sequence by formation of a conjugate with a ligand binding molecule, as described in WO 91/04753. Suitable ligand binding molecules include, but are not limited to, cell surface receptors, growth factors, other cytokines, or other ligands that bind to cell surface receptors. Preferably, conjugation of the ligand binding molecule does not substantially interfere with the ability of the ligand binding molecule to bind to its corresponding molecule or receptor, or block entry of the sense or antisense oligonucleotide or its conjugated version into the cell. Alternatively, a sense or an antisense oligonucleotide may be introduced into a cell containing the target nucleic acid sequence by formation of an oligonucleotide-lipid complex, as described in WO 90/10448. It is understood that the use of antisense molecules or knock out and knock in models may also be used in screening assays as discussed above, in addition to methods of treatment.

### (b) RNA Interference

[0251] RNA interference refers to the process of sequence-specific post transcriptional gene silencing in animals mediated by short interfering RNAs (siRNA) (Fire et al., Nature, 391, 806 (1998)). The corresponding process in plants is referred to as post transcriptional gene silencing or RNA silencing and is also referred to as quelling in fungi. The presence of dsRNA in cells triggers the RNAi response though a mechanism that has yet to be fully characterized. This mechanism appears to be different from the interferon response that results from dsRNA mediated activation of protein kinase PKR and 2′,5′-oligoadenylate synthetase resulting in non-specific cleavage of mRNA by ribonuclease L. (reviewed in Sharp, P.A., RNA interference—2001, Genes & Development 15:485-490 (2001)).

[0252] Small interfering RNAs (siRNAs) are powerful sequence-specific reagents designed to suppress the expression of genes in cultured mammalian cells through a process known as RNA interference (RNAi). Elbashir, S. M. et al. Nature 411:494-498 (2001); Caplen, N. J. et al. Proc. Natl. Acad. Sci. USA 98:9742-9747 (2001); Harborth, J. et al. J. Cell Sci. 114:4557-4565 (2001). The term “short interfering RNA” or “siRNA” refers to a double stranded nucleic acid molecule capable of RNA interference “RNAi”, (see Kreutzer et al., WO 00/44895; Zernicka-Goetz et al. WO 01/36646; Fire, WO 99/32619; Mello and Fire, WO 01/29058). As used herein, siRNA molecules are limited to RNA molecules but further encompasses chemically modified nucleotides and non-nucleotides. siRNA gene-targeting experiments have been carried out by transient siRNA transfer into cells (achieved by such classic methods as liposome-mediated transfection, electroporation, or microinjection).

[0253] Molecules of siRNA are 21- to 23-nucleotide RNAs, with characteristic 2- to 3-nucleotide 3′-overhanging ends resembling the RNase III processing products of long double-stranded RNAs (dsRNAs) that normally initiate RNAi. When introduced into a cell, they assemble with yet-to-be-identified proteins of an endonuclease complex (RNA-induced silencing complex), which then guides target mRNA cleavage. As a consequence of degradation of the targeted mRNA, cells with a specific phenotype characteristic of suppression of the corresponding protein product are obtained. The small size of siRNAs, compared with traditional antisense molecules, prevents activation of the dsRNA-inducible interferon system present in mammalian cells. This avoids the nonspecific phenotypes normally produced by dsRNA larger than 30 base pairs in somatic cells.

[0254] Intracellular transcription of small RNA molecules is achieved by cloning the siRNA templates into RNA polymerase III (Pol III) transcription units, which normally encode the small nuclear RNA (snRNA) U6 or the human RNase P RNA H1. Two approaches have been developed for expressing siRNAs: in the first, sense and antisense strands constituting the siRNA duplex are transcribed by individual promoters (Lee, N. S. et al. Nat. Biotechnol. 20, 500-505 (2002). Miyagishi, M. & Taira, K. Nat. Biotechnol. 20, 497-500 (2002).); in the second, siRNAs are expressed as fold-back stem-loop structures that give rise to siRNAs after intracellular processing (Paul, C. P. et al. Nat. Biotechnol 20:505-508 (2002)). The endogenous expression of siRNAs from introduced DNA templates is thought to overcome some limitations of exogenous siRNA delivery, in particular the transient loss of phenotype. U6 and H1 RNA promoters are members of the type III class of Pol III promoters. (Paule, M. R. & White, R. J. Nucleic Acids Res. 28, 1283-1298 (2000)).

[0255] Co-expression of sense and antisense siRNAs mediate silencing of target genes, whereas expression of sense or antisense siRNA alone do not greatly affect target gene expression. Transfection of plasmid DNA, rather than synthetic siRNAs, may appear advantageous, considering the danger of RNase contamination and the costs of chemically synthesized siRNAs or siRNA transcription kits. Stable expression of siRNAs allows new gene therapy applications, such as treatment of persistent viral infections. Considering the high specificity of siRNAs, the approach also allows the targeting of disease-derived transcripts with point mutations, such as RAS or TP53 oncogene transcripts, without alteration of the remaining wild-type allele. Finally, by high-throughput sequence analysis of the various genomes, the DNA-based methodology may also be a cost-effective alternative for automated genome-wide loss-of-function phenotypic analysis, especially when combined with miniaturized array-based phenotypic screens. (Ziauddin, J. & Sabatini, D. M. Nature 411:107-110 (2001)).

[0256] The presence of long dsRNAs in cells stimulates the activity of a ribonuclease III enzyme referred to as dicer. Dicer is involved in the processing of the dsRNA into short pieces of dsRNA known as short interfering RNAs (siRNA) (Berstein et al., 2001, Nature, 409:363 (2001)). Short interfering RNAs derived from dicer activity are typically about 21-23 nucleotides in length and comprise about 19 base pair duplexes. Dicer has also been implicated in the excision of 21 and 22 nucleotide small temporal RNAs (stRNA) from precursor RNA of conserved structure that are implicated in translational control (Hutvagner et al., Science, 293, 834 (2001)). The RNAi response also features an endonuclease complex containing a siRNA, commonly referred to as an RNA-induced silencing complex (RISC), which mediates cleavage of single stranded RNA having sequence homologous to the siRNA. Cleavage of the target RNA takes place in the middle of the region complementary to the guide sequence of the siRNA duplex (Elbashir et al., Genes Dev., 15, 188 (2001)).

[0257] This invention provides an expression system comprising an isolated nucleic acid molecule comprising a sequence capable of specifically hybridizing to the CA sequences. In an embodiment, the nucleic acid molecule is capable of inhibiting the expression of the CA protein. A method of inhibiting expression of CA inside a cell by a vector-directed expression of a short RNA which short RNA can fold in itself and create a double strand RNA having CA mRNA sequence identity and able to trigger posttranscriptional gene silencing, or RNA interference (RNAi), of the CA gene inside the cell. In another method a short double strand RNA having CA mRNA sequence identity is delivered inside the cell to trigger posttranscriptional gene silencing, or RNAi, of the CA gene. In various embodiments, the nucleic acid molecule is at least a 7 mer, at least a 10 mer, or at least a 20 mer. In a further embodiment, the sequence is unique.

### (c) Pharmaceutical Compositions

[0258] Pharmaceutical compositions encompassed by the present invention include as active agent, the polypeptides, polynucleotides, antisense oligonucleotides, or antibodies of the invention disclosed herein in a therapeutically effective amount. An “effective amount” is an amount sufficient to effect beneficial or desired results, including clinical results. An effective amount can be administered in one or more administrations. For purposes of this invention, an effective amount of an adenoviral vector is an amount that is sufficient to palliate, ameliorate, stabilize, reverse, slow or delay the progression of the disease state.

[0259] The compositions can be used to treat cancer as well as metastases of primary cancer. In addition, the pharmaceutical compositions can be used in conjunction with conventional methods of cancer treatment, e.g., to sensitize tumors to radiation or conventional chemotherapy. The terms “treatment”, “treating”, “treat” and the like are used herein to generally refer to obtaining a desired pharmacologic and/or physiologic effect. The effect may be prophylactic in terms of completely or partially preventing a disease or symptom thereof and/or may be therapeutic in terms of a partial or complete stabilization or cure for a disease and/or adverse effect attributable to the disease. “Treatment” as used herein covers any treatment of a disease in a mammal, particularly a human, and includes: (a) preventing the disease or symptom from occurring in a subject which may be predisposed to the disease or symptom but has not yet been diagnosed as having it; (b) inhibiting the disease symptom, i.e., arresting its development; or (c) relieving the disease symptom, i.e., causing regression of the disease or symptom.

[0260] Where the pharmaceutical composition comprises an antibody that specifically binds to a gene product encoded by a differentially expressed polynucleotide, the antibody can be coupled to a drug for delivery to a treatment site or coupled to a detectable label to facilitate imaging of a site comprising cancer cells, such as prostate cancer cells. Methods for coupling antibodies to drugs and detectable labels are well known in the art, as are methods for imaging using detectable labels.

[0261] A “patient” for the purposes of the present invention includes both humans and other animals, particularly mammals, and organisms. Thus the methods are applicable to both human therapy and veterinary applications. In the preferred embodiment the patient is a mammal, and in the most preferred embodiment the patient is human.

[0262] The term “therapeutically effective amount” as used herein refers to an amount of a therapeutic agent to treat, ameliorate, or prevent a desired disease or condition, or to exhibit a detectable therapeutic or preventative effect. The effect can be detected by, for example, chemical markers or antigen levels. Therapeutic effects also include reduction in physical symptoms, such as decreased body temperature. The precise effective amount for a subject will depend upon the subject's size and health, the nature and extent of the condition, and the therapeutics or combination of therapeutics selected for administration. The effective amount for a given situation is determined by routine experimentation and is within the judgment of the clinician. For purposes of the present invention, an effective dose will generally be from about 0.01 mg/kg to about 5 mg/kg, or about 0.01 mg/kg to about 50 mg/kg or about 0.05 mg/kg to about 10 mg/kg of the compositions of the present invention in the individual to which it is administered.

[0263] A pharmaceutical composition can also contain a pharmaceutically acceptable carrier. The term “pharmaceutically acceptable carrier” refers to a carrier for administration of a therapeutic agent, such as antibodies or a polypeptide, genes, and other therapeutic agents. The term refers to any pharmaceutical carrier that does not itself induce the production of antibodies harmful to the individual receiving the composition, and which can be administered without undue toxicity. Suitable carriers can be large, slowly metabolized macromolecules such as proteins, polysaccharides, polylactic acids, polyglycolic acids, polymeric amino acids, amino acid copolymers, and inactive virus particles. Such carriers are well known to those of ordinary skill in the art. Pharmaceutically acceptable carriers in therapeutic compositions can include liquids such as water, saline, glycerol and ethanol. Auxiliary substances, such as wetting or emulsifying agents, pH buffering substances, and the like, can also be present in such vehicles. Typically, the therapeutic compositions are prepared as injectables, either as liquid solutions or suspensions; solid forms suitable for solution in, or suspension in, liquid vehicles prior to injection can also be prepared. Liposomes are included within the definition of a pharmaceutically acceptable carrier. Pharmaceutically acceptable salts can also be present in the pharmaceutical composition, e.g., mineral acid salts such as hydrochlorides, hydrobromides, phosphates, sulfates, and the like; and the salts of organic acids such as acetates, propionates, malonates, benzoates, and the like. A thorough discussion of pharmaceutically acceptable excipients is available in Remington: The Science and Practice of Pharmacy (1995) Alfonso Gennaro, Lippincott, Williams, & Wilkins.

[0264] The pharmaceutical compositions can be prepared in various forms, such as granules, tablets, pills, suppositories, capsules, suspensions, salves, lotions and the like. Pharmaceutical grade organic or inorganic carriers and/or diluents suitable for oral and topical use can be used to make up compositions containing the therapeutically-active compounds. Diluents known to the art include aqueous media, vegetable and animal oils and fats. Stabilizing agents, wetting and emulsifying agents, salts for varying the osmotic pressure or buffers for securing an adequate pH value, and skin penetration enhancers can be used as auxiliary agents.

[0265] The pharmaceutical compositions of the present invention comprise a CA protein in a form suitable for administration to a patient. In the preferred embodiment, the pharmaceutical compositions are in a water soluble form, such as being present as pharmaceutically acceptable salts, which is meant to include both acid and base addition salts. “Pharmaceutically acceptable acid addition salt” refers to those salts that retain the biological effectiveness of the free bases and that are not biologically or otherwise undesirable, formed with inorganic acids such as hydrochloric acid, hydrobromic acid, sulfuric acid, nitric acid, phosphoric acid and the like, and organic acids such as acetic acid, propionic acid, glycolic acid, pyruvic acid, oxalic acid, maleic acid, malonic acid, succinic acid, fumaric acid, tartaric acid, citric acid, benzoic acid, cinnamic acid, mandelic acid, methanesulfonic acid, ethanesulfonic acid, p-toluenesulfonic acid, salicylic acid and the like. “Pharmaceutically acceptable base addition salts” include those derived from inorganic bases such as sodium, potassium, lithium, ammonium, calcium, magnesium, iron, zinc, copper, manganese, aluminum salts and the like. Particularly preferred are the ammonium, potassium, sodium, calcium, and magnesium salts. Salts derived from pharmaceutically acceptable organic non-toxic bases include salts of primary, secondary, and tertiary amines, substituted amines including naturally occurring substituted amines, cyclic amines and basic ion exchange resins, such as isopropylamine, trimethylamine, diethylamine, triethylamine, tripropylamine, and ethanolamine.

[0266] The pharmaceutical compositions may also include one or more of the following: carrier proteins such as serum albumin; buffers; fillers such as microcrystalline cellulose, lactose, corn and other starches; binding agents; sweeteners and other flavoring agents; coloring agents; and polyethylene glycol. Additives are well known in the art, and are used in a variety of formulations.

[0267] The compounds having the desired pharmacological activity may be administered in a physiologically acceptable carrier to a host, as previously described. The agents may be administered in a variety of ways, orally, parenterally e.g., subcutaneously, intraperitoneally, intravascularly, etc. Depending upon the manner of introduction, the compounds may be formulated in a variety of ways. The concentration of therapeutically active compound in the formulation may vary from about 0.1-100% wgt/vol. Once formulated, the compositions contemplated by the invention can be (1) administered directly to the subject (e.g., as polynucleotide, polypeptides, small molecule agonists or antagonists, and the like); or (2) delivered ex vivo, to cells derived from the subject (e.g., as in ex vivo gene therapy). Direct delivery of the compositions will generally be accomplished by parenteral injection, e.g., subcutaneously, intraperitoneally, intravenously or intramuscularly, intratumoral or to the interstitial space of a tissue. Other modes of administration include oral and pulmonary administration, suppositories, and transdermal applications, needles, and gene guns or hyposprays. Dosage treatment can be a single dose schedule or a multiple dose schedule.

[0268] Methods for the ex vivo delivery and reimplantation of transformed cells into a subject are known in the art and described in e.g., International Publication No. WO 93/14778. Examples of cells useful in ex vivo applications include, for example, stem cells, particularly hematopoetic, lymph cells, macrophages, dendritic cells, or tumor cells. Generally, delivery of nucleic acids for both ex vivo and in vitro applications can be accomplished by, for example, dextran-mediated transfection, calcium phosphate precipitation, polybrene mediated transfection, protoplast fusion, electroporation, encapsulation of the polynucleotide(s) in liposomes, and direct microinjection of the DNA into nuclei, all well known in the art.

[0269] Once differential expression of a gene corresponding to a CA polynucleotide described herein has been found to correlate with a proliferative disorder, such as neoplasia, dysplasia, and hyperplasia, the disorder can be amenable to treatment by administration of a therapeutic agent based on the provided polynucleotide, corresponding polypeptide or other corresponding molecule (e.g., antisense, ribozyme, etc.). In other embodiments, the disorder can be amenable to treatment by administration of a small molecule drug that, for example, serves as an inhibitor (antagonist) of the function of the encoded gene product of a gene having increased expression in cancerous cells relative to normal cells or as an agonist for gene products that are decreased in expression in cancerous cells (e.g., to promote the activity of gene products that act as tumor suppressors).

[0270] The dose and the means of administration of the inventive pharmaceutical compositions are determined based on the specific qualities of the therapeutic composition, the condition, age, and weight of the patient, the progression of the disease, and other relevant factors. For example, administration of polynucleotide therapeutic compositions agents includes local or systemic administration, including injection, oral administration, particle gun or catheterized administration, and topical administration. Preferably, the therapeutic polynucleotide composition contains an expression construct comprising a promoter operably linked to a polynucleotide of at least 12, 22, 25, 30, or 35 contiguous nt of the polynucleotide disclosed herein. Various methods can be used to administer the therapeutic composition directly to a specific site in the body. For example, a small metastatic lesion is located and the therapeutic composition injected several times in several different locations within the body of tumor. Alternatively, arteries that serve a tumor are identified, and the therapeutic composition injected into such an artery, in order to deliver the composition directly into the tumor. A tumor that has a necrotic center is aspirated and the composition injected directly into the now empty center of the tumor. An antisense composition is directly administered to the surface of the tumor, for example, by topical application of the composition. X-ray imaging is used to assist in certain of the above delivery methods.

[0271] Targeted delivery of therapeutic compositions containing an antisense polynucleotide, subgenomic polynucleotides, or antibodies to specific tissues can also be used. Receptor-mediated DNA delivery techniques are described in, for example, Findeis et al., Trends Biotechnol. (1993) 11:202; Chiou et al., Gene Therapeutics: Methods And Applications Of Direct Gene Transfer (J. A. Wolff, ed.) (1994); Wu et al., J. Biol. Chem. (1988) 263:621; Wu et al., J. Biol. Chem. (1994) 269:542; Zenke et al., Proc. Natl. Acad. Sci. (USA) (1990) 87:3655; Wu et al., J. Biol. Chem. (1991) 266:338. Therapeutic compositions containing a polynucleotide are administered in a range of about 100 ng to about 200 mg of DNA for local administration in a gene therapy protocol. Concentration ranges of about 500 ng to about 50 mg, about 1 μg to about 2 mg, about 5 μg to about 500 μg, and about 20 μg to about 100 μg of DNA can also be used during a gene therapy protocol. Factors such as method of action (e.g., for enhancing or inhibiting levels of the encoded gene product) and efficacy of transformation and expression are considerations that will affect the dosage required for ultimate efficacy of the antisense subgenomic polynucleotides. Where greater expression is desired over a larger area of tissue, larger amounts of antisense subgenomic polynucleotides or the same amounts re-administered in a successive protocol of administrations, or several administrations to different adjacent or close tissue portions of, for example, a tumor site, may be required to effect a positive therapeutic outcome. In all cases, routine experimentation in clinical trials will determine specific ranges for optimal therapeutic effect.

[0272] The therapeutic polynucleotides and polypeptides of the present invention can be delivered using gene delivery vehicles. The gene delivery vehicle can be of viral or non-viral origin (see generally, Jolly, Cancer Gene Therapy (1994) 1:51; Kimura, Human Gene Therapy (1994) 5:845; Connelly, Human Gene Therapy (1995) 1:185; and Kaplitt, Nature Genetics (1994) 6:148). Expression of such coding sequences can be induced using endogenous mammalian or heterologous promoters. Expression of the coding sequence can be either constitutive or regulated.

[0273] Viral-based vectors for delivery of a desired polynucleotide and expression in a desired cell are well known in the art. Exemplary viral-based vehicles include, but are not limited to, recombinant retroviruses (see, e.g., WO 90/07936; WO 94/03622; WO 93/25698; WO 93/25234; U.S. Pat. No. 5,219,740; WO 93/11230; WO 93/10218; U.S. Pat. No. 4,777,127; GB Patent No. 2,200,651; EP 0 345 242; and WO 91/02805), alphavirus-based vectors (e.g., Sindbis virus vectors, Semliki forest virus (ATCC VR-67; ATCC VR-1247), Ross River virus (ATCC VR-373; ATCC VR-1246) and Venezuelan equine encephalitis virus (ATCC VR-923; ATCC VR-1250; ATCC VR 1249; ATCC VR-532)), and adeno-associated virus (AAV) vectors (see, e.g., WO 94/12649, WO 93/03769; WO 93/19191; WO 94/28938; WO 95/11984 and WO 95/00655). Administration of DNA linked to killed adenovirus as described in Curiel, Hum. Gene Ther. (1992) 3:147 can also be employed.

[0274] Non-viral delivery vehicles and methods can also be employed, including, but not limited to, polycationic condensed DNA linked or unlinked to killed adenovirus alone (see, e.g., Curiel, Hum. Gene Ther. (1992) 3:147); ligand-linked DNA (see, e.g., Wu, J. Biol. Chem. (1989) 264:16985); eukaryotic cell delivery vehicles cells (see, e.g., U.S. Pat. No. 5,814,482; WO 95/07994; WO 96/17072; WO 95/30763; and WO 97/42338) and nucleic charge neutralization or fusion with cell membranes. Naked DNA can also be employed. Exemplary naked DNA introduction methods are described in WO 90/11092 and U.S. Pat. No. 5,580,859. Liposomes that can act as gene delivery vehicles are described in U.S. Pat. No. 5,422,120; WO 95/13796; WO 94/23697; WO 91/14445; and EP 0524968. Additional approaches are described in Philip, Mol. Cell Biol. (1994) 14:2411, and in Woffendin, Proc. Natl. Acad. Sci. (1994) 91:1581.

[0275] Further non-viral delivery suitable for use includes mechanical delivery systems such as the approach described in Woffendin et al., Proc. Natl. Acad. Sci. USA (1994) 91(24):11581. Moreover, the coding sequence and the product of expression of such can be delivered through deposition of photopolymerized hydrogel materials or use of ionizing radiation (see, e.g., U.S. Pat. No. 5,206,152 and WO 92/11033). Other conventional methods for gene delivery that can be used for delivery of the coding sequence include, for example, use of hand-held gene transfer particle gun (see, e.g., U.S. Pat. No. 5,149,655); use of ionizing radiation for activating transferred gene (see, e.g., U.S. Pat. No. 5,206,152 and WO 92/11033).

[0276] The administration of the CA proteins and modulators of the present invention can be done in a variety of ways as discussed above, including, but not limited to, orally, subcutaneously, intravenously, intranasally, transdennally, intraperitoneally, intramuscularly, intrapulmonary, vaginally, rectally, or intraocularly. In some instances, for example, in the treatment of wounds and inflammation, the CA proteins and modulators may be directly applied as a solution or spray.

[0277] In a preferred embodiment, CA proteins and modulators are administered as therapeutic agents, and can be formulated as outlined above. Similarly, CA genes (including both the full-length sequence, partial sequences, or regulatory sequences of the CA coding regions) can be administered in gene therapy applications, as is known in the art. These CA genes can include antisense applications, either as gene therapy (i.e. for incorporation into the genome) or as antisense compositions, as will be appreciated by those in the art.

[0278] Thus, in one embodiment, methods of modulating CA gene activity in cells or organisms are provided. In one embodiment, the methods comprise administering to a cell an anti-CA antibody that reduces or eliminates the biological activity of an endogenous CA protein. Alternatively, the methods comprise administering to a cell or organism a recombinant nucleic acid encoding a CA protein. As will be appreciated by those in the art, this may be accomplished in any number of ways. In a preferred embodiment, for example when the CA sequence is down-regulated in cancer, the activity of the CA gene product is increased by increasing the amount of CA expression in the cell, for example by overexpressing the endogenous CA gene or by administering a gene encoding the CA sequence, using known gene-therapy techniques. In a preferred embodiment, the gene therapy techniques include the incorporation of the exogenous gene using enhanced homologous recombination (EHR), for example as described in PCT/US93/03868, hereby incorporated by reference in its entirety. Alternatively, for example when the CA sequence is up-regulated in cancer, the activity of the endogenous CA gene is decreased, for example by the administration of a CA antisense nucleic acid.

### (d) Vaccines

[0279] In a preferred embodiment, CA genes are administered as DNA vaccines, either single genes or combinations of CA genes. Naked DNA vaccines are generally known in the art. Brower, Nature Biotechnology, 16:1304-1305 (1998).

[0280] In one embodiment, CA genes of the present invention are used as DNA vaccines. Methods for the use of genes as DNA vaccines are well known to one of ordinary skill in the art, and include placing a CA gene or portion of a CA gene under the control of a promoter for expression in a patient with cancer. The CA gene used for DNA vaccines can encode full-length CA proteins, but more preferably encodes portions of the CA proteins including peptides derived from the CA protein. In a preferred embodiment a patient is immunized with a DNA vaccine comprising a plurality of nucleotide sequences derived from a CA gene. Similarly, it is possible to immunize a patient with a plurality of CA genes or portions thereof. Without being bound by theory, expression of the polypeptide encoded by the DNA vaccine, cytotoxic T-cells, helper T-cells and antibodies are induced that recognize and destroy or eliminate cells expressing CA proteins.

[0281] In a preferred embodiment, the DNA vaccines include a gene encoding an adjuvant molecule with the DNA vaccine. Such adjuvant molecules include cytokines that increase the immunogenic response to the CA polypeptide encoded by the DNA vaccine. Additional or alternative adjuvants are known to those of ordinary skill in the art and find use in the invention.

### (e) Antibodies

[0282] In one embodiment, a cancer inhibitor is an antibody as discussed above. In one embodiment, the CA proteins of the present invention may be used to generate polyclonal and monoclonal antibodies to CA proteins, which are useful as described herein. Similarly, the CA proteins can be coupled, using standard technology, to affinity chromatography columns. These columns may then be used to purify CA antibodies. In a preferred embodiment, the antibodies are generated to epitopes unique to a CA protein; that is, the antibodies show little or no cross-reactivity to other proteins. These antibodies find use in a number of applications. For example, the CA antibodies may be coupled to standard affinity chromatography columns and used to purify CA proteins. The antibodies may also be used therapeutically as blocking polypeptides, as outlined above, since they will specifically bind to the CA protein.

[0283] The present invention further provides methods for detecting the presence of and/or measuring a level of a polypeptide in a biological sample, which CA polypeptide is encoded by a CA polynucleotide that is differentially expressed in a cancer cell, using an antibody specific for the encoded polypeptide. The methods generally comprise: a) contacting the sample with an antibody specific for a polypeptide encoded by a CA polynucleotide that is differentially expressed in a prostate cancer cell; and b) detecting binding between the antibody and molecules of the sample.

[0284] Detection of specific binding of the antibody specific for the encoded cancer-associated polypeptide, when compared to a suitable control is an indication that encoded polypeptide is present in the sample. Suitable controls include a sample known not to contain the encoded CA polypeptide or known not to contain elevated levels of the polypeptide; such as normal tissue, and a sample contacted with an antibody not specific for the encoded polypeptide, e.g., an anti-idiotype antibody. A variety of methods to detect specific antibody-antigen interactions are known in the art and can be used in the method, including, but not limited to, standard immunohistological methods, immunoprecipitation, an enzyme immunoassay, and a radioimmunoassay. In general, the specific antibody will be detectably labeled, either directly or indirectly. Direct labels include radioisotopes; enzymes whose products are detectable (e.g., luciferase, β-galactosidase, and the like); fluorescent labels (e.g., fluorescein isothiocyanate, rhodamine, phycoerythrin, and the like); fluorescence emitting metals, e.g., ¹⁵²Eu, or others of the lanthanide series, attached to the antibody through metal chelating groups such as EDTA; chemiluminescent compounds, e.g., luminol, isoluminol, acridinium salts, and the like; bioluminescent compounds, e.g., luciferin, aequorin (green fluorescent protein), and the like. The antibody may be attached (coupled) to an insoluble support, such as a polystyrene plate or a bead. Indirect labels include second antibodies specific for antibodies specific for the encoded polypeptide (“first specific antibody”), wherein the second antibody is labeled as described above; and members of specific binding pairs, e.g., biotin-avidin, and the like. The biological sample may be brought into contact with and immobilized on a solid support or carrier, such as nitrocellulose, that is capable of immobilizing cells, cell particles, or soluble proteins. The support may then be washed with suitable buffers, followed by contacting with a detectably-labeled first specific antibody. Detection methods are known in the art and will be chosen as appropriate to the signal emitted by the detectable label. Detection is generally accomplished in comparison to suitable controls, and to appropriate standards.

[0285] In some embodiments, the methods are adapted for use in vivo, e.g., to locate or identify sites where cancer cells are present. In these embodiments, a detectably-labeled moiety, e.g., an antibody, which is specific for a cancer-associated polypeptide is administered to an individual (e.g., by injection), and labeled cells are located using standard imaging techniques, including, but not limited to, magnetic resonance imaging, computed tomography scanning, and the like. In this manner, cancer cells are differentially labeled.

### (f) Detection and Diagnosis of Cancers

[0286] Without being bound by theory, it appears that the various CA sequences are important in cancers. Accordingly, disorders based on mutant or variant CA genes may be determined. In one embodiment, the invention provides methods for identifying cells containing variant CA genes comprising determining all or part of the sequence of at least one endogenous CA genes in a cell. As will be appreciated by those in the art, this may be done using any number of sequencing techniques. In a preferred embodiment, the invention provides methods of identifying the CA genotype of an individual comprising determining all or part of the sequence of at least one CA gene of the individual. This is generally done in at least one tissue of the individual, and may include the evaluation of a number of tissues or different samples of the same tissue. The method may include comparing the sequence of the sequenced CA gene to a known CA gene, i.e., a wild-type gene. As will be appreciated by those in the art, alterations in the sequence of some CA genes can be an indication of either the presence of the disease, or propensity to develop the disease, or prognosis evaluations.

[0287] The sequence of all or part of the CA gene can then be compared to the sequence of a known CA gene to determine if any differences exist. This can be done using any number of known homology programs, such as Bestfit, etc. In a preferred embodiment, the presence of a difference in the sequence between the CA gene of the patient and the known CA gene is indicative of a disease state or a propensity for a disease state, as outlined herein.

[0288] In a preferred embodiment, the CA genes are used as probes to determine the number of copies of the CA gene in the genome. For example, some cancers exhibit chromosomal deletions or insertions, resulting in an alteration in the copy number of a gene.

[0289] In another preferred embodiment CA genes are used as probes to determine the chromosomal location of the CA genes. Information such as chromosomal location finds use in providing a diagnosis or prognosis in particular when chromosomal abnormalities such as translocations, and the like are identified in CA gene loci.

[0290] The present invention provides methods of using the polynucleotides described herein for detecting cancer cells, facilitating diagnosis of cancer and the severity of a cancer (e.g., tumor grade, tumor burden, and the like) in a subject, facilitating a determination of the prognosis of a subject, and assessing the responsiveness of the subject to therapy (e.g., by providing a measure of therapeutic effect through, for example, assessing tumor burden during or following a chemotherapeutic regimen). Detection can be based on detection of a polynucleotide that is differentially expressed in a cancer cell, and/or detection of a polypeptide encoded by a polynucleotide that is differentially expressed in a cancer cell. The detection methods of the invention can be conducted in vitro or in vivo, on isolated cells, or in whole tissues or a bodily fluid e.g., blood, plasma, serum, urine, and the like).

[0291] In some embodiments, methods are provided for detecting a cancer cell by detecting expression in the cell of a transcript that is differentially expressed in a cancer cell. Any of a variety of known methods can be used for detection, including, but not limited to, detection of a transcript by hybridization with a polynucleotide that hybridizes to a polynucleotide that is differentially expressed in a prostate cancer cell; detection of a transcript by a polymerase chain reaction using specific oligonucleotide primers; in situ hybridization of a cell using as a probe a polynucleotide that hybridizes to a gene that is differentially expressed in a prostate cancer cell. The methods can be used to detect and/or measure mRNA levels of a gene that is differentially expressed in a cancer cell. In some embodiments, the methods comprise: a) contacting a sample with a polynucleotide that corresponds to a differentially expressed gene described herein under conditions that allow hybridization; and b) detecting hybridization, if any.

[0292] Detection of differential hybridization, when compared to a suitable control, is an indication of the presence in the sample of a polynucleotide that is differentially expressed in a cancer cell. Appropriate controls include, for example, a sample that is known not to contain a polynucleotide that is differentially expressed in a cancer cell, and use of a labeled polynucleotide of the same “sense” as the polynucleotide that is differentially expressed in the cancer cell. Conditions that allow hybridization are known in the art, and have been described in more detail above. Detection can also be accomplished by any known method, including, but not limited to, in situ hybridization, PCR (polymerase chain reaction), RT-PCR (reverse transcription-PCR), TMA, bDNA, and Nasbau and “Northern” or RNA blotting, or combinations of such techniques, using a suitably labeled polynucleotide. A variety of labels and labeling methods for polynucleotides are known in the art and can be used in the assay methods of the invention. Specificity of hybridization can be determined by comparison to appropriate controls.

[0293] Polynucleotides generally comprising at least 10 nt, at least 12 nt or at least 15 contiguous nucleotides of a polynucleotide provided herein, such as, for example, those having the sequence as depicted in Tables 1-152, are used for a variety of purposes, such as probes for detection of and/or measurement of, transcription levels of a polynucleotide that is differentially expressed in a prostate cancer cell. As will be readily appreciated by the ordinarily skilled artisan, the probe can be detectably labeled and contacted with, for example, an array comprising immobilized polynucleotides obtained from a test sample (e.g., RNA). Alternatively, the probe can be immobilized on an array and the test sample detectably labeled. These and other variations of the methods of the invention are well within the skill in the art and are within the scope of the invention.

[0294] Nucleotide probes are used to detect expression of a gene corresponding to the provided polynucleotide. In Northern blots, mRNA is separated electrophoretically and contacted with a probe. A probe is detected as hybridizing to an mRNA species of a particular size. The amount of hybridization can be quantitated to determine relative amounts of expression, for example under a particular condition. Probes are used for in situ hybridization to cells to detect expression. Probes can also be used in vivo for diagnostic detection of hybridizing sequences. Probes are typically labeled with a radioactive isotope. Other types of detectable labels can be used such as chromophores, fluorophores, and enzymes. Other examples of nucleotide hybridization assays are described in WO92/02526 and U.S. Pat. No. 5,124,246.

[0295] PCR is another means for detecting small amounts of target nucleic acids (see, e.g., Mullis et al., Meth. Enzymol. (1987) 155:335; U.S. Pat. No. 4,683,195; and U.S. Pat. No. 4,683,202). Two primer oligonucleotides that hybridize with the target nucleic acids are used to prime the reaction. The primers can be composed of sequence within or 3′ and 5′ to the CA polynucleotides disclosed herein. Alternatively, if the primers are 3′ and 5′ to these polynucleotides, they need not hybridize to them or the complements. After amplification of the target with a thermostable polymerase, the amplified target nucleic acids can be detected by methods known in the art, e.g., Southern blot. mRNA or cDNA can also be detected by traditional blotting techniques (e.g., Southern blot, Northern blot, etc.) described in Sambrook et al., “Molecular Cloning: A Laboratory Manual” (New York, Cold Spring Harbor Laboratory, 1989) (e.g., without PCR amplification). In general, mRNA or cDNA generated from mRNA using a polymerase enzyme can be purified and separated using gel electrophoresis, and transferred to a solid support, such as nitrocellulose. The solid support is exposed to a labeled probe, washed to remove any unhybridized probe, and duplexes containing the labeled probe are detected.

[0296] Methods using PCR amplification can be performed on the DNA from a single cell, although it is convenient to use at least about 10⁵ cells. The use of the polymerase chain reaction is described in Saiki et al. (1985) Science 239:487, and a review of current techniques may be found in Sambrook, et al. Molecular Cloning: A Laboratory Manual, CSH Press 1989, pp. 14.2-14.33. A detectable label may be included in the amplification reaction. Suitable detectable labels include fluorochromes, (e.g. fluorescein isothiocyanate (FITC), rhodamine, Texas Red, phycoerythrin, allophycocyanin, 6-carboxyfluorescein (6-FAM), 2′,7′-dimethoxy-4′,5′-dichloro-6-carboxyfluorescein, 6-carboxy-X-rhodamine (ROX), 6-carboxy-2′,4′,7′,4,7-hexachlorofluorescein (HEX), 5-carboxyfluorescein (5-FAM) or N,N,N′,N′-tetramethyl-6-carboxyrhodamine (TAMRA)), radioactive labels, (e.g. ³²P, ³⁵S, ³H, etc.), and the like. The label may be a two stage system, where the polynucleotides is conjugated to biotin, haptens, etc. having a high affinity binding partner, e.g. avidin, specific antibodies, etc., where the binding partner is conjugated to a detectable label. The label may be conjugated to one or both of the primers. Alternatively, the pool of nucleotides used in the amplification is labeled, so as to incorporate the label into the amplification product.

[0297] The detection methods can be provided as part of a kit. Thus, the invention further provides kits for detecting the presence and/or a level of a polynucleotide that is differentially expressed in a cancer cell (e.g., by detection of an mRNA encoded by the differentially expressed gene of interest), and/or a polypeptide encoded thereby, in a biological sample. Procedures using these kits can be performed by clinical laboratories, experimental laboratories, medical practitioners, or private individuals. The kits of the invention for detecting a polypeptide encoded by a polynucleotide that is differentially expressed in a cancer cell may comprise a moiety that specifically binds the polypeptide, which may be an antibody that binds the polypeptide or fragment thereof. The kits of the invention used for detecting a polynucleotide that is differentially expressed in a prostate cancer cell may comprise a moiety that specifically hybridizes to such a polynucleotide. The kit may optionally provide additional components that are useful in the procedure, including, but not limited to, buffers, developing reagents, labels, reacting surfaces, means for detection, control samples, standards, instructions, and interpretive information. Accordingly, the present invention provides kits for detecting prostate cancer comprising at least one of polynucleotides having the sequence as shown in Tables 1-152 or fragments thereof.

[0298] The present invention further relates to methods of detecting/diagnosing a neoplastic or preneoplastic condition in a mammal (for example, a human). “Diagnosis” as used herein generally includes determination of a subject's susceptibility to a disease or disorder, determination as to whether a subject is presently affected by a disease or disorder, prognosis of a subject affected by a disease or disorder (e.g. identification of pre-metastatic or metastatic cancerous states, stages of cancer, or responsiveness of cancer to therapy), and therametrics (e.g., monitoring a subject's condition to provide information as to the effect or efficacy of therapy).

[0299] The terms “treatment”, “treating”, “treat” and the like are used herein to generally refer to obtaining a desired pharmacologic and/or physiologic effect. The effect may be prophylactic in terms of completely or partially preventing a disease or symptom thereof and/or may be therapeutic in terms of a partial or complete stabilization or cure for a disease and/or adverse effect attributable to the disease. “Treatment” as used herein covers any treatment of a disease in a mammal, particularly a human, and includes: (a) preventing the disease or symptom from occurring in a subject which may be predisposed to the disease or symptom but has not yet been diagnosed as having it; (b) inhibiting the disease symptom, i.e., arresting its development; or (c) relieving the disease symptom, i.e., causing regression of the disease or symptom.

[0300] An “effective amount” is an amount sufficient to effect beneficial or desired results, including clinical results. An effective amount can be administered in one or more administrations.

[0301] A “cell sample” encompasses a variety of sample types obtained from an individual and can be used in a diagnostic or monitoring assay. The definition encompasses blood and other liquid samples of biological origin, solid tissue samples such as a biopsy specimen or tissue cultures or cells derived therefrom, and the progeny thereof. The definition also includes samples that have been manipulated in any way after their procurement, such as by treatment with reagents, solubilization, or enrichment for certain components, such as proteins or polynucleotides. The term “cell sample” encompasses a clinical sample, and also includes cells in culture, cell supernatants, cell lysates, serum, plasma, biological fluid, and tissue samples.

[0302] As used herein, the terms “neoplastic cells”, “neoplasia”, “tumor”, “tumor cells”, “cancer” and “cancer cells”, (used interchangeably) refer to cells which exhibit relatively autonomous growth, so that they exhibit an aberrant growth phenotype characterized by a significant loss of control of cell proliferation (i.e., de-regulated cell division). Neoplastic cells can be malignant or benign.

[0303] The terms “individual,” “subject,” “host,” and “patient,” are used interchangeably herein and refer to any mammalian subject for whom diagnosis, treatment, or therapy is desired, particularly humans. Other subjects may include cattle, dogs, cats, guinea pigs, rabbits, rats, mice, horses, and so on. Examples of conditions that can be detected/diagnosed in accordance with these methods include cancers. Polynucleotides corresponding to genes that exhibit the appropriate expression pattern can be used to detect cancer in a subject. For a review of markers of cancer, see, e.g., Hanahan et al. Cell 100:57-70 (2000).

[0304] One detection/diagnostic method comprises: (a) obtaining from a mammal (e.g., a human) a biological sample, (b) detecting the presence in the sample of a CA protein and (c) comparing the amount of product present with that in a control sample. In accordance with this method, the presence in the sample of elevated levels of a CA gene product indicates that the subject has a neoplastic or preneoplastic condition.

[0305] Biological samples suitable for use in this method include biological fluids such as serum, plasma, pleural effusions, urine and cerebro-spinal fluid, CSF, tissue samples (e.g., mammary tumor or prostate tissue slices) can also be used in the method of the invention, including samples derived from biopsies. Cell cultures or cell extracts derived, for example, from tissue biopsies can also be used.

[0306] The compound is preferably a binding protein, e.g., an antibody, polyclonal or monoclonal, or antigen binding fragment thereof, which can be labeled with a detectable marker (e.g., fluorophore, chromophore or isotope, etc). Where appropriate, the compound can be attached to a solid support such as a bead, plate, filter, resin, etc. Determination of formation of the complex can be effected by contacting the complex with a further compound (e.g., an antibody) that specifically binds to the first compound (or complex). Like the first compound, the further compound can be attached to a solid support and/or can be labeled with a detectable marker.

[0307] The identification of elevated levels of CA protein in accordance with the present invention makes possible the identification of subjects (patients) that are likely to benefit from adjuvant therapy. For example, a biological sample from a post primary therapy subject (e.g., subject having undergone surgery) can be screened for the presence of circulating CA protein, the presence of elevated levels of the protein, determined by studies of normal populations, being indicative of residual tumor tissue. Similarly, tissue from the cut site of a surgically removed tumor can be examined (e.g., by immunofluorescence), the presence of elevated levels of product (relative to the surrounding tissue) being indicative of incomplete removal of the tumor. The ability to identify such subjects makes it possible to tailor therapy to the needs of the particular subject. Subjects undergoing non-surgical therapy, e.g., chemotherapy or radiation therapy, can also be monitored, the presence in samples from such subjects of elevated levels of CA protein being indicative of the need for continued treatment. Staging of the disease (for example, for purposes of optimizing treatment regimens) can also be effected, for example, by biopsy e.g., with antibody specific for a CA protein.

### (g) Animal Models and Transgenics

[0308] In another preferred embodiment CA genes find use in generating animal models of cancers, particularly lymphomas and carcinomas. As is appreciated by one of ordinary skill in the art, when the CA gene identified is repressed or diminished in CA tissue, gene therapy technology wherein antisense RNA directed to the CA gene will also diminish or repress expression of the gene. An animal generated as such serves as an animal model of CA that finds use in screening bioactive drug candidates. Similarly, gene knockout technology, for example as a result of homologous recombination with an appropriate gene targeting vector, will result in the absence of the CA protein. When desired, tissue-specific expression or knockout of the CA protein may be necessary.

[0309] It is also possible that the CA protein is overexpressed in cancer. As such, transgenic animals can be generated that overexpress the CA protein. Depending on the desired expression level, promoters of various strengths can be employed to express the transgene. Also, the number of copies of the integrated transgene can be determined and compared for a determination of the expression level of the transgene. Animals generated by such methods find use as animal models of CA and are additionally useful in screening for bioactive molecules to treat cancer.

### Characterization of CA Sequences

[0310] The CA nucleic acid sequences of the invention are depicted in Tables 1-152. The sequences in each Table include genomic DNA sequence (mouse genomic sequences mDxx-yyy, human genomic sequences hDxx-yyy), sequence corresponding to the mRNA(s) generated therefrom (mRxx-yyy; hrxx-yyy) and amino acid sequences of the proteins (mPxx-yyy; hpxx-yyy) encoded by the mRNA for both mouse and human genes. N/A indicates a gene that has been identified, but for which there has not been a name ascribed.

[0311] The mouse and human genomic DNA sequence, sequence corresponding to the mRNA(s) generated therefrom and amino acid sequences of the proteins as shown in Tables 1-152 are described according to SEQ ID NOS as follows in Table 155.

TABLE 155

| | | |
|---|---|---|
| mD10-002 | SEQ ID NO: 1 | MOUSE GENOMIC SEQUENCE |
| mR10-002.1 | SEQ ID NO: 2 | MOUSE mRNA SEQUENCE |
| mP10-002.1 | SEQ ID NO: 3 | MOUSE PROTEIN SEQUENCE |
| mR10-002.2 | SEQ ID NO: 4 | MOUSE mRNA SEQUENCE |
| mP10-002.2 | SEQ ID NO: 5 | MOUSE PROTEIN SEQUENCE |
| hD10-002 | SEQ ID NO: 6 | HUMAN GENOMIC SEQUENCE |
| hR10-002.1 | SEQ ID NO: 7 | HUMAN mRNA SEQUENCE |
| hP10-002.1 | SEQ ID NO: 8 | HUMAN PROTEIN SEQUENCE |
| mD7-006 | SEQ ID NO: 9 | MOUSE GENOMIC SEQUENCE |
| mR7-006.1 | SEQ ID NO: 10 | MOUSE mRNA SEQUENCE |
| mP7-006.1 | SEQ ID NO: 11 | MOUSE PROTEIN SEQUENCE |
| hD7-006 | SEQ ID NO: 12 | HUMAN GENOMIC SEQUENCE |
| hR7-006.1 | SEQ ID NO: 13 | HUMAN mRNA SEQUENCE |
| hP7-006.1 | SEQ ID NO: 14 | HUMAN PROTEIN SEQUENCE |
| hR7-006.2 | SEQ ID NO: 15 | HUMAN mRNA SEQUENCE |
| hP7-006.2 | SEQ ID NO: 16 | HUMAN PROTEIN SEQUENCE |
| hR7-006.3 | SEQ ID NO: 17 | HUMAN mRNA SEQUENCE |
| hP7-006.3 | SEQ ID NO: 18 | HUMAN PROTEIN SEQUENCE |
| hR7-006.4 | SEQ ID NO: 19 | HUMAN mRNA SEQUENCE |
| hP7-006.4 | SEQ ID NO: 20 | HUMAN PROTEIN SEQUENCE |
| mD11-007 | SEQ ID NO: 21 | MOUSE GENOMIC SEQUENCE |
| mR11-007.1 | SEQ ID NO: 22 | MOUSE mRNA SEQUENCE |
| mP11-007.1 | SEQ ID NO: 23 | MOUSE PROTEIN SEQUENCE |
| hD11-007 | SEQ ID NO: 24 | HUMAN GENOMIC SEQUENCE |
| hR11-007.1 | SEQ ID NO: 25 | HUMAN mRNA SEQUENCE |
| hP11-007.1 | SEQ ID NO: 26 | HUMAN PROTEIN SEQUENCE |
| hR11-007.2 | SEQ ID NO: 27 | HUMAN mRNA SEQUENCE |
| hP11-007.2 | SEQ ID NO: 28 | HUMAN PROTEIN SEQUENCE |
| hR11-007.3 | SEQ ID NO: 29 | HUMAN mRNA SEQUENCE |
| hP11-007.3 | SEQ ID NO: 30 | HUMAN PROTEIN SEQUENCE |
| hR11-007.4 | SEQ ID NO: 31 | HUMAN mRNA SEQUENCE |
| hP11-007.4 | SEQ ID NO: 32 | HUMAN PROTEIN SEQUENCE |
| hR11-007.5 | SEQ ID NO: 33 | HUMAN mRNA SEQUENCE |
| hP11-007.5 | SEQ ID NO: 34 | HUMAN PROTEIN SEQUENCE |
| mD7-027 | SEQ ID NO: 35 | MOUSE GENOMIC SEQUENCE |
| mR7-027.1 | SEQ ID NO: 36 | MOUSE mRNA SEQUENCE |
| mP7-027.1 | SEQ ID NO: 37 | MOUSE PROTEIN SEQUENCE |
| hD7-027 | SEQ ID NO: 38 | HUMAN GENOMIC SEQUENCE |
| hR7-027.1 | SEQ ID NO: 39 | HUMAN mRNA SEQUENCE |
| hP7-027.1 | SEQ ID NO: 40 | HUMAN PROTEIN SEQUENCE |
| hR7-027.2 | SEQ ID NO: 41 | HUMAN mRNA SEQUENCE |
| hP7-027.2 | SEQ ID NO: 42 | HUMAN PROTEIN SEQUENCE |
| mD7-038 | SEQ ID NO: 43 | MOUSE GENOMIC SEQUENCE |
| mR7-038.1 | SEQ ID NO: 44 | MOUSE mRNA SEQUENCE |
| mP7-038.1 | SEQ ID NO: 45 | MOUSE PROTEIN SEQUENCE |
| hD7-038 | SEQ ID NO: 46 | HUMAN GENOMIC SEQUENCE |
| hR7-038.1 | SEQ ID NO: 47 | HUMAN mRNA SEQUENCE |
| hP7-038.1 | SEQ ID NO: 48 | HUMAN PROTEIN SEQUENCE |
| hR7-038.2 | SEQ ID NO: 49 | HUMAN mRNA SEQUENCE |
| hP7-038.2 | SEQ ID NO: 50 | HUMAN PROTEIN SEQUENCE |
| mD7-063 | SEQ ID NO: 51 | MOUSE GENOMIC SEQUENCE |
| mR7-063.1 | SEQ ID NO: 52 | MOUSE mRNA SEQUENCE |
| mP7-063.1 | SEQ ID NO: 53 | MOUSE PROTEIN SEQUENCE |
| mR7-063.2 | SEQ ID NO: 54 | MOUSE mRNA SEQUENCE |
| mP7-063.2 | SEQ ID NO: 55 | MOUSE PROTEIN SEQUENCE |
| hD7-063 | SEQ ID NO: 56 | HUMAN GENOMIC SEQUENCE |
| hR7-063.1 | SEQ ID NO: 57 | HUMAN mRNA SEQUENCE |
| hP7-063.1 | SEQ ID NO: 58 | HUMAN PROTEIN SEQUENCE |
| hR7-063.2 | SEQ ID NO: 59 | HUMAN mRNA SEQUENCE |
| hP7-063.2 | SEQ ID NO: 60 | HUMAN PROTEIN SEQUENCE |
| mD11-012 | SEQ ID NO: 61 | MOUSE GENOMIC SEQUENCE |
| mR11-012.1 | SEQ ID NO: 62 | MOUSE mRNA SEQUENCE |
| mP11-012.1 | SEQ ID NO: 63 | MOUSE PROTEIN SEQUENCE |
| hD11-012 | SEQ ID NO: 64 | HUMAN GENOMIC SEQUENCE |
| hR11-012.1 | SEQ ID NO: 65 | HUMAN mRNA SEQUENCE |
| hP11-012.1 | SEQ ID NO: 66 | HUMAN PROTEIN SEQUENCE |
| hR11-012.2 | SEQ ID NO: 67 | HUMAN mRNA SEQUENCE |
| hP11-012.2 | SEQ ID NO: 68 | HUMAN PROTEIN SEQUENCE |
| hR11-012.3 | SEQ ID NO: 69 | HUMAN mRNA SEQUENCE |
| hP11-012.3 | SEQ ID NO: 70 | HUMAN PROTEIN SEQUENCE |
| hR11-012.4 | SEQ ID NO: 71 | HUMAN mRNA SEQUENCE |
| hP11-012.4 | SEQ ID NO: 72 | HUMAN PROTEIN SEQUENCE |
| hR11-012.5 | SEQ ID NO: 73 | HUMAN mRNA SEQUENCE |
| hP11-012.5 | SEQ ID NO: 74 | HUMAN PROTEIN SEQUENCE |
| mD7-072 | SEQ ID NO: 75 | MOUSE GENOMIC SEQUENCE |
| mR7-072.1 | SEQ ID NO: 76 | MOUSE mRNA SEQUENCE |
| mP7-072.1 | SEQ ID NO: 77 | MOUSE PROTEIN SEQUENCE |
| hD7-072 | SEQ ID NO: 78 | HUMAN GENOMIC SEQUENCE |
| hR7-072.1 | SEQ ID NO: 79 | HUMAN mRNA SEQUENCE |
| hP7-072.1 | SEQ ID NO: 80 | HUMAN PROTEIN SEQUENCE |
| hR7-072.2 | SEQ ID NO: 81 | HUMAN mRNA SEQUENCE |
| hP7-072.2 | SEQ ID NO: 82 | HUMAN PROTEIN SEQUENCE |
| hR7-072.3 | SEQ ID NO: 83 | HUMAN mRNA SEQUENCE |
| hP7-072.3 | SEQ ID NO: 84 | HUMAN PROTEIN SEQUENCE |
| hR7-072.4 | SEQ ID NO: 85 | HUMAN mRNA SEQUENCE |
| hP7-072.4 | SEQ ID NO: 86 | HUMAN PROTEIN SEQUENCE |
| mD7-083 | SEQ ID NO: 87 | MOUSE GENOMIC SEQUENCE |
| mR7-083.1 | SEQ ID NO: 88 | MOUSE mRNA SEQUENCE |
| mP7-083.1 | SEQ ID NO: 89 | MOUSE PROTEIN SEQUENCE |
| hD7-083 | SEQ ID NO: 90 | HUMAN GENOMIC SEQUENCE |
| hR7-083.1 | SEQ ID NO: 91 | HUMAN mRNA SEQUENCE |
| hP7-083.1 | SEQ ID NO: 92 | HUMAN PROTEIN SEQUENCE |
| mD10-004 | SEQ ID NO: 93 | MOUSE GENOMIC SEQUENCE |
| mR10-004.1 | SEQ ID NO: 94 | MOUSE mRNA SEQUENCE |
| mP10-004.1 | SEQ ID NO: 95 | MOUSE PROTEIN SEQUENCE |
| mD10-004 | SEQ ID NO: 96 | MOUSE GENOMIC SEQUENCE |
| mR10-004.1 | SEQ ID NO: 97 | MOUSE mRNA SEQUENCE |
| mP10-004.1 | SEQ ID NO: 98 | MOUSE PROTEIN SEQUENCE |
| hD10-004 | SEQ ID NO: 99 | HUMAN GENOMIC SEQUENCE |
| hR10-004.1 | SEQ ID NO: 100 | HUMAN mRNA SEQUENCE |
| hP10-004.1 | SEQ ID NO: 101 | HUMAN PROTEIN SEQUENCE |
| hR10-004.2 | SEQ ID NO: 102 | HUMAN mRNA SEQUENCE |
| hP10-004.2 | SEQ ID NO: 103 | HUMAN PROTEIN SEQUENCE |
| hR10-004.3 | SEQ ID NO: 104 | HUMAN mRNA SEQUENCE |
| hP10-004.3 | SEQ ID NO: 105 | HUMAN PROTEIN SEQUENCE |
| hR10-004.4 | SEQ ID NO: 106 | HUMAN mRNA SEQUENCE |
| hP10-004.4 | SEQ ID NO: 107 | HUMAN PROTEIN SEQUENCE |
| mD10-005 | SEQ ID NO: 108 | MOUSE GENOMIC SEQUENCE |
| mR10-005.1 | SEQ ID NO: 109 | MOUSE mRNA SEQUENCE |
| mP10-005.1 | SEQ ID NO: 110 | MOUSE PROTEIN SEQUENCE |
| hD10-005 | SEQ ID NO: 111 | HUMAN GENOMIC SEQUENCE |
| hR10-005.1 | SEQ ID NO: 112 | HUMAN mRNA SEQUENCE |
| hP10-005.1 | SEQ ID NO: 113 | HUMAN PROTEIN SEQUENCE |
| hR10-005.2 | SEQ ID NO: 114 | HUMAN mRNA SEQUENCE |
| hP10-005.2 | SEQ ID NO: 115 | HUMAN PROTEIN SEQUENCE |
| hR10-005.3 | SEQ ID NO: 116 | HUMAN mRNA SEQUENCE |
| hP10-005.3 | SEQ ID NO: 117 | HUMAN PROTEIN SEQUENCE |
| hR10-005.4 | SEQ ID NO: 118 | HUMAN mRNA SEQUENCE |
| hP10-005.4 | SEQ ID NO: 119 | HUMAN PROTEIN SEQUENCE |
| hR10-005.5 | SEQ ID NO: 120 | HUMAN mRNA SEQUENCE |
| hP10-005.5 | SEQ ID NO: 121 | HUMAN PROTEIN SEQUENCE |
| hR10-005.6 | SEQ ID NO: 122 | HUMAN mRNA SEQUENCE |
| hP10-005.6 | SEQ ID NO: 123 | HUMAN PROTEIN SEQUENCE |
| hR10-005.7 | SEQ ID NO: 124 | HUMAN mRNA SEQUENCE |
| hP10-005.7 | SEQ ID NO: 125 | HUMAN PROTEIN SEQUENCE |
| hR10-005.8 | SEQ ID NO: 126 | HUMAN mRNA SEQUENCE |
| hP10-005.8 | SEQ ID NO: 127 | HUMAN PROTEIN SEQUENCE |
| mD7-188 | SEQ ID NO: 128 | MOUSE GENOMIC SEQUENCE |
| mR7-188.1 | SEQ ID NO: 129 | MOUSE mRNA SEQUENCE |
| mP7-188.1 | SEQ ID NO: 130 | MOUSE PROTEIN SEQUENCE |
| hD7-188 | SEQ ID NO: 131 | HUMAN GENOMIC SEQUENCE |
| hR7-188.1 | SEQ ID NO: 132 | HUMAN mRNA SEQUENCE |
| hP7-188.1 | SEQ ID NO: 133 | HUMAN PROTEIN SEQUENCE |
| hR7-188.2 | SEQ ID NO: 134 | HUMAN mRNA SEQUENCE |
| hP7-188.2 | SEQ ID NO: 135 | HUMAN PROTEIN SEQUENCE |
| mD12-014 | SEQ ID NO: 136 | MOUSE GENOMIC SEQUENCE |
| mR12-014.1 | SEQ ID NO: 137 | MOUSE mRNA SEQUENCE |
| mP12-014.1 | SEQ ID NO: 138 | MOUSE PROTEIN SEQUENCE |
| hD12-014 | SEQ ID NO: 139 | HUMAN GENOMIC SEQUENCE |
| hR12-014.1 | SEQ ID NO: 140 | HUMAN mRNA SEQUENCE |
| hP12-014.1 | SEQ ID NO: 141 | HUMAN PROTEIN SEQUENCE |
| hR12-014.2 | SEQ ID NO: 142 | HUMAN mRNA SEQUENCE |
| hP12-014.2 | SEQ ID NO: 143 | HUMAN PROTEIN SEQUENCE |
| mD7-115 | SEQ ID NO: 144 | MOUSE GENOMIC SEQUENCE |
| mR7-115.1 | SEQ ID NO: 145 | MOUSE mRNA SEQUENCE |
| mP7-115.1 | SEQ ID NO: 146 | MOUSE PROTEIN SEQUENCE |
| hD7-115 | SEQ ID NO: 147 | HUMAN GENOMIC SEQUENCE |
| hR7-115.1 | SEQ ID NO: 148 | HUMAN mRNA SEQUENCE |
| hP7-115.1 | SEQ ID NO: 149 | HUMAN PROTEIN SEQUENCE |
| mD7-116 | SEQ ID NO: 150 | MOUSE GENOMIC SEQUENCE |
| mR7-116.1 | SEQ ID NO: 151 | MOUSE mRNA SEQUENCE |
| mP7-116.1 | SEQ ID NO: 152 | MOUSE PROTEIN SEQUENCE |
| mR7-116.2 | SEQ ID NO: 153 | MOUSE mRNA SEQUENCE |
| mP7-116.2 | SEQ ID NO: 154 | MOUSE PROTEIN SEQUENCE |
| hD7-116 | SEQ ID NO: 155 | HUMAN GENOMIC SEQUENCE |
| hR7-116.1 | SEQ ID NO: 156 | HUMAN mRNA SEQUENCE |
| hP7-116.1 | SEQ ID NO: 157 | HUMAN PROTEIN SEQUENCE |
| hR7-116.2 | SEQ ID NO: 158 | HUMAN mRNA SEQUENCE |
| hP7-116.2 | SEQ ID NO: 159 | HUMAN PROTEIN SEQUENCE |
| hR7-116.3 | SEQ ID NO: 160 | HUMAN mRNA SEQUENCE |
| hP7-116.3 | SEQ ID NO: 161 | HUMAN PROTEIN SEQUENCE |
| hR7-116.4 | SEQ ID NO: 162 | HUMAN mRNA SEQUENCE |
| hP7-116.4 | SEQ ID NO: 163 | HUMAN PROTEIN SEQUENCE |
| mD7-142 | SEQ ID NO: 164 | MOUSE GENOMIC SEQUENCE |
| mR7-142.1 | SEQ ID NO: 165 | MOUSE mRNA SEQUENCE |
| mP7-142.1 | SEQ ID NO: 166 | MOUSE PROTEIN SEQUENCE |
| mR7-142.2 | SEQ ID NO: 167 | MOUSE mRNA SEQUENCE |
| mP7-142.2 | SEQ ID NO: 168 | MOUSE PROTEIN SEQUENCE |
| mR7-142.3 | SEQ ID NO: 169 | MOUSE mRNA SEQUENCE |
| mP7-142.3 | SEQ ID NO: 170 | MOUSE PROTEIN SEQUENCE |
| mR7-142.4 | SEQ ID NO: 171 | MOUSE mRNA SEQUENCE |
| mP7-142.4 | SEQ ID NO: 172 | MOUSE PROTEIN SEQUENCE |
| mR7-142.5 | SEQ ID NO: 173 | MOUSE mRNA SEQUENCE |
| mP7-142.5 | SEQ ID NO: 174 | MOUSE PROTEIN SEQUENCE |
| mR7-142.6 | SEQ ID NO: 175 | MOUSE mRNA SEQUENCE |
| mP7-142.6 | SEQ ID NO: 176 | MOUSE PROTEIN SEQUENCE |
| hD7-142 | SEQ ID NO: 177 | HUMAN GENOMIC SEQUENCE |
| hR7-142.1 | SEQ ID NO: 178 | HUMAN mRNA SEQUENCE |
| hP7-142.1 | SEQ ID NO: 179 | HUMAN PROTEIN SEQUENCE |
| hR7-142.2 | SEQ ID NO: 180 | HUMAN mRNA SEQUENCE |
| hP7-142.2 | SEQ ID NO: 181 | HUMAN PROTEIN SEQUENCE |
| hR7-142.3 | SEQ ID NO: 182 | HUMAN mRNA SEQUENCE |
| hP7-142.3 | SEQ ID NO: 183 | HUMAN PROTEIN SEQUENCE |
| mD7-145 | SEQ ID NO: 184 | MOUSE GENOMIC SEQUENCE |
| mR7-145.1 | SEQ ID NO: 185 | MOUSE mRNA SEQUENCE |
| mP7-145.1 | SEQ ID NO: 186 | MOUSE PROTEIN SEQUENCE |
| hD7-145 | SEQ ID NO: 187 | HUMAN GENOMIC SEQUENCE |
| hR7-145.1 | SEQ ID NO: 188 | HUMAN mRNA SEQUENCE |
| hP7-145.1 | SEQ ID NO: 189 | HUMAN PROTEIN SEQUENCE |
| hR7-145.2 | SEQ ID NO: 190 | HUMAN mRNA SEQUENCE |
| hP7-145.2 | SEQ ID NO: 191 | HUMAN PROTEIN SEQUENCE |
| hR7-145.3 | SEQ ID NO: 192 | HUMAN mRNA SEQUENCE |
| hP7-145.3 | SEQ ID NO: 193 | HUMAN PROTEIN SEQUENCE |
| hR7-145.4 | SEQ ID NO: 194 | HUMAN mRNA SEQUENCE |
| hP7-145.4 | SEQ ID NO: 195 | HUMAN PROTEIN SEQUENCE |
| hR7-145.5 | SEQ ID NO: 196 | HUMAN mRNA SEQUENCE |
| hP7-145.5 | SEQ ID NO: 197 | HUMAN PROTEIN SEQUENCE |
| mD16-002 | SEQ ID NO: 198 | MOUSE GENOMIC SEQUENCE |
| mR16-002.1 | SEQ ID NO: 199 | MOUSE mRNA SEQUENCE |
| mP16-002.1 | SEQ ID NO: 200 | MOUSE PROTEIN SEQUENCE |
| hD16-002 | SEQ ID NO: 201 | HUMAN GENOMIC SEQUENCE |
| hR16-002.1 | SEQ ID NO: 202 | HUMAN mRNA SEQUENCE |
| hP16-002.1 | SEQ ID NO: 203 | HUMAN PROTEIN SEQUENCE |
| mD7-158 | SEQ ID NO: 204 | MOUSE GENOMIC SEQUENCE |
| mR7-158.1 | SEQ ID NO: 205 | MOUSE mRNA SEQUENCE |
| mP7-158.1 | SEQ ID NO: 206 | MOUSE PROTEIN SEQUENCE |
| hD7-158 | SEQ ID NO: 207 | HUMAN GENOMIC SEQUENCE |
| hR7-158.1 | SEQ ID NO: 208 | HUMAN mRNA SEQUENCE |
| hP7-158.1 | SEQ ID NO: 209 | HUMAN PROTEIN SEQUENCE |
| hR7-158.2 | SEQ ID NO: 210 | HUMAN mRNA SEQUENCE |
| hP7-158.2 | SEQ ID NO: 211 | HUMAN PROTEIN SEQUENCE |
| hR7-158.3 | SEQ ID NO: 212 | HUMAN mRNA SEQUENCE |
| hP7-158.3 | SEQ ID NO: 213 | HUMAN PROTEIN SEQUENCE |
| mD17-015 | SEQ ID NO: 214 | MOUSE GENOMIC SEQUENCE |
| mR17-015.1 | SEQ ID NO: 215 | MOUSE mRNA SEQUENCE |
| mP17-015.1 | SEQ ID NO: 216 | MOUSE PROTEIN SEQUENCE |
| hD17-015 | SEQ ID NO: 217 | HUMAN GENOMIC SEQUENCE |
| hR17-015.1 | SEQ ID NO: 218 | HUMAN mRNA SEQUENCE |
| hP17-015.1 | SEQ ID NO: 219 | HUMAN PROTEIN SEQUENCE |
| hR17-015.2 | SEQ ID NO: 220 | HUMAN mRNA SEQUENCE |
| hP17-015.2 | SEQ ID NO: 221 | HUMAN PROTEIN SEQUENCE |
| hR17-015.3 | SEQ ID NO: 222 | HUMAN mRNA SEQUENCE |
| hP17-015.3 | SEQ ID NO: 223 | HUMAN PROTEIN SEQUENCE |
| hR17-015.4 | SEQ ID NO: 224 | HUMAN mRNA SEQUENCE |
| hP17-015.4 | SEQ ID NO: 225 | HUMAN PROTEIN SEQUENCE |
| mD19-008 | SEQ ID NO: 226 | MOUSE GENOMIC SEQUENCE |
| mR19-008.1 | SEQ ID NO: 227 | MOUSE mRNA SEQUENCE |
| mP19-008.1 | SEQ ID NO: 228 | MOUSE PROTEIN SEQUENCE |
| mD7-193 | SEQ ID NO: 229 | MOUSE GENOMIC SEQUENCE |
| mR7-193.1 | SEQ ID NO: 230 | MOUSE mRNA SEQUENCE |
| mP7-193.1 | SEQ ID NO: 231 | MOUSE PROTEIN SEQUENCE |
| mR7-193.2 | SEQ ID NO: 232 | MOUSE mRNA SEQUENCE |
| mP7-193.2 | SEQ ID NO: 233 | MOUSE PROTEIN SEQUENCE |
| hD7-193 | SEQ ID NO: 234 | HUMAN GENOMIC SEQUENCE |
| hR7-193.1 | SEQ ID NO: 235 | HUMAN mRNA SEQUENCE |
| hP7-193.1 | SEQ ID NO: 236 | HUMAN PROTEIN SEQUENCE |
| hR7-193.2 | SEQ ID NO: 237 | HUMAN mRNA SEQUENCE |
| hP7-193.2 | SEQ ID NO: 238 | HUMAN PROTEIN SEQUENCE |
| hR7-193.3 | SEQ ID NO: 239 | HUMAN mRNA SEQUENCE |
| hP7-193.3 | SEQ ID NO: 240 | HUMAN PROTEIN SEQUENCE |
| hR7-193.4 | SEQ ID NO: 241 | HUMAN mRNA SEQUENCE |
| hP7-193.4 | SEQ ID NO: 242 | HUMAN PROTEIN SEQUENCE |
| hR7-193.5 | SEQ ID NO: 243 | HUMAN mRNA SEQUENCE |
| hP7-193.5 | SEQ ID NO: 244 | HUMAN PROTEIN SEQUENCE |
| hR7-193.6 | SEQ ID NO: 245 | HUMAN mRNA SEQUENCE |
| hP7-193.6 | SEQ ID NO: 246 | HUMAN PROTEIN SEQUENCE |
| hR7-193.7 | SEQ ID NO: 247 | HUMAN mRNA SEQUENCE |
| hP7-193.7 | SEQ ID NO: 248 | HUMAN PROTEIN SEQUENCE |
| hD7-193 | SEQ ID NO: 249 | HUMAN GENOMIC SEQUENCE |
| hR7-193.1 | SEQ ID NO: 250 | HUMAN mRNA SEQUENCE |
| hP7-193.1 | SEQ ID NO: 251 | HUMAN PROTEIN SEQUENCE |
| hR7-193.2 | SEQ ID NO: 252 | HUMAN mRNA SEQUENCE |
| hP7-193.2 | SEQ ID NO: 253 | HUMAN PROTEIN SEQUENCE |
| hR7-193.3 | SEQ ID NO: 254 | HUMAN mRNA SEQUENCE |
| hP7-193.3 | SEQ ID NO: 255 | HUMAN PROTEIN SEQUENCE |
| hR7-193.4 | SEQ ID NO: 256 | HUMAN mRNA SEQUENCE |
| hP7-193.4 | SEQ ID NO: 257 | HUMAN PROTEIN SEQUENCE |
| hR7-193.5 | SEQ ID NO: 258 | HUMAN mRNA SEQUENCE |
| hP7-193.5 | SEQ ID NO: 259 | HUMAN PROTEIN SEQUENCE |
| hR7-193.6 | SEQ ID NO: 260 | HUMAN mRNA SEQUENCE |
| hP7-193.6 | SEQ ID NO: 261 | HUMAN PROTEIN SEQUENCE |
| hR7-193.7 | SEQ ID NO: 262 | HUMAN mRNA SEQUENCE |
| hP7-193.7 | SEQ ID NO: 263 | HUMAN PROTEIN SEQUENCE |
| mD7-206 | SEQ ID NO: 264 | MOUSE GENOMIC SEQUENCE |
| mR7-206.1 | SEQ ID NO: 265 | MOUSE mRNA SEQUENCE |
| mP7-206.1 | SEQ ID NO: 266 | MOUSE PROTEIN SEQUENCE |
| mR7-206.2 | SEQ ID NO: 267 | MOUSE mRNA SEQUENCE |
| mP7-206.2 | SEQ ID NO: 268 | MOUSE PROTEIN SEQUENCE |
| mR7-206.3 | SEQ ID NO: 269 | MOUSE mRNA SEQUENCE |
| mP7-206.3 | SEQ ID NO: 270 | MOUSE PROTEIN SEQUENCE |
| hD7-206 | SEQ ID NO: 271 | HUMAN GENOMIC SEQUENCE |
| hR7-206.1 | SEQ ID NO: 272 | HUMAN mRNA SEQUENCE |
| hP7-206.1 | SEQ ID NO: 273 | HUMAN PROTEIN SEQUENCE |
| hR7-206.2 | SEQ ID NO: 274 | HUMAN mRNA SEQUENCE |
| hP7-206.2 | SEQ ID NO: 275 | HUMAN PROTEIN SEQUENCE |
| hR7-206.3 | SEQ ID NO: 276 | HUMAN mRNA SEQUENCE |
| hP7-206.3 | SEQ ID NO: 277 | HUMAN PROTEIN SEQUENCE |
| mD19-009 | SEQ ID NO: 278 | MOUSE GENOMIC SEQUENCE |
| mR19-009.1 | SEQ ID NO: 279 | MOUSE mRNA SEQUENCE |
| mP19-009.1 | SEQ ID NO: 280 | MOUSE PROTEIN SEQUENCE |
| mR19-009.2 | SEQ ID NO: 281 | MOUSE mRNA SEQUENCE |
| mP19-009.2 | SEQ ID NO: 282 | MOUSE PROTEIN SEQUENCE |
| mR19-009.3 | SEQ ID NO: 283 | MOUSE mRNA SEQUENCE |
| mP19-009.3 | SEQ ID NO: 284 | MOUSE PROTEIN SEQUENCE |
| mR19-009.4 | SEQ ID NO: 285 | MOUSE mRNA SEQUENCE |
| mP19-009.4 | SEQ ID NO: 286 | MOUSE PROTEIN SEQUENCE |
| mD7-213 | SEQ ID NO: 287 | MOUSE GENOMIC SEQUENCE |
| mR7-213.1 | SEQ ID NO: 288 | MOUSE mRNA SEQUENCE |
| mP7-213.1 | SEQ ID NO: 289 | MOUSE PROTEIN SEQUENCE |
| mR7-213.2 | SEQ ID NO: 290 | MOUSE mRNA SEQUENCE |
| mP7-213.2 | SEQ ID NO: 291 | MOUSE PROTEIN SEQUENCE |
| hD7-213 | SEQ ID NO: 292 | HUMAN GENOMIC SEQUENCE |
| hR7-213.1 | SEQ ID NO: 293 | HUMAN mRNA SEQUENCE |
| hP7-213.1 | SEQ ID NO: 294 | HUMAN PROTEIN SEQUENCE |
| hR7-213.2 | SEQ ID NO: 295 | HUMAN mRNA SEQUENCE |
| hP7-213.2 | SEQ ID NO: 296 | HUMAN PROTEIN SEQUENCE |
| mD7-215 | SEQ ID NO: 297 | MOUSE GENOMIC SEQUENCE |
| mR7-215.1 | SEQ ID NO: 298 | MOUSE mRNA SEQUENCE |
| mP7-215.1 | SEQ ID NO: 299 | MOUSE PROTEIN SEQUENCE |
| hD7-215 | SEQ ID NO: 300 | HUMAN GENOMIC SEQUENCE |
| hR7-215.1 | SEQ ID NO: 301 | HUMAN mRNA SEQUENCE |
| hP7-215.1 | SEQ ID NO: 302 | HUMAN PROTEIN SEQUENCE |
| hR7-215.2 | SEQ ID NO: 303 | HUMAN mRNA SEQUENCE |
| hP7-215.2 | SEQ ID NO: 304 | HUMAN PROTEIN SEQUENCE |
| mD7-217 | SEQ ID NO: 305 | MOUSE GENOMIC SEQUENCE |
| mR7-217.1 | SEQ ID NO: 306 | MOUSE mRNA SEQUENCE |
| mP7-217.1 | SEQ ID NO: 307 | MOUSE PROTEIN SEQUENCE |
| mR7-217.2 | SEQ ID NO: 308 | MOUSE mRNA SEQUENCE |
| mP7-217.2 | SEQ ID NO: 309 | MOUSE PROTEIN SEQUENCE |
| hD7-217 | SEQ ID NO: 310 | HUMAN GENOMIC SEQUENCE |
| hR7-217.1 | SEQ ID NO: 311 | HUMAN mRNA SEQUENCE |
| hP7-217.1 | SEQ ID NO: 312 | HUMAN PROTEIN SEQUENCE |
| hR7-217.2 | SEQ ID NO: 313 | HUMAN mRNA SEQUENCE |
| hP7-217.2 | SEQ ID NO: 314 | HUMAN PROTEIN SEQUENCE |
| hR7-217.3 | SEQ ID NO: 315 | HUMAN mRNA SEQUENCE |
| hP7-217.3 | SEQ ID NO: 316 | HUMAN PROTEIN SEQUENCE |
| hR7-217.4 | SEQ ID NO: 317 | HUMAN mRNA SEQUENCE |
| hP7-217.4 | SEQ ID NO: 318 | HUMAN PROTEIN SEQUENCE |
| mD7-226 | SEQ ID NO: 319 | MOUSE GENOMIC SEQUENCE |
| mR7-226.1 | SEQ ID NO: 320 | MOUSE mRNA SEQUENCE |
| mP7-226.1 | SEQ ID NO: 321 | MOUSE PROTEIN SEQUENCE |
| hD7-226 | SEQ ID NO: 322 | HUMAN GENOMIC SEQUENCE |
| hR7-226.1 | SEQ ID NO: 323 | HUMAN mRNA SEQUENCE |
| hP7-226.1 | SEQ ID NO: 324 | HUMAN PROTEIN SEQUENCE |
| mD7-238 | SEQ ID NO: 325 | MOUSE GENOMIC SEQUENCE |
| mR7-238.1 | SEQ ID NO: 326 | MOUSE mRNA SEQUENCE |
| mP7-238.1 | SEQ ID NO: 327 | MOUSE PROTEIN SEQUENCE |
| hD7-238 | SEQ ID NO: 328 | HUMAN GENOMIC SEQUENCE |
| hR7-238.1 | SEQ ID NO: 329 | HUMAN mRNA SEQUENCE |
| hP7-238.1 | SEQ ID NO: 330 | HUMAN PROTEIN SEQUENCE |
| hR7-238.2 | SEQ ID NO: 331 | HUMAN mRNA SEQUENCE |
| hP7-238.2 | SEQ ID NO: 332 | HUMAN PROTEIN SEQUENCE |
| mD8-004 | SEQ ID NO: 333 | MOUSE GENOMIC SEQUENCE |
| mR8-004.1 | SEQ ID NO: 334 | MOUSE mRNA SEQUENCE |
| mP8-004.1 | SEQ ID NO: 335 | MOUSE PROTEIN SEQUENCE |
| hD8-004 | SEQ ID NO: 336 | HUMAN GENOMIC SEQUENCE |
| hR8-004.1 | SEQ ID NO: 337 | HUMAN mRNA SEQUENCE |
| hP8-004.1 | SEQ ID NO: 338 | HUMAN PROTEIN SEQUENCE |
| mD8-005 | SEQ ID NO: 339 | MOUSE GENOMIC SEQUENCE |
| mR8-005.1 | SEQ ID NO: 340 | MOUSE mRNA SEQUENCE |
| mP8-005.1 | SEQ ID NO: 341 | MOUSE PROTEIN SEQUENCE |
| mR8-005.2 | SEQ ID NO: 342 | MOUSE mRNA SEQUENCE |
| mP8-005.2 | SEQ ID NO: 343 | MOUSE PROTEIN SEQUENCE |
| mR8-005.3 | SEQ ID NO: 344 | MOUSE mRNA SEQUENCE |
| mP8-005.3 | SEQ ID NO: 345 | MOUSE PROTEIN SEQUENCE |
| mR8-005.4 | SEQ ID NO: 346 | MOUSE mRNA SEQUENCE |
| mP8-005.4 | SEQ ID NO: 347 | MOUSE PROTEIN SEQUENCE |
| mR8-005.5 | SEQ ID NO: 348 | MOUSE mRNA SEQUENCE |
| mP8-005.5 | SEQ ID NO: 349 | MOUSE PROTEIN SEQUENCE |
| hD8-005 | SEQ ID NO: 350 | HUMAN GENOMIC SEQUENCE |
| hR8-005.1 | SEQ ID NO: 351 | HUMAN mRNA SEQUENCE |
| hP8-005.1 | SEQ ID NO: 352 | HUMAN PROTEIN SEQUENCE |
| hR8-005.2 | SEQ ID NO: 353 | HUMAN mRNA SEQUENCE |
| hP8-005.2 | SEQ ID NO: 354 | HUMAN PROTEIN SEQUENCE |
| hR8-005.3 | SEQ ID NO: 355 | HUMAN mRNA SEQUENCE |
| hP8-005.3 | SEQ ID NO: 356 | HUMAN PROTEIN SEQUENCE |
| hR8-005.4 | SEQ ID NO: 357 | HUMAN mRNA SEQUENCE |
| hP8-005.4 | SEQ ID NO: 358 | HUMAN PROTEIN SEQUENCE |
| hR8-005.5 | SEQ ID NO: 359 | HUMAN mRNA SEQUENCE |
| hP8-005.5 | SEQ ID NO: 360 | HUMAN PROTEIN SEQUENCE |
| hR8-005.6 | SEQ ID NO: 361 | HUMAN mRNA SEQUENCE |
| hP8-005.6 | SEQ ID NO: 362 | HUMAN PROTEIN SEQUENCE |
| hR8-005.7 | SEQ ID NO: 363 | HUMAN mRNA SEQUENCE |
| hP8-005.7 | SEQ ID NO: 364 | HUMAN PROTEIN SEQUENCE |
| hR8-005.8 | SEQ ID NO: 365 | HUMAN mRNA SEQUENCE |
| hP8-005.8 | SEQ ID NO: 366 | HUMAN PROTEIN SEQUENCE |
| hR8-005.9 | SEQ ID NO: 367 | HUMAN mRNA SEQUENCE |
| hP8-005.9 | SEQ ID NO: 368 | HUMAN PROTEIN SEQUENCE |
| hR8-005.10 | SEQ ID NO: 369 | HUMAN mRNA SEQUENCE |
| hP8-005.10 | SEQ ID NO: 370 | HUMAN PROTEIN SEQUENCE |
| mD8-010 | SEQ ID NO: 371 | MOUSE GENOMIC SEQUENCE |
| mR8-010.1 | SEQ ID NO: 372 | MOUSE mRNA SEQUENCE |
| mP8-010.1 | SEQ ID NO: 373 | MOUSE PROTEIN SEQUENCE |
| hD8-010 | SEQ ID NO: 374 | HUMAN GENOMIC SEQUENCE |
| hR8-010.1 | SEQ ID NO: 375 | HUMAN mRNA SEQUENCE |
| hP8-010.1 | SEQ ID NO: 376 | HUMAN PROTEIN SEQUENCE |
| hR8-010.2 | SEQ ID NO: 377 | HUMAN mRNA SEQUENCE |
| hP8-010.2 | SEQ ID NO: 378 | HUMAN PROTEIN SEQUENCE |
| hR8-010.3 | SEQ ID NO: 379 | HUMAN mRNA SEQUENCE |
| hP8-010.3 | SEQ ID NO: 380 | HUMAN PROTEIN SEQUENCE |
| hR8-010.4 | SEQ ID NO: 381 | HUMAN mRNA SEQUENCE |
| hP8-010.4 | SEQ ID NO: 382 | HUMAN PROTEIN SEQUENCE |
| hR8-010.5 | SEQ ID NO: 383 | HUMAN mRNA SEQUENCE |
| hP8-010.5 | SEQ ID NO: 384 | HUMAN PROTEIN SEQUENCE |
| hR8-010.6 | SEQ ID NO: 385 | HUMAN mRNA SEQUENCE |
| hP8-010.6 | SEQ ID NO: 386 | HUMAN PROTEIN SEQUENCE |
| hR8-010.7 | SEQ ID NO: 387 | HUMAN mRNA SEQUENCE |
| hP8-010.7 | SEQ ID NO: 388 | HUMAN PROTEIN SEQUENCE |
| mD18-042 | SEQ ID NO: 389 | MOUSE GENOMIC SEQUENCE |
| mR18-042.1 | SEQ ID NO: 390 | MOUSE mRNA SEQUENCE |
| mP18-042.1 | SEQ ID NO: 391 | MOUSE PROTEIN SEQUENCE |
| mR18-042.2 | SEQ ID NO: 392 | MOUSE mRNA SEQUENCE |
| mP18-042.2 | SEQ ID NO: 393 | MOUSE PROTEIN SEQUENCE |
| hD18-042 | SEQ ID NO: 394 | HUMAN GENOMIC SEQUENCE |
| hR18-042.1 | SEQ ID NO: 395 | HUMAN mRNA SEQUENCE |
| hP18-042.1 | SEQ ID NO: 396 | HUMAN PROTEIN SEQUENCE |
| hR18-042.2 | SEQ ID NO: 397 | HUMAN mRNA SEQUENCE |
| hP18-042.2 | SEQ ID NO: 398 | HUMAN PROTEIN SEQUENCE |
| mD19-010 | SEQ ID NO: 399 | MOUSE GENOMIC SEQUENCE |
| mR19-010.1 | SEQ ID NO: 400 | MOUSE mRNA SEQUENCE |
| mP19-010.1 | SEQ ID NO: 401 | MOUSE PROTEIN SEQUENCE |
| mR19-010.2 | SEQ ID NO: 402 | MOUSE mRNA SEQUENCE |
| mP19-010.2 | SEQ ID NO: 403 | MOUSE PROTEIN SEQUENCE |
| mD11-041 | SEQ ID NO: 404 | MOUSE GENOMIC SEQUENCE |
| mR11-041.1 | SEQ ID NO: 405 | MOUSE mRNA SEQUENCE |
| mP11-041.1 | SEQ ID NO: 406 | MOUSE PROTEIN SEQUENCE |
| hD11-041 | SEQ ID NO: 407 | HUMAN GENOMIC SEQUENCE |
| hR11-041.1 | SEQ ID NO: 408 | HUMAN mRNA SEQUENCE |
| hP11-041.1 | SEQ ID NO: 409 | HUMAN PROTEIN SEQUENCE |
| hR11-041.2 | SEQ ID NO: 410 | HUMAN mRNA SEQUENCE |
| hP11-041.2 | SEQ ID NO: 411 | HUMAN PROTEIN SEQUENCE |
| hR11-041.3 | SEQ ID NO: 412 | HUMAN mRNA SEQUENCE |
| hP11-041.3 | SEQ ID NO: 413 | HUMAN PROTEIN SEQUENCE |
| hR11-041.4 | SEQ ID NO: 414 | HUMAN mRNA SEQUENCE |
| hP11-041.4 | SEQ ID NO: 415 | HUMAN PROTEIN SEQUENCE |
| mD12-004 | SEQ ID NO: 416 | MOUSE GENOMIC SEQUENCE |
| mR12-004.1 | SEQ ID NO: 417 | MOUSE mRNA SEQUENCE |
| mP12-004.1 | SEQ ID NO: 418 | MOUSE PROTEIN SEQUENCE |
| hD12-004 | SEQ ID NO: 419 | HUMAN GENOMIC SEQUENCE |
| hR12-004.1 | SEQ ID NO: 420 | HUMAN mRNA SEQUENCE |
| hP12-004.1 | SEQ ID NO: 421 | HUMAN PROTEIN SEQUENCE |
| hR12-004.2 | SEQ ID NO: 422 | HUMAN mRNA SEQUENCE |
| hP12-004.2 | SEQ ID NO: 423 | HUMAN PROTEIN SEQUENCE |
| hR12-004.3 | SEQ ID NO: 424 | HUMAN mRNA SEQUENCE |
| hP12-004.3 | SEQ ID NO: 425 | HUMAN PROTEIN SEQUENCE |
| hR12-004.4 | SEQ ID NO: 426 | HUMAN mRNA SEQUENCE |
| hP12-004.4 | SEQ ID NO: 427 | HUMAN PROTEIN SEQUENCE |
| hR12-004.5 | SEQ ID NO: 428 | HUMAN mRNA SEQUENCE |
| hP12-004.5 | SEQ ID NO: 429 | HUMAN PROTEIN SEQUENCE |
| hR12-004.6 | SEQ ID NO: 430 | HUMAN mRNA SEQUENCE |
| hP12-004.6 | SEQ ID NO: 431 | HUMAN PROTEIN SEQUENCE |
| mD12-005 | SEQ ID NO: 432 | MOUSE GENOMIC SEQUENCE |
| mR12-005.1 | SEQ ID NO: 433 | MOUSE mRNA SEQUENCE |
| mP12-005.1 | SEQ ID NO: 434 | MOUSE PROTEIN SEQUENCE |
| mR12-005.2 | SEQ ID NO: 435 | MOUSE mRNA SEQUENCE |
| mP12-005.2 | SEQ ID NO: 436 | MOUSE PROTEIN SEQUENCE |
| hD12-005 | SEQ ID NO: 437 | HUMAN GENOMIC SEQUENCE |
| hR12-005.1 | SEQ ID NO: 438 | HUMAN mRNA SEQUENCE |
| hP12-005.1 | SEQ ID NO: 439 | HUMAN PROTEIN SEQUENCE |
| hR12-005.2 | SEQ ID NO: 440 | HUMAN mRNA SEQUENCE |
| hP12-005.2 | SEQ ID NO: 441 | HUMAN PROTEIN SEQUENCE |
| hR12-005.3 | SEQ ID NO: 442 | HUMAN mRNA SEQUENCE |
| hP12-005.3 | SEQ ID NO: 443 | HUMAN PROTEIN SEQUENCE |
| hR12-005.4 | SEQ ID NO: 444 | HUMAN mRNA SEQUENCE |
| hP12-005.4 | SEQ ID NO: 445 | HUMAN PROTEIN SEQUENCE |
| hR12-005.5 | SEQ ID NO: 446 | HUMAN mRNA SEQUENCE |
| hP12-005.5 | SEQ ID NO: 447 | HUMAN PROTEIN SEQUENCE |
| hR12-005.6 | SEQ ID NO: 448 | HUMAN mRNA SEQUENCE |
| hP12-005.6 | SEQ ID NO: 449 | HUMAN PROTEIN SEQUENCE |
| hR12-005.7 | SEQ ID NO: 450 | HUMAN mRNA SEQUENCE |
| hP12-005.7 | SEQ ID NO: 451 | HUMAN PROTEIN SEQUENCE |
| mD12-009 | SEQ ID NO: 452 | MOUSE GENOMIC SEQUENCE |
| mR12-009.1 | SEQ ID NO: 453 | MOUSE mRNA SEQUENCE |
| mP12-009.1 | SEQ ID NO: 454 | MOUSE PROTEIN SEQUENCE |
| hD12-009 | SEQ ID NO: 455 | HUMAN GENOMIC SEQUENCE |
| hR12-009.1 | SEQ ID NO: 456 | HUMAN mRNA SEQUENCE |
| hP12-009.1 | SEQ ID NO: 457 | HUMAN PROTEIN SEQUENCE |
| hR12-009.2 | SEQ ID NO: 458 | HUMAN mRNA SEQUENCE |
| hP12-009.2 | SEQ ID NO: 459 | HUMAN PROTEIN SEQUENCE |
| mD12-011 | SEQ ID NO: 460 | MOUSE GENOMIC SEQUENCE |
| mR12-011.1 | SEQ ID NO: 461 | MOUSE mRNA SEQUENCE |
| mP12-011.1 | SEQ ID NO: 462 | MOUSE PROTEIN SEQUENCE |
| mR12-011.2 | SEQ ID NO: 463 | MOUSE mRNA SEQUENCE |
| mP12-011.2 | SEQ ID NO: 464 | MOUSE PROTEIN SEQUENCE |
| hD12-011 | SEQ ID NO: 465 | HUMAN GENOMIC SEQUENCE |
| hR12-011.1 | SEQ ID NO: 466 | HUMAN mRNA SEQUENCE |
| hP12-011.1 | SEQ ID NO: 467 | HUMAN PROTEIN SEQUENCE |
| hR12-011.2 | SEQ ID NO: 468 | HUMAN mRNA SEQUENCE |
| hP12-011.2 | SEQ ID NO: 469 | HUMAN PROTEIN SEQUENCE |
| hR12-011.3 | SEQ ID NO: 470 | HUMAN mRNA SEQUENCE |
| hP12-011.3 | SEQ ID NO: 471 | HUMAN PROTEIN SEQUENCE |
| hR12-011.4 | SEQ ID NO: 472 | HUMAN mRNA SEQUENCE |
| hP12-011.4 | SEQ ID NO: 473 | HUMAN PROTEIN SEQUENCE |
| hR12-011.5 | SEQ ID NO: 474 | HUMAN mRNA SEQUENCE |
| hP12-011.5 | SEQ ID NO: 475 | HUMAN PROTEIN SEQUENCE |
| hR12-011.6 | SEQ ID NO: 476 | HUMAN mRNA SEQUENCE |
| hP12-011.6 | SEQ ID NO: 477 | HUMAN PROTEIN SEQUENCE |
| hR12-011.7 | SEQ ID NO: 478 | HUMAN mRNA SEQUENCE |
| hP12-011.7 | SEQ ID NO: 479 | HUMAN PROTEIN SEQUENCE |
| mD12-012 | SEQ ID NO: 480 | MOUSE GENOMIC SEQUENCE |
| mR12-012.1 | SEQ ID NO: 481 | MOUSE mRNA SEQUENCE |
| mP12-012.1 | SEQ ID NO: 482 | MOUSE PROTEIN SEQUENCE |
| mR12-012.2 | SEQ ID NO: 483 | MOUSE mRNA SEQUENCE |
| mP12-012.2 | SEQ ID NO: 484 | MOUSE PROTEIN SEQUENCE |
| hD12-012 | SEQ ID NO: 485 | HUMAN GENOMIC SEQUENCE |
| hR12-012.1 | SEQ ID NO: 486 | HUMAN mRNA SEQUENCE |
| hP12-012.1 | SEQ ID NO: 487 | HUMAN PROTEIN SEQUENCE |
| hR12-012.2 | SEQ ID NO: 488 | HUMAN mRNA SEQUENCE |
| hP12-012.2 | SEQ ID NO: 489 | HUMAN PROTEIN SEQUENCE |
| hR12-012.3 | SEQ ID NO: 490 | HUMAN mRNA SEQUENCE |
| hP12-012.3 | SEQ ID NO: 491 | HUMAN PROTEIN SEQUENCE |
| mD19-011 | SEQ ID NO: 492 | MOUSE GENOMIC SEQUENCE |
| mR19-011.1 | SEQ ID NO: 493 | MOUSE mRNA SEQUENCE |
| mP19-011.1 | SEQ ID NO: 494 | MOUSE PROTEIN SEQUENCE |
| mD12-020 | SEQ ID NO: 495 | MOUSE GENOMIC SEQUENCE |
| mR12-020.1 | SEQ ID NO: 496 | MOUSE mRNA SEQUENCE |
| mP12-020.1 | SEQ ID NO: 497 | MOUSE PROTEIN SEQUENCE |
| hD12-020 | SEQ ID NO: 498 | HUMAN GENOMIC SEQUENCE |
| hR12-020.1 | SEQ ID NO: 499 | HUMAN mRNA SEQUENCE |
| hP12-020.1 | SEQ ID NO: 500 | HUMAN PROTEIN SEQUENCE |
| hR12-020.2 | SEQ ID NO: 501 | HUMAN mRNA SEQUENCE |
| hP12-020.2 | SEQ ID NO: 502 | HUMAN PROTEIN SEQUENCE |
| mD12-021 | SEQ ID NO: 503 | MOUSE GENOMIC SEQUENCE |
| mR12-021.1 | SEQ ID NO: 504 | MOUSE mRNA SEQUENCE |
| mP12-021.1 | SEQ ID NO: 505 | MOUSE PROTEIN SEQUENCE |
| hD12-021 | SEQ ID NO: 506 | HUMAN GENOMIC SEQUENCE |
| hR12-021.1 | SEQ ID NO: 507 | HUMAN mRNA SEQUENCE |
| hP12-021.1 | SEQ ID NO: 508 | HUMAN PROTEIN SEQUENCE |
| hR12-021.2 | SEQ ID NO: 509 | HUMAN mRNA SEQUENCE |
| hP12-021.2 | SEQ ID NO: 510 | HUMAN PROTEIN SEQUENCE |
| mD12-026 | SEQ ID NO: 511 | MOUSE GENOMIC SEQUENCE |
| mR12-026.1 | SEQ ID NO: 512 | MOUSE mRNA SEQUENCE |
| mP12-026.1 | SEQ ID NO: 513 | MOUSE PROTEIN SEQUENCE |
| mR12-026.2 | SEQ ID NO: 514 | MOUSE mRNA SEQUENCE |
| mP12-026.2 | SEQ ID NO: 515 | MOUSE PROTEIN SEQUENCE |
| mR12-026.3 | SEQ ID NO: 516 | MOUSE mRNA SEQUENCE |
| mP12-026.3 | SEQ ID NO: 517 | MOUSE PROTEIN SEQUENCE |
| hD12-026 | SEQ ID NO: 518 | HUMAN GENOMIC SEQUENCE |
| hR12-026.1 | SEQ ID NO: 519 | HUMAN mRNA SEQUENCE |
| hP12-026.1 | SEQ ID NO: 520 | HUMAN PROTEIN SEQUENCE |
| mD12-028 | SEQ ID NO: 521 | MOUSE GENOMIC SEQUENCE |
| mR12-028.1 | SEQ ID NO: 522 | MOUSE mRNA SEQUENCE |
| mP12-028.1 | SEQ ID NO: 523 | MOUSE PROTEIN SEQUENCE |
| mR12-028.2 | SEQ ID NO: 524 | MOUSE mRNA SEQUENCE |
| mP12-028.2 | SEQ ID NO: 525 | MOUSE PROTEIN SEQUENCE |
| hD12-028 | SEQ ID NO: 526 | HUMAN GENOMIC SEQUENCE |
| hR12-028.1 | SEQ ID NO: 527 | HUMAN mRNA SEQUENCE |
| hP12-028.1 | SEQ ID NO: 528 | HUMAN PROTEIN SEQUENCE |
| hR12-028.2 | SEQ ID NO: 529 | HUMAN mRNA SEQUENCE |
| hP12-028.2 | SEQ ID NO: 530 | HUMAN PROTEIN SEQUENCE |
| mD13-003 | SEQ ID NO: 531 | MOUSE GENOMIC SEQUENCE |
| mR13-003.1 | SEQ ID NO: 532 | MOUSE mRNA SEQUENCE |
| mP13-003.1 | SEQ ID NO: 533 | MOUSE PROTEIN SEQUENCE |
| hD13-003 | SEQ ID NO: 534 | HUMAN GENOMIC SEQUENCE |
| hR13-003.1 | SEQ ID NO: 535 | HUMAN mRNA SEQUENCE |
| hP13-003.1 | SEQ ID NO: 536 | HUMAN PROTEIN SEQUENCE |
| hR13-003.2 | SEQ ID NO: 537 | HUMAN mRNA SEQUENCE |
| hP13-003.2 | SEQ ID NO: 538 | HUMAN PROTEIN SEQUENCE |
| mD13-004 | SEQ ID NO: 539 | MOUSE GENOMIC SEQUENCE |
| mR13-004.1 | SEQ ID NO: 540 | MOUSE mRNA SEQUENCE |
| mP13-004.1 | SEQ ID NO: 541 | MOUSE PROTEIN SEQUENCE |
| hD13-004 | SEQ ID NO: 542 | HUMAN GENOMIC SEQUENCE |
| hR13-004.1 | SEQ ID NO: 543 | HUMAN mRNA SEQUENCE |
| hP13-004.1 | SEQ ID NO: 544 | HUMAN PROTEIN SEQUENCE |
| hR13-004.2 | SEQ ID NO: 545 | HUMAN mRNA SEQUENCE |
| hP13-004.2 | SEQ ID NO: 546 | HUMAN PROTEIN SEQUENCE |
| mD13-009 | SEQ ID NO: 547 | MOUSE GENOMIC SEQUENCE |
| mR13-009.1 | SEQ ID NO: 548 | MOUSE mRNA SEQUENCE |
| mP13-009.1 | SEQ ID NO: 549 | MOUSE PROTEIN SEQUENCE |
| hD13-009 | SEQ ID NO: 550 | HUMAN GENOMIC SEQUENCE |
| hR13-009.1 | SEQ ID NO: 551 | HUMAN mRNA SEQUENCE |
| hP13-009.1 | SEQ ID NO: 552 | HUMAN PROTEIN SEQUENCE |
| mD13-013 | SEQ ID NO: 553 | MOUSE GENOMIC SEQUENCE |
| mR13-013.1 | SEQ ID NO: 554 | MOUSE mRNA SEQUENCE |
| mP13-013.1 | SEQ ID NO: 555 | MOUSE PROTEIN SEQUENCE |
| hD13-013 | SEQ ID NO: 556 | HUMAN GENOMIC SEQUENCE |
| hR13-013.1 | SEQ ID NO: 557 | HUMAN mRNA SEQUENCE |
| hP13-013.1 | SEQ ID NO: 558 | HUMAN PROTEIN SEQUENCE |
| hR13-013.2 | SEQ ID NO: 559 | HUMAN mRNA SEQUENCE |
| hP13-013.2 | SEQ ID NO: 560 | HUMAN PROTEIN SEQUENCE |
| mD13-015 | SEQ ID NO: 561 | MOUSE GENOMIC SEQUENCE |
| mR13-015.1 | SEQ ID NO: 562 | MOUSE mRNA SEQUENCE |
| mP13-015.1 | SEQ ID NO: 563 | MOUSE PROTEIN SEQUENCE |
| hD13-015 | SEQ ID NO: 564 | HUMAN GENOMIC SEQUENCE |
| hR13-015.1 | SEQ ID NO: 565 | HUMAN mRNA SEQUENCE |
| hP13-015.1 | SEQ ID NO: 566 | HUMAN PROTEIN SEQUENCE |
| hR13-015.2 | SEQ ID NO: 567 | HUMAN mRNA SEQUENCE |
| hP13-015.2 | SEQ ID NO: 568 | HUMAN PROTEIN SEQUENCE |
| mD13-022 | SEQ ID NO: 569 | MOUSE GENOMIC SEQUENCE |
| mR13-022.1 | SEQ ID NO: 570 | MOUSE mRNA SEQUENCE |
| mP13-022.1 | SEQ ID NO: 571 | MOUSE PROTEIN SEQUENCE |
| hD13-022 | SEQ ID NO: 572 | HUMAN GENOMIC SEQUENCE |
| hR13-022.1 | SEQ ID NO: 573 | HUMAN mRNA SEQUENCE |
| hP13-022.1 | SEQ ID NO: 574 | HUMAN PROTEIN SEQUENCE |
| hR13-022.2 | SEQ ID NO: 575 | HUMAN mRNA SEQUENCE |
| hP13-022.2 | SEQ ID NO: 576 | HUMAN PROTEIN SEQUENCE |
| hR13-022.3 | SEQ ID NO: 577 | HUMAN mRNA SEQUENCE |
| hP13-022.3 | SEQ ID NO: 578 | HUMAN PROTEIN SEQUENCE |
| hR13-022.4 | SEQ ID NO: 579 | HUMAN mRNA SEQUENCE |
| hP13-022.4 | SEQ ID NO: 580 | HUMAN PROTEIN SEQUENCE |
| hR13-022.5 | SEQ ID NO: 581 | HUMAN mRNA SEQUENCE |
| hP13-022.5 | SEQ ID NO: 582 | HUMAN PROTEIN SEQUENCE |
| hR13-022.6 | SEQ ID NO: 583 | HUMAN mRNA SEQUENCE |
| hP13-022.6 | SEQ ID NO: 584 | HUMAN PROTEIN SEQUENCE |
| mD13-025 | SEQ ID NO: 585 | MOUSE GENOMIC SEQUENCE |
| mR13-025.1 | SEQ ID NO: 586 | MOUSE mRNA SEQUENCE |
| mP13-025.1 | SEQ ID NO: 587 | MOUSE PROTEIN SEQUENCE |
| hD13-025 | SEQ ID NO: 588 | HUMAN GENOMIC SEQUENCE |
| hR13-025.1 | SEQ ID NO: 589 | HUMAN mRNA SEQUENCE |
| hP13-025.1 | SEQ ID NO: 590 | HUMAN PROTEIN SEQUENCE |
| hR13-025.2 | SEQ ID NO: 591 | HUMAN mRNA SEQUENCE |
| hP13-025.2 | SEQ ID NO: 592 | HUMAN PROTEIN SEQUENCE |
| hR13-025.3 | SEQ ID NO: 593 | HUMAN mRNA SEQUENCE |
| hP13-025.3 | SEQ ID NO: 594 | HUMAN PROTEIN SEQUENCE |
| hR13-025.4 | SEQ ID NO: 595 | HUMAN mRNA SEQUENCE |
| hP13-025.4 | SEQ ID NO: 596 | HUMAN PROTEIN SEQUENCE |
| mD13-027 | SEQ ID NO: 597 | MOUSE GENOMIC SEQUENCE |
| mR13-027.1 | SEQ ID NO: 598 | MOUSE mRNA SEQUENCE |
| mP13-027.1 | SEQ ID NO: 599 | MOUSE PROTEIN SEQUENCE |
| mR13-027.2 | SEQ ID NO: 600 | MOUSE mRNA SEQUENCE |
| mP13-027.2 | SEQ ID NO: 601 | MOUSE PROTEIN SEQUENCE |
| hD13-027 | SEQ ID NO: 602 | HUMAN GENOMIC SEQUENCE |
| hR13-027.1 | SEQ ID NO: 603 | HUMAN mRNA SEQUENCE |
| hP13-027.1 | SEQ ID NO: 604 | HUMAN PROTEIN SEQUENCE |
| hR13-027.2 | SEQ ID NO: 605 | HUMAN mRNA SEQUENCE |
| hP13-027.2 | SEQ ID NO: 606 | HUMAN PROTEIN SEQUENCE |
| mD13-030 | SEQ ID NO: 607 | MOUSE GENOMIC SEQUENCE |
| mR13-030.1 | SEQ ID NO: 608 | MOUSE mRNA SEQUENCE |
| mP13-030.1 | SEQ ID NO: 609 | MOUSE PROTEIN SEQUENCE |
| hD13-030 | SEQ ID NO: 610 | HUMAN GENOMIC SEQUENCE |
| hR13-030.1 | SEQ ID NO: 611 | HUMAN mRNA SEQUENCE |
| hP13-030.1 | SEQ ID NO: 612 | HUMAN PROTEIN SEQUENCE |
| hR13-030.2 | SEQ ID NO: 613 | HUMAN mRNA SEQUENCE |
| hP13-030.2 | SEQ ID NO: 614 | HUMAN PROTEIN SEQUENCE |
| mD13-032 | SEQ ID NO: 615 | MOUSE GENOMIC SEQUENCE |
| mR13-032.1 | SEQ ID NO: 616 | MOUSE mRNA SEQUENCE |
| mP13-032.1 | SEQ ID NO: 617 | MOUSE PROTEIN SEQUENCE |
| hD13-032 | SEQ ID NO: 618 | HUMAN GENOMIC SEQUENCE |
| hR13-032.1 | SEQ ID NO: 619 | HUMAN mRNA SEQUENCE |
| hP13-032.1 | SEQ ID NO: 620 | HUMAN PROTEIN SEQUENCE |
| hR13-032.2 | SEQ ID NO: 621 | HUMAN mRNA SEQUENCE |
| hP13-032.2 | SEQ ID NO: 622 | HUMAN PROTEIN SEQUENCE |
| hR13-032.3 | SEQ ID NO: 623 | HUMAN mRNA SEQUENCE |
| hP13-032.3 | SEQ ID NO: 624 | HUMAN PROTEIN SEQUENCE |
| hR13-032.4 | SEQ ID NO: 625 | HUMAN mRNA SEQUENCE |
| hP13-032.4 | SEQ ID NO: 626 | HUMAN PROTEIN SEQUENCE |
| hR13-032.5 | SEQ ID NO: 627 | HUMAN mRNA SEQUENCE |
| hP13-032.5 | SEQ ID NO: 628 | HUMAN PROTEIN SEQUENCE |
| mD13-034 | SEQ ID NO: 629 | MOUSE GENOMIC SEQUENCE |
| mR13-034.1 | SEQ ID NO: 630 | MOUSE mRNA SEQUENCE |
| mP13-034.1 | SEQ ID NO: 631 | MOUSE PROTEIN SEQUENCE |
| hD13-034 | SEQ ID NO: 632 | HUMAN GENOMIC SEQUENCE |
| hR13-034.1 | SEQ ID NO: 633 | HUMAN mRNA SEQUENCE |
| hP13-034.1 | SEQ ID NO: 634 | HUMAN PROTEIN SEQUENCE |
| hR13-034.2 | SEQ ID NO: 635 | HUMAN mRNA SEQUENCE |
| hP13-034.2 | SEQ ID NO: 636 | HUMAN PROTEIN SEQUENCE |
| hR13-034.3 | SEQ ID NO: 637 | HUMAN mRNA SEQUENCE |
| hP13-034.3 | SEQ ID NO: 638 | HUMAN PROTEIN SEQUENCE |
| hR13-034.4 | SEQ ID NO: 639 | HUMAN mRNA SEQUENCE |
| hP13-034.4 | SEQ ID NO: 640 | HUMAN PROTEIN SEQUENCE |
| mD13-048 | SEQ ID NO: 641 | MOUSE GENOMIC SEQUENCE |
| mR13-048.1 | SEQ ID NO: 642 | MOUSE mRNA SEQUENCE |
| mP13-048.1 | SEQ ID NO: 643 | MOUSE PROTEIN SEQUENCE |
| hD13-048 | SEQ ID NO: 644 | HUMAN GENOMIC SEQUENCE |
| hR13-048.1 | SEQ ID NO: 645 | HUMAN mRNA SEQUENCE |
| hP13-048.1 | SEQ ID NO: 646 | HUMAN PROTEIN SEQUENCE |
| hR13-048.2 | SEQ ID NO: 647 | HUMAN mRNA SEQUENCE |
| hP13-048.2 | SEQ ID NO: 648 | HUMAN PROTEIN SEQUENCE |
| hR13-048.3 | SEQ ID NO: 649 | HUMAN mRNA SEQUENCE |
| hP13-048.3 | SEQ ID NO: 650 | HUMAN PROTEIN SEQUENCE |
| mD13-050 | SEQ ID NO: 651 | MOUSE GENOMIC SEQUENCE |
| mR13-050.1 | SEQ ID NO: 652 | MOUSE mRNA SEQUENCE |
| mP13-050.1 | SEQ ID NO: 653 | MOUSE PROTEIN SEQUENCE |
| hD13-050 | SEQ ID NO: 654 | HUMAN GENOMIC SEQUENCE |
| hR13-050.1 | SEQ ID NO: 655 | HUMAN mRNA SEQUENCE |
| hP13-050.1 | SEQ ID NO: 656 | HUMAN PROTEIN SEQUENCE |
| mD13-054 | SEQ ID NO: 657 | MOUSE GENOMIC SEQUENCE |
| mR13-054.1 | SEQ ID NO: 658 | MOUSE mRNA SEQUENCE |
| mP13-054.1 | SEQ ID NO: 659 | MOUSE PROTEIN SEQUENCE |
| hD13-054 | SEQ ID NO: 660 | HUMAN GENOMIC SEQUENCE |
| hR13-054.1 | SEQ ID NO: 661 | HUMAN mRNA SEQUENCE |
| hP13-054.1 | SEQ ID NO: 662 | HUMAN PROTEIN SEQUENCE |
| hR13-054.2 | SEQ ID NO: 663 | HUMAN mRNA SEQUENCE |
| hP13-054.2 | SEQ ID NO: 664 | HUMAN PROTEIN SEQUENCE |
| mD13-058 | SEQ ID NO: 665 | MOUSE GENOMIC SEQUENCE |
| mR13-058.1 | SEQ ID NO: 666 | MOUSE mRNA SEQUENCE |
| mP13-058.1 | SEQ ID NO: 667 | MOUSE PROTEIN SEQUENCE |
| hD13-058 | SEQ ID NO: 668 | HUMAN GENOMIC SEQUENCE |
| hR13-058.1 | SEQ ID NO: 669 | HUMAN mRNA SEQUENCE |
| hP13-058.1 | SEQ ID NO: 670 | HUMAN PROTEIN SEQUENCE |
| mD13-063 | SEQ ID NO: 671 | MOUSE GENOMIC SEQUENCE |
| mR13-063.1 | SEQ ID NO: 672 | MOUSE mRNA SEQUENCE |
| mP13-063.1 | SEQ ID NO: 673 | MOUSE PROTEIN SEQUENCE |
| hD13-063 | SEQ ID NO: 674 | HUMAN GENOMIC SEQUENCE |
| hR13-063.1 | SEQ ID NO: 675 | HUMAN mRNA SEQUENCE |
| hP13-063.1 | SEQ ID NO: 676 | HUMAN PROTEIN SEQUENCE |
| hR13-063.2 | SEQ ID NO: 677 | HUMAN mRNA SEQUENCE |
| hP13-063.2 | SEQ ID NO: 678 | HUMAN PROTEIN SEQUENCE |
| hR13-063.3 | SEQ ID NO: 679 | HUMAN mRNA SEQUENCE |
| hP13-063.3 | SEQ ID NO: 680 | HUMAN PROTEIN SEQUENCE |
| mD13-067 | SEQ ID NO: 681 | MOUSE GENOMIC SEQUENCE |
| mR13-067.1 | SEQ ID NO: 682 | MOUSE mRNA SEQUENCE |
| mP13-067.1 | SEQ ID NO: 683 | MOUSE PROTEIN SEQUENCE |
| mR13-067.2 | SEQ ID NO: 684 | MOUSE mRNA SEQUENCE |
| mP13-067.2 | SEQ ID NO: 685 | MOUSE PROTEIN SEQUENCE |
| hD13-067 | SEQ ID NO: 686 | HUMAN GENOMIC SEQUENCE |
| hR13-067.1 | SEQ ID NO: 687 | HUMAN mRNA SEQUENCE |
| hP13-067.1 | SEQ ID NO: 688 | HUMAN PROTEIN SEQUENCE |
| hR13-067.2 | SEQ ID NO: 689 | HUMAN mRNA SEQUENCE |
| hP13-067.2 | SEQ ID NO: 690 | HUMAN PROTEIN SEQUENCE |
| hR13-067.3 | SEQ ID NO: 691 | HUMAN mRNA SEQUENCE |
| hP13-067.3 | SEQ ID NO: 692 | HUMAN PROTEIN SEQUENCE |
| hR13-067.4 | SEQ ID NO: 693 | HUMAN mRNA SEQUENCE |
| hP13-067.4 | SEQ ID NO: 694 | HUMAN PROTEIN SEQUENCE |
| hR13-067.5 | SEQ ID NO: 695 | HUMAN mRNA SEQUENCE |
| hP13-067.5 | SEQ ID NO: 696 | HUMAN PROTEIN SEQUENCE |
| mD13-071 | SEQ ID NO: 697 | MOUSE GENOMIC SEQUENCE |
| mR13-071.1 | SEQ ID NO: 698 | MOUSE mRNA SEQUENCE |
| mP13-071.1 | SEQ ID NO: 699 | MOUSE PROTEIN SEQUENCE |
| hD13-071 | SEQ ID NO: 700 | HUMAN GENOMIC SEQUENCE |
| hR13-071.1 | SEQ ID NO: 701 | HUMAN mRNA SEQUENCE |
| hP13-071.1 | SEQ ID NO: 702 | HUMAN PROTEIN SEQUENCE |
| hR13-071.2 | SEQ ID NO: 703 | HUMAN mRNA SEQUENCE |
| hP13-071.2 | SEQ ID NO: 704 | HUMAN PROTEIN SEQUENCE |
| hR13-071.3 | SEQ ID NO: 705 | HUMAN mRNA SEQUENCE |
| hP13-071.3 | SEQ ID NO: 706 | HUMAN PROTEIN SEQUENCE |
| hR13-071.4 | SEQ ID NO: 707 | HUMAN mRNA SEQUENCE |
| hP13-071.4 | SEQ ID NO: 708 | HUMAN PROTEIN SEQUENCE |
| mD13-078 | SEQ ID NO: 709 | MOUSE GENOMIC SEQUENCE |
| mR13-078.1 | SEQ ID NO: 710 | MOUSE mRNA SEQUENCE |
| mP13-078.1 | SEQ ID NO: 711 | MOUSE PROTEIN SEQUENCE |
| hD13-078 | SEQ ID NO: 712 | HUMAN GENOMIC SEQUENCE |
| hR13-078.1 | SEQ ID NO: 713 | HUMAN mRNA SEQUENCE |
| hP13-078.1 | SEQ ID NO: 714 | HUMAN PROTEIN SEQUENCE |
| hR13-078.2 | SEQ ID NO: 715 | HUMAN mRNA SEQUENCE |
| hP13-078.2 | SEQ ID NO: 716 | HUMAN PROTEIN SEQUENCE |
| mD13-082 | SEQ ID NO: 717 | MOUSE GENOMIC SEQUENCE |
| mR13-082.1 | SEQ ID NO: 718 | MOUSE mRNA SEQUENCE |
| mP13-082.1 | SEQ ID NO: 719 | MOUSE PROTEIN SEQUENCE |
| hD13-082 | SEQ ID NO: 720 | HUMAN GENOMIC SEQUENCE |
| hR13-082.1 | SEQ ID NO: 721 | HUMAN mRNA SEQUENCE |
| hP13-082.1 | SEQ ID NO: 722 | HUMAN PROTEIN SEQUENCE |
| mD13-086 | SEQ ID NO: 723 | MOUSE GENOMIC SEQUENCE |
| mR13-086.1 | SEQ ID NO: 724 | MOUSE mRNA SEQUENCE |
| mP13-086.1 | SEQ ID NO: 725 | MOUSE PROTEIN SEQUENCE |
| mR13-086.2 | SEQ ID NO: 726 | MOUSE mRNA SEQUENCE |
| mP13-086.2 | SEQ ID NO: 727 | MOUSE PROTEIN SEQUENCE |
| mR13-086.3 | SEQ ID NO: 728 | MOUSE mRNA SEQUENCE |
| mP13-086.3 | SEQ ID NO: 729 | MOUSE PROTEIN SEQUENCE |
| mR13-086.4 | SEQ ID NO: 730 | MOUSE mRNA SEQUENCE |
| mP13-086.4 | SEQ ID NO: 731 | MOUSE PROTEIN SEQUENCE |
| hD13-086 | SEQ ID NO: 732 | HUMAN GENOMIC SEQUENCE |
| hR13-086.1 | SEQ ID NO: 733 | HUMAN mRNA SEQUENCE |
| hP13-086.1 | SEQ ID NO: 734 | HUMAN PROTEIN SEQUENCE |
| hR13-086.2 | SEQ ID NO: 735 | HUMAN mRNA SEQUENCE |
| hP13-086.2 | SEQ ID NO: 736 | HUMAN PROTEIN SEQUENCE |
| mD13-090 | SEQ ID NO: 737 | MOUSE GENOMIC SEQUENCE |
| mR13-090.1 | SEQ ID NO: 738 | MOUSE mRNA SEQUENCE |
| mP13-090.1 | SEQ ID NO: 739 | MOUSE PROTEIN SEQUENCE |
| mR13-090.2 | SEQ ID NO: 740 | MOUSE mRNA SEQUENCE |
| mP13-090.2 | SEQ ID NO: 741 | MOUSE PROTEIN SEQUENCE |
| mD13-090 | SEQ ID NO: 742 | MOUSE GENOMIC SEQUENCE |
| mR13-090.1 | SEQ ID NO: 743 | MOUSE mRNA SEQUENCE |
| mP13-090.1 | SEQ ID NO: 744 | MOUSE PROTEIN SEQUENCE |
| mR13-090.2 | SEQ ID NO: 745 | MOUSE mRNA SEQUENCE |
| mP13-090.2 | SEQ ID NO: 746 | MOUSE PROTEIN SEQUENCE |
| mR13-090.3 | SEQ ID NO: 747 | MOUSE mRNA SEQUENCE |
| mP13-090.3 | SEQ ID NO: 748 | MOUSE PROTEIN SEQUENCE |
| hD13-090 | SEQ ID NO: 749 | HUMAN GENOMIC SEQUENCE |
| hR13-090.1 | SEQ ID NO: 750 | HUMAN mRNA SEQUENCE |
| hP13-090.1 | SEQ ID NO: 751 | HUMAN PROTEIN SEQUENCE |
| hR13-090.2 | SEQ ID NO: 752 | HUMAN mRNA SEQUENCE |
| hP13-090.2 | SEQ ID NO: 753 | HUMAN PROTEIN SEQUENCE |
| hR13-090.3 | SEQ ID NO: 754 | HUMAN mRNA SEQUENCE |
| hP13-090.3 | SEQ ID NO: 755 | HUMAN PROTEIN SEQUENCE |
| hR13-090.4 | SEQ ID NO: 756 | HUMAN mRNA SEQUENCE |
| hP13-090.4 | SEQ ID NO: 757 | HUMAN PROTEIN SEQUENCE |
| hR13-090.5 | SEQ ID NO: 758 | HUMAN mRNA SEQUENCE |
| hP13-090.5 | SEQ ID NO: 759 | HUMAN PROTEIN SEQUENCE |
| mD13-091 | SEQ ID NO: 760 | MOUSE GENOMIC SEQUENCE |
| mR13-091.1 | SEQ ID NO: 761 | MOUSE mRNA SEQUENCE |
| mP13-091.1 | SEQ ID NO: 762 | MOUSE PROTEIN SEQUENCE |
| hD13-091 | SEQ ID NO: 763 | HUMAN GENOMIC SEQUENCE |
| hR13-091.1 | SEQ ID NO: 764 | HUMAN mRNA SEQUENCE |
| hP13-091.1 | SEQ ID NO: 765 | HUMAN PROTEIN SEQUENCE |
| hR13-091.2 | SEQ ID NO: 766 | HUMAN mRNA SEQUENCE |
| hP13-091.2 | SEQ ID NO: 767 | HUMAN PROTEIN SEQUENCE |
| hR13-091.3 | SEQ ID NO: 768 | HUMAN mRNA SEQUENCE |
| hP13-091.3 | SEQ ID NO: 769 | HUMAN PROTEIN SEQUENCE |
| hR13-091.4 | SEQ ID NO: 770 | HUMAN mRNA SEQUENCE |
| hP13-091.4 | SEQ ID NO: 771 | HUMAN PROTEIN SEQUENCE |
| mD13-094 | SEQ ID NO: 772 | MOUSE GENOMIC SEQUENCE |
| mR13-094.1 | SEQ ID NO: 773 | MOUSE mRNA SEQUENCE |
| mP13-094.1 | SEQ ID NO: 774 | MOUSE PROTEIN SEQUENCE |
| hD13-094 | SEQ ID NO: 775 | HUMAN GENOMIC SEQUENCE |
| hR13-094.1 | SEQ ID NO: 776 | HUMAN mRNA SEQUENCE |
| hP13-094.1 | SEQ ID NO: 777 | HUMAN PROTEIN SEQUENCE |
| mD13-103 | SEQ ID NO: 778 | MOUSE GENOMIC SEQUENCE |
| mR13-103.1 | SEQ ID NO: 779 | MOUSE mRNA SEQUENCE |
| mP13-103.1 | SEQ ID NO: 780 | MOUSE PROTEIN SEQUENCE |
| mR13-103.2 | SEQ ID NO: 781 | MOUSE mRNA SEQUENCE |
| mP13-103.2 | SEQ ID NO: 782 | MOUSE PROTEIN SEQUENCE |
| mR13-103.3 | SEQ ID NO: 783 | MOUSE mRNA SEQUENCE |
| mP13-103.3 | SEQ ID NO: 784 | MOUSE PROTEIN SEQUENCE |
| hD13-103 | SEQ ID NO: 785 | HUMAN GENOMIC SEQUENCE |
| hR13-103.1 | SEQ ID NO: 786 | HUMAN mRNA SEQUENCE |
| hP13-103.1 | SEQ ID NO: 787 | HUMAN PROTEIN SEQUENCE |
| hR13-103.2 | SEQ ID NO: 788 | HUMAN mRNA SEQUENCE |
| hP13-103.2 | SEQ ID NO: 789 | HUMAN PROTEIN SEQUENCE |
| hR13-103.3 | SEQ ID NO: 790 | HUMAN mRNA SEQUENCE |
| hP13-103.3 | SEQ ID NO: 791 | HUMAN PROTEIN SEQUENCE |
| mD13-113 | SEQ ID NO: 792 | MOUSE GENOMIC SEQUENCE |
| mR13-113.1 | SEQ ID NO: 793 | MOUSE mRNA SEQUENCE |
| mP13-113.1 | SEQ ID NO: 794 | MOUSE PROTEIN SEQUENCE |
| hD13-113 | SEQ ID NO: 795 | HUMAN GENOMIC SEQUENCE |
| hR13-113.1 | SEQ ID NO: 796 | HUMAN mRNA SEQUENCE |
| hP13-113.1 | SEQ ID NO: 797 | HUMAN PROTEIN SEQUENCE |
| hR13-113.2 | SEQ ID NO: 798 | HUMAN mRNA SEQUENCE |
| hP13-113.2 | SEQ ID NO: 799 | HUMAN PROTEIN SEQUENCE |
| hR13-113.3 | SEQ ID NO: 800 | HUMAN mRNA SEQUENCE |
| hP13-113.3 | SEQ ID NO: 801 | HUMAN PROTEIN SEQUENCE |
| hR13-113.4 | SEQ ID NO: 802 | HUMAN mRNA SEQUENCE |
| hP13-113.4 | SEQ ID NO: 803 | HUMAN PROTEIN SEQUENCE |
| hR13-113.5 | SEQ ID NO: 804 | HUMAN mRNA SEQUENCE |
| hP13-113.5 | SEQ ID NO: 805 | HUMAN PROTEIN SEQUENCE |
| hR13-113.6 | SEQ ID NO: 806 | HUMAN mRNA SEQUENCE |
| hP13-113.6 | SEQ ID NO: 807 | HUMAN PROTEIN SEQUENCE |
| hR13-113.7 | SEQ ID NO: 808 | HUMAN mRNA SEQUENCE |
| hP13-113.7 | SEQ ID NO: 809 | HUMAN PROTEIN SEQUENCE |
| mD14-007 | SEQ ID NO: 810 | MOUSE GENOMIC SEQUENCE |
| mR14-007.1 | SEQ ID NO: 811 | MOUSE mRNA SEQUENCE |
| mP14-007.1 | SEQ ID NO: 812 | MOUSE PROTEIN SEQUENCE |
| hD14-007 | SEQ ID NO: 813 | HUMAN GENOMIC SEQUENCE |
| hR14-007.1 | SEQ ID NO: 814 | HUMAN mRNA SEQUENCE |
| hP14-007.1 | SEQ ID NO: 815 | HUMAN PROTEIN SEQUENCE |
| mD14-010 | SEQ ID NO: 816 | MOUSE GENOMIC SEQUENCE |
| mR14-010.1 | SEQ ID NO: 817 | MOUSE mRNA SEQUENCE |
| mP14-010.1 | SEQ ID NO: 818 | MOUSE PROTEIN SEQUENCE |
| hD14-010 | SEQ ID NO: 819 | HUMAN GENOMIC SEQUENCE |
| hR14-010.1 | SEQ ID NO: 820 | HUMAN mRNA SEQUENCE |
| hP14-010.1 | SEQ ID NO: 821 | HUMAN PROTEIN SEQUENCE |
| hR14-010.2 | SEQ ID NO: 822 | HUMAN mRNA SEQUENCE |
| hP14-010.2 | SEQ ID NO: 823 | HUMAN PROTEIN SEQUENCE |
| mD14-012 | SEQ ID NO: 824 | MOUSE GENOMIC SEQUENCE |
| mR14-012.1 | SEQ ID NO: 825 | MOUSE mRNA SEQUENCE |
| mP14-012.1 | SEQ ID NO: 826 | MOUSE PROTEIN SEQUENCE |
| mR14-012.2 | SEQ ID NO: 827 | MOUSE mRNA SEQUENCE |
| mP14-012.2 | SEQ ID NO: 828 | MOUSE PROTEIN SEQUENCE |
| hD14-012 | SEQ ID NO: 829 | HUMAN GENOMIC SEQUENCE |
| hR14-012.1 | SEQ ID NO: 830 | HUMAN mRNA SEQUENCE |
| hP14-012.1 | SEQ ID NO: 831 | HUMAN PROTEIN SEQUENCE |
| hR14-012.2 | SEQ ID NO: 832 | HUMAN mRNA SEQUENCE |
| hP14-012.2 | SEQ ID NO: 833 | HUMAN PROTEIN SEQUENCE |
| mD14-013 | SEQ ID NO: 834 | MOUSE GENOMIC SEQUENCE |
| mR14-013.1 | SEQ ID NO: 835 | MOUSE mRNA SEQUENCE |
| mP14-013.1 | SEQ ID NO: 836 | MOUSE PROTEIN SEQUENCE |
| hD14-013 | SEQ ID NO: 837 | HUMAN GENOMIC SEQUENCE |
| hR14-013.1 | SEQ ID NO: 838 | HUMAN mRNA SEQUENCE |
| hP14-013.1 | SEQ ID NO: 839 | HUMAN PROTEIN SEQUENCE |
| hR14-013.2 | SEQ ID NO: 840 | HUMAN mRNA SEQUENCE |
| hP14-013.2 | SEQ ID NO: 841 | HUMAN PROTEIN SEQUENCE |
| hR14-013.3 | SEQ ID NO: 842 | HUMAN mRNA SEQUENCE |
| hP14-013.3 | SEQ ID NO: 843 | HUMAN PROTEIN SEQUENCE |
| hR14-013.4 | SEQ ID NO: 844 | HUMAN mRNA SEQUENCE |
| hP14-013.4 | SEQ ID NO: 845 | HUMAN PROTEIN SEQUENCE |
| hR14-013.5 | SEQ ID NO: 846 | HUMAN mRNA SEQUENCE |
| hP14-013.5 | SEQ ID NO: 847 | HUMAN PROTEIN SEQUENCE |
| mD14-016 | SEQ ID NO: 848 | MOUSE GENOMIC SEQUENCE |
| mR14-016.1 | SEQ ID NO: 849 | MOUSE mRNA SEQUENCE |
| mP14-016.1 | SEQ ID NO: 850 | MOUSE PROTEIN SEQUENCE |
| hD14-016 | SEQ ID NO: 851 | HUMAN GENOMIC SEQUENCE |
| hR14-016.1 | SEQ ID NO: 852 | HUMAN mRNA SEQUENCE |
| hP14-016.1 | SEQ ID NO: 853 | HUMAN PROTEIN SEQUENCE |
| hR14-016.2 | SEQ ID NO: 854 | HUMAN mRNA SEQUENCE |
| hP14-016.2 | SEQ ID NO: 855 | HUMAN PROTEIN SEQUENCE |
| mD14-017 | SEQ ID NO: 856 | MOUSE GENOMIC SEQUENCE |
| mR14-017.1 | SEQ ID NO: 857 | MOUSE mRNA SEQUENCE |
| mP14-017.1 | SEQ ID NO: 858 | MOUSE PROTEIN SEQUENCE |
| hD14-017 | SEQ ID NO: 859 | HUMAN GENOMIC SEQUENCE |
| hR14-017.1 | SEQ ID NO: 860 | HUMAN mRNA SEQUENCE |
| hP14-017.1 | SEQ ID NO: 861 | HUMAN PROTEIN SEQUENCE |
| hR14-017.2 | SEQ ID NO: 862 | HUMAN mRNA SEQUENCE |
| hP14-017.2 | SEQ ID NO: 863 | HUMAN PROTEIN SEQUENCE |
| mD14-019 | SEQ ID NO: 864 | MOUSE GENOMIC SEQUENCE |
| mR14-019.1 | SEQ ID NO: 865 | MOUSE mRNA SEQUENCE |
| mP14-019.1 | SEQ ID NO: 866 | MOUSE PROTEIN SEQUENCE |
| mR14-019.2 | SEQ ID NO: 867 | MOUSE mRNA SEQUENCE |
| mP14-019.2 | SEQ ID NO: 868 | MOUSE PROTEIN SEQUENCE |
| hD14-019 | SEQ ID NO: 869 | HUMAN GENOMIC SEQUENCE |
| hR14-019.1 | SEQ ID NO: 870 | HUMAN mRNA SEQUENCE |
| hP14-019.1 | SEQ ID NO: 871 | HUMAN PROTEIN SEQUENCE |
| hR14-019.2 | SEQ ID NO: 872 | HUMAN mRNA SEQUENCE |
| hP14-019.2 | SEQ ID NO: 873 | HUMAN PROTEIN SEQUENCE |
| hR14-019.3 | SEQ ID NO: 874 | HUMAN mRNA SEQUENCE |
| hP14-019.3 | SEQ ID NO: 875 | HUMAN PROTEIN SEQUENCE |
| hR14-019.4 | SEQ ID NO: 876 | HUMAN mRNA SEQUENCE |
| hP14-019.4 | SEQ ID NO: 877 | HUMAN PROTEIN SEQUENCE |
| hR14-019.5 | SEQ ID NO: 878 | HUMAN mRNA SEQUENCE |
| hP14-019.5 | SEQ ID NO: 879 | HUMAN PROTEIN SEQUENCE |
| hR14-019.6 | SEQ ID NO: 880 | HUMAN mRNA SEQUENCE |
| hP14-019.6 | SEQ ID NO: 881 | HUMAN PROTEIN SEQUENCE |
| mD14-020 | SEQ ID NO: 882 | MOUSE GENOMIC SEQUENCE |
| mR14-020.1 | SEQ ID NO: 883 | MOUSE mRNA SEQUENCE |
| mP14-020.1 | SEQ ID NO: 884 | MOUSE PROTEIN SEQUENCE |
| mR14-020.2 | SEQ ID NO: 885 | MOUSE mRNA SEQUENCE |
| mP14-020.2 | SEQ ID NO: 886 | MOUSE PROTEIN SEQUENCE |
| hD14-020 | SEQ ID NO: 887 | HUMAN GENOMIC SEQUENCE |
| hR14-020.1 | SEQ ID NO: 888 | HUMAN mRNA SEQUENCE |
| hP14-020.1 | SEQ ID NO: 889 | HUMAN PROTEIN SEQUENCE |
| hR14-020.2 | SEQ ID NO: 890 | HUMAN mRNA SEQUENCE |
| hP14-020.2 | SEQ ID NO: 891 | HUMAN PROTEIN SEQUENCE |
| hR14-020.3 | SEQ ID NO: 892 | HUMAN mRNA SEQUENCE |
| hP14-020.3 | SEQ ID NO: 893 | HUMAN PROTEIN SEQUENCE |
| hR14-020.4 | SEQ ID NO: 894 | HUMAN mRNA SEQUENCE |
| hP14-020.4 | SEQ ID NO: 895 | HUMAN PROTEIN SEQUENCE |
| hR14-020.5 | SEQ ID NO: 896 | HUMAN mRNA SEQUENCE |
| hP14-020.5 | SEQ ID NO: 897 | HUMAN PROTEIN SEQUENCE |
| hR14-020.6 | SEQ ID NO: 898 | HUMAN mRNA SEQUENCE |
| hP14-020.6 | SEQ ID NO: 899 | HUMAN PROTEIN SEQUENCE |
| hR14-020.7 | SEQ ID NO: 900 | HUMAN mRNA SEQUENCE |
| hP14-020.7 | SEQ ID NO: 901 | HUMAN PROTEIN SEQUENCE |
| mD14-024 | SEQ ID NO: 902 | MOUSE GENOMIC SEQUENCE |
| mR14-024.1 | SEQ ID NO: 903 | MOUSE mRNA SEQUENCE |
| mP14-024.1 | SEQ ID NO: 904 | MOUSE PROTEIN SEQUENCE |
| hD14-024 | SEQ ID NO: 905 | HUMAN GENOMIC SEQUENCE |
| hR14-024.1 | SEQ ID NO: 906 | HUMAN mRNA SEQUENCE |
| hP14-024.1 | SEQ ID NO: 907 | HUMAN PROTEIN SEQUENCE |
| hR14-024.2 | SEQ ID NO: 908 | HUMAN mRNA SEQUENCE |
| hP14-024.2 | SEQ ID NO: 909 | HUMAN PROTEIN SEQUENCE |
| hR14-024.3 | SEQ ID NO: 910 | HUMAN mRNA SEQUENCE |
| hP14-024.3 | SEQ ID NO: 911 | HUMAN PROTEIN SEQUENCE |
| hR14-024.4 | SEQ ID NO: 912 | HUMAN mRNA SEQUENCE |
| hP14-024.4 | SEQ ID NO: 913 | HUMAN PROTEIN SEQUENCE |
| mD14-031 | SEQ ID NO: 914 | MOUSE GENOMIC SEQUENCE |
| mR14-031.1 | SEQ ID NO: 915 | MOUSE mRNA SEQUENCE |
| mP14-031.1 | SEQ ID NO: 916 | MOUSE PROTEIN SEQUENCE |
| mR14-031.2 | SEQ ID NO: 917 | MOUSE mRNA SEQUENCE |
| mP14-031.2 | SEQ ID NO: 918 | MOUSE PROTEIN SEQUENCE |
| hD14-031 | SEQ ID NO: 919 | HUMAN GENOMIC SEQUENCE |
| hR14-031.1 | SEQ ID NO: 920 | HUMAN mRNA SEQUENCE |
| hP14-031.1 | SEQ ID NO: 921 | HUMAN PROTEIN SEQUENCE |
| hR14-031.2 | SEQ ID NO: 922 | HUMAN mRNA SEQUENCE |
| hP14-031.2 | SEQ ID NO: 923 | HUMAN PROTEIN SEQUENCE |
| mD14-038 | SEQ ID NO: 924 | MOUSE GENOMIC SEQUENCE |
| mR14-038.1 | SEQ ID NO: 925 | MOUSE mRNA SEQUENCE |
| mP14-038.1 | SEQ ID NO: 926 | MOUSE PROTEIN SEQUENCE |
| hD14-038 | SEQ ID NO: 927 | HUMAN GENOMIC SEQUENCE |
| hR14-038.1 | SEQ ID NO: 928 | HUMAN mRNA SEQUENCE |
| hP14-038.1 | SEQ ID NO: 929 | HUMAN PROTEIN SEQUENCE |
| mD15-002 | SEQ ID NO: 930 | MOUSE GENOMIC SEQUENCE |
| mR15-002.1 | SEQ ID NO: 931 | MOUSE mRNA SEQUENCE |
| mP15-002.1 | SEQ ID NO: 932 | MOUSE PROTEIN SEQUENCE |
| mR15-002.2 | SEQ ID NO: 933 | MOUSE mRNA SEQUENCE |
| mP15-002.2 | SEQ ID NO: 934 | MOUSE PROTEIN SEQUENCE |
| mR15-002.3 | SEQ ID NO: 935 | MOUSE mRNA SEQUENCE |
| mP15-002.3 | SEQ ID NO: 936 | MOUSE PROTEIN SEQUENCE |
| hD15-002 | SEQ ID NO: 937 | HUMAN GENOMIC SEQUENCE |
| hR15-002.1 | SEQ ID NO: 938 | HUMAN mRNA SEQUENCE |
| hP15-002.1 | SEQ ID NO: 939 | HUMAN PROTEIN SEQUENCE |
| hR15-002.2 | SEQ ID NO: 940 | HUMAN mRNA SEQUENCE |
| hP15-002.2 | SEQ ID NO: 941 | HUMAN PROTEIN SEQUENCE |
| hR15-002.3 | SEQ ID NO: 942 | HUMAN mRNA SEQUENCE |
| hP15-002.3 | SEQ ID NO: 943 | HUMAN PROTEIN SEQUENCE |
| hR15-002.4 | SEQ ID NO: 944 | HUMAN mRNA SEQUENCE |
| hP15-002.4 | SEQ ID NO: 945 | HUMAN PROTEIN SEQUENCE |
| hR15-002.5 | SEQ ID NO: 946 | HUMAN mRNA SEQUENCE |
| hP15-002.5 | SEQ ID NO: 947 | HUMAN PROTEIN SEQUENCE |
| mD15-009 | SEQ ID NO: 948 | MOUSE GENOMIC SEQUENCE |
| mR15-009.1 | SEQ ID NO: 949 | MOUSE mRNA SEQUENCE |
| mP15-009.1 | SEQ ID NO: 950 | MOUSE PROTEIN SEQUENCE |
| hD15-009 | SEQ ID NO: 951 | HUMAN GENOMIC SEQUENCE |
| hR15-009.1 | SEQ ID NO: 952 | HUMAN mRNA SEQUENCE |
| hP15-009.1 | SEQ ID NO: 953 | HUMAN PROTEIN SEQUENCE |
| hR15-009.2 | SEQ ID NO: 954 | HUMAN mRNA SEQUENCE |
| hP15-009.2 | SEQ ID NO: 955 | HUMAN PROTEIN SEQUENCE |
| hR15-009.3 | SEQ ID NO: 956 | HUMAN mRNA SEQUENCE |
| hP15-009.3 | SEQ ID NO: 957 | HUMAN PROTEIN SEQUENCE |
| mD15-010 | SEQ ID NO: 958 | MOUSE GENOMIC SEQUENCE |
| mR15-010.1 | SEQ ID NO: 959 | MOUSE mRNA SEQUENCE |
| mP15-010.1 | SEQ ID NO: 960 | MOUSE PROTEIN SEQUENCE |
| hD15-010 | SEQ ID NO: 961 | HUMAN GENOMIC SEQUENCE |
| hR15-010.1 | SEQ ID NO: 962 | HUMAN mRNA SEQUENCE |
| hP15-010.1 | SEQ ID NO: 963 | HUMAN PROTEIN SEQUENCE |
| hR15-010.2 | SEQ ID NO: 964 | HUMAN mRNA SEQUENCE |
| hP15-010.2 | SEQ ID NO: 965 | HUMAN PROTEIN SEQUENCE |
| hR15-010.3 | SEQ ID NO: 966 | HUMAN mRNA SEQUENCE |
| hP15-010.3 | SEQ ID NO: 967 | HUMAN PROTEIN SEQUENCE |
| mD15-011 | SEQ ID NO: 968 | MOUSE GENOMIC SEQUENCE |
| mR15-011.1 | SEQ ID NO: 969 | MOUSE mRNA SEQUENCE |
| mP15-011.1 | SEQ ID NO: 970 | MOUSE PROTEIN SEQUENCE |
| hD15-011 | SEQ ID NO: 971 | HUMAN GENOMIC SEQUENCE |
| hR15-011.1 | SEQ ID NO: 972 | HUMAN mRNA SEQUENCE |
| hP15-011.1 | SEQ ID NO: 973 | HUMAN PROTEIN SEQUENCE |
| hR15-011.2 | SEQ ID NO: 974 | HUMAN mRNA SEQUENCE |
| hP15-011.2 | SEQ ID NO: 975 | HUMAN PROTEIN SEQUENCE |
| hR15-011.3 | SEQ ID NO: 976 | HUMAN mRNA SEQUENCE |
| hP15-011.3 | SEQ ID NO: 977 | HUMAN PROTEIN SEQUENCE |
| hR15-011.4 | SEQ ID NO: 978 | HUMAN mRNA SEQUENCE |
| hP15-011.4 | SEQ ID NO: 979 | HUMAN PROTEIN SEQUENCE |
| mD15-019 | SEQ ID NO: 980 | MOUSE GENOMIC SEQUENCE |
| mR15-019.1 | SEQ ID NO: 981 | MOUSE mRNA SEQUENCE |
| mP15-019.1 | SEQ ID NO: 982 | MOUSE PROTEIN SEQUENCE |
| hD15-019 | SEQ ID NO: 983 | HUMAN GENOMIC SEQUENCE |
| hR15-019.1 | SEQ ID NO: 984 | HUMAN mRNA SEQUENCE |
| hP15-019.1 | SEQ ID NO: 985 | HUMAN PROTEIN SEQUENCE |
| hR15-019.2 | SEQ ID NO: 986 | HUMAN mRNA SEQUENCE |
| hP15-019.2 | SEQ ID NO: 987 | HUMAN PROTEIN SEQUENCE |
| hR15-019.3 | SEQ ID NO: 988 | HUMAN mRNA SEQUENCE |
| hP15-019.3 | SEQ ID NO: 989 | HUMAN PROTEIN SEQUENCE |
| hR15-019.4 | SEQ ID NO: 990 | HUMAN mRNA SEQUENCE |
| hP15-019.4 | SEQ ID NO: 991 | HUMAN PROTEIN SEQUENCE |
| mD15-020 | SEQ ID NO: 992 | MOUSE GENOMIC SEQUENCE |
| mR15-020.1 | SEQ ID NO: 993 | MOUSE mRNA SEQUENCE |
| mP15-020.1 | SEQ ID NO: 994 | MOUSE PROTEIN SEQUENCE |
| hD15-020 | SEQ ID NO: 995 | HUMAN GENOMIC SEQUENCE |
| hR15-020.1 | SEQ ID NO: 996 | HUMAN mRNA SEQUENCE |
| hP15-020.1 | SEQ ID NO: 997 | HUMAN PROTEIN SEQUENCE |
| hR15-020.2 | SEQ ID NO: 998 | HUMAN mRNA SEQUENCE |
| hP15-020.2 | SEQ ID NO: 999 | HUMAN PROTEIN SEQUENCE |
| hR15-020.3 | SEQ ID NO: 1000 | HUMAN mRNA SEQUENCE |
| hP15-020.3 | SEQ ID NO: 1001 | HUMAN PROTEIN SEQUENCE |
| mD16-003 | SEQ ID NO: 1002 | MOUSE GENOMIC SEQUENCE |
| mR16-003.1 | SEQ ID NO: 1003 | MOUSE mRNA SEQUENCE |
| mP16-003.1 | SEQ ID NO: 1004 | MOUSE PROTEIN SEQUENCE |
| hD16-003 | SEQ ID NO: 1005 | HUMAN GENOMIC SEQUENCE |
| hR16-003.1 | SEQ ID NO: 1006 | HUMAN mRNA SEQUENCE |
| hP16-003.1 | SEQ ID NO: 1007 | HUMAN PROTEIN SEQUENCE |
| hR16-003.2 | SEQ ID NO: 1008 | HUMAN mRNA SEQUENCE |
| hP16-003.2 | SEQ ID NO: 1009 | HUMAN PROTEIN SEQUENCE |
| hR16-003.3 | SEQ ID NO: 1010 | HUMAN mRNA SEQUENCE |
| hP16-003.3 | SEQ ID NO: 1011 | HUMAN PROTEIN SEQUENCE |
| hR16-003.4 | SEQ ID NO: 1012 | HUMAN mRNA SEQUENCE |
| hP16-003.4 | SEQ ID NO: 1013 | HUMAN PROTEIN SEQUENCE |
| hR16-003.5 | SEQ ID NO: 1014 | HUMAN mRNA SEQUENCE |
| hP16-003.5 | SEQ ID NO: 1015 | HUMAN PROTEIN SEQUENCE |
| mD16-005 | SEQ ID NO: 1016 | MOUSE GENOMIC SEQUENCE |
| mR16-005.1 | SEQ ID NO: 1017 | MOUSE mRNA SEQUENCE |
| mP16-005.1 | SEQ ID NO: 1018 | MOUSE PROTEIN SEQUENCE |
| hD16-005 | SEQ ID NO: 1019 | HUMAN GENOMIC SEQUENCE |
| hR16-005.1 | SEQ ID NO: 1020 | HUMAN mRNA SEQUENCE |
| hP16-005.1 | SEQ ID NO: 1021 | HUMAN PROTEIN SEQUENCE |
| hR16-005.2 | SEQ ID NO: 1022 | HUMAN mRNA SEQUENCE |
| hP16-005.2 | SEQ ID NO: 1023 | HUMAN PROTEIN SEQUENCE |
| hR16-005.3 | SEQ ID NO: 1024 | HUMAN mRNA SEQUENCE |
| hP16-005.3 | SEQ ID NO: 1025 | HUMAN PROTEIN SEQUENCE |
| mD16-006 | SEQ ID NO: 1026 | MOUSE GENOMIC SEQUENCE |
| mR16-006.1 | SEQ ID NO: 1027 | MOUSE mRNA SEQUENCE |
| mP16-006.1 | SEQ ID NO: 1028 | MOUSE PROTEIN SEQUENCE |
| hD16-006 | SEQ ID NO: 1029 | HUMAN GENOMIC SEQUENCE |
| hR16-006.1 | SEQ ID NO: 1030 | HUMAN mRNA SEQUENCE |
| hP16-006.1 | SEQ ID NO: 1031 | HUMAN PROTEIN SEQUENCE |
| mD16-007 | SEQ ID NO: 1032 | MOUSE GENOMIC SEQUENCE |
| mR16-007.1 | SEQ ID NO: 1033 | MOUSE mRNA SEQUENCE |
| mP16-007.1 | SEQ ID NO: 1034 | MOUSE PROTEIN SEQUENCE |
| hD16-007 | SEQ ID NO: 1035 | HUMAN GENOMIC SEQUENCE |
| hR16-007.1 | SEQ ID NO: 1036 | HUMAN mRNA SEQUENCE |
| hP16-007.1 | SEQ ID NO: 1037 | HUMAN PROTEIN SEQUENCE |
| hR16-007.2 | SEQ ID NO: 1038 | HUMAN mRNA SEQUENCE |
| hP16-007.2 | SEQ ID NO: 1039 | HUMAN PROTEIN SEQUENCE |
| hR16-007.3 | SEQ ID NO: 1040 | HUMAN mRNA SEQUENCE |
| hP16-007.3 | SEQ ID NO: 1041 | HUMAN PROTEIN SEQUENCE |
| hR16-007.4 | SEQ ID NO: 1042 | HUMAN mRNA SEQUENCE |
| hP16-007.4 | SEQ ID NO: 1043 | HUMAN PROTEIN SEQUENCE |
| mD16-008 | SEQ ID NO: 1044 | MOUSE GENOMIC SEQUENCE |
| mR16-008.1 | SEQ ID NO: 1045 | MOUSE mRNA SEQUENCE |
| mP16-008.1 | SEQ ID NO: 1046 | MOUSE PROTEIN SEQUENCE |
| hD16-008 | SEQ ID NO: 1047 | HUMAN GENOMIC SEQUENCE |
| hR16-008.1 | SEQ ID NO: 1048 | HUMAN mRNA SEQUENCE |
| hP16-008.1 | SEQ ID NO: 1049 | HUMAN PROTEIN SEQUENCE |
| mD16-009 | SEQ ID NO: 1050 | MOUSE GENOMIC SEQUENCE |
| mR16-009.1 | SEQ ID NO: 1051 | MOUSE mRNA SEQUENCE |
| mP16-009.1 | SEQ ID NO: 1052 | MOUSE PROTEIN SEQUENCE |
| hD16-009 | SEQ ID NO: 1053 | HUMAN GENOMIC SEQUENCE |
| hR16-009.1 | SEQ ID NO: 1054 | HUMAN mRNA SEQUENCE |
| hP16-009.1 | SEQ ID NO: 1055 | HUMAN PROTEIN SEQUENCE |
| mD16-011 | SEQ ID NO: 1056 | MOUSE GENOMIC SEQUENCE |
| mR16-011.1 | SEQ ID NO: 1057 | MOUSE mRNA SEQUENCE |
| mP16-011.1 | SEQ ID NO: 1058 | MOUSE PROTEIN SEQUENCE |
| hD16-011 | SEQ ID NO: 1059 | HUMAN GENOMIC SEQUENCE |
| hR16-011.1 | SEQ ID NO: 1060 | HUMAN mRNA SEQUENCE |
| hP16-011.1 | SEQ ID NO: 1061 | HUMAN PROTEIN SEQUENCE |
| hR16-011.2 | SEQ ID NO: 1062 | HUMAN mRNA SEQUENCE |
| hP16-011.2 | SEQ ID NO: 1063 | HUMAN PROTEIN SEQUENCE |
| mD16-019 | SEQ ID NO: 1064 | MOUSE GENOMIC SEQUENCE |
| mR16-019.1 | SEQ ID NO: 1065 | MOUSE mRNA SEQUENCE |
| mP16-019.1 | SEQ ID NO: 1066 | MOUSE PROTEIN SEQUENCE |
| hD16-019 | SEQ ID NO: 1067 | HUMAN GENOMIC SEQUENCE |
| hR16-019.1 | SEQ ID NO: 1068 | HUMAN mRNA SEQUENCE |
| hP16-019.1 | SEQ ID NO: 1069 | HUMAN PROTEIN SEQUENCE |
| hR16-019.2 | SEQ ID NO: 1070 | HUMAN mRNA SEQUENCE |
| hP16-019.2 | SEQ ID NO: 1071 | HUMAN PROTEIN SEQUENCE |
| hR16-019.3 | SEQ ID NO: 1072 | HUMAN mRNA SEQUENCE |
| hP16-019.3 | SEQ ID NO: 1073 | HUMAN PROTEIN SEQUENCE |
| hR16-019.4 | SEQ ID NO: 1074 | HUMAN mRNA SEQUENCE |
| hP16-019.4 | SEQ ID NO: 1075 | HUMAN PROTEIN SEQUENCE |
| mD16-021 | SEQ ID NO: 1076 | MOUSE GENOMIC SEQUENCE |
| mR16-021.1 | SEQ ID NO: 1077 | MOUSE mRNA SEQUENCE |
| mP16-021.1 | SEQ ID NO: 1078 | MOUSE PROTEIN SEQUENCE |
| hD16-021 | SEQ ID NO: 1079 | HUMAN GENOMIC SEQUENCE |
| hR16-021.1 | SEQ ID NO: 1080 | HUMAN mRNA SEQUENCE |
| hP16-021.1 | SEQ ID NO: 1081 | HUMAN PROTEIN SEQUENCE |
| hR16-021.2 | SEQ ID NO: 1082 | HUMAN mRNA SEQUENCE |
| hP16-021.2 | SEQ ID NO: 1083 | HUMAN PROTEIN SEQUENCE |
| mD16-029 | SEQ ID NO: 1084 | MOUSE GENOMIC SEQUENCE |
| mR16-029.1 | SEQ ID NO: 1085 | MOUSE mRNA SEQUENCE |
| mP16-029.1 | SEQ ID NO: 1086 | MOUSE PROTEIN SEQUENCE |
| hD16-029 | SEQ ID NO: 1087 | HUMAN GENOMIC SEQUENCE |
| hR16-029.1 | SEQ ID NO: 1088 | HUMAN mRNA SEQUENCE |
| hP16-029.1 | SEQ ID NO: 1089 | HUMAN PROTEIN SEQUENCE |
| mD16-035 | SEQ ID NO: 1090 | MOUSE GENOMIC SEQUENCE |
| mR16-035.1 | SEQ ID NO: 1091 | MOUSE mRNA SEQUENCE |
| mP16-035.1 | SEQ ID NO: 1092 | MOUSE PROTEIN SEQUENCE |
| hD16-035 | SEQ ID NO: 1093 | HUMAN GENOMIC SEQUENCE |
| hR16-035.1 | SEQ ID NO: 1094 | HUMAN mRNA SEQUENCE |
| hP16-035.1 | SEQ ID NO: 1095 | HUMAN PROTEIN SEQUENCE |
| hR16-035.2 | SEQ ID NO: 1096 | HUMAN mRNA SEQUENCE |
| hP16-035.2 | SEQ ID NO: 1097 | HUMAN PROTEIN SEQUENCE |
| mD16-041 | SEQ ID NO: 1098 | MOUSE GENOMIC SEQUENCE |
| mR16-041.1 | SEQ ID NO: 1099 | MOUSE mRNA SEQUENCE |
| mP16-041.1 | SEQ ID NO: 1100 | MOUSE PROTEIN SEQUENCE |
| hD16-041 | SEQ ID NO: 1101 | HUMAN GENOMIC SEQUENCE |
| hR16-041.1 | SEQ ID NO: 1102 | HUMAN mRNA SEQUENCE |
| hP16-041.1 | SEQ ID NO: 1103 | HUMAN PROTEIN SEQUENCE |
| hR16-041.2 | SEQ ID NO: 1104 | HUMAN mRNA SEQUENCE |
| hP16-041.2 | SEQ ID NO: 1105 | HUMAN PROTEIN SEQUENCE |
| hR16-041.3 | SEQ ID NO: 1106 | HUMAN mRNA SEQUENCE |
| hP16-041.3 | SEQ ID NO: 1107 | HUMAN PROTEIN SEQUENCE |
| hR16-041.4 | SEQ ID NO: 1108 | HUMAN mRNA SEQUENCE |
| hP16-041.4 | SEQ ID NO: 1109 | HUMAN PROTEIN SEQUENCE |
| hR16-041.5 | SEQ ID NO: 1110 | HUMAN mRNA SEQUENCE |
| hP16-041.5 | SEQ ID NO: 1111 | HUMAN PROTEIN SEQUENCE |
| hR16-041.6 | SEQ ID NO: 1112 | HUMAN mRNA SEQUENCE |
| hP16-041.6 | SEQ ID NO: 1113 | HUMAN PROTEIN SEQUENCE |
| mD16-051 | SEQ ID NO: 1114 | MOUSE GENOMIC SEQUENCE |
| mR16-051.1 | SEQ ID NO: 1115 | MOUSE mRNA SEQUENCE |
| mP16-051.1 | SEQ ID NO: 1116 | MOUSE PROTEIN SEQUENCE |
| hD16-051 | SEQ ID NO: 1117 | HUMAN GENOMIC SEQUENCE |
| hR16-051.1 | SEQ ID NO: 1118 | HUMAN mRNA SEQUENCE |
| hP16-051.1 | SEQ ID NO: 1119 | HUMAN PROTEIN SEQUENCE |
| hR16-051.2 | SEQ ID NO: 1120 | HUMAN mRNA SEQUENCE |
| hP16-051.2 | SEQ ID NO: 1121 | HUMAN PROTEIN SEQUENCE |
| mD16-052 | SEQ ID NO: 1122 | MOUSE GENOMIC SEQUENCE |
| mR16-052.1 | SEQ ID NO: 1123 | MOUSE mRNA SEQUENCE |
| mP16-052.1 | SEQ ID NO: 1124 | MOUSE PROTEIN SEQUENCE |
| hD16-052 | SEQ ID NO: 1125 | HUMAN GENOMIC SEQUENCE |
| hR16-052.1 | SEQ ID NO: 1126 | HUMAN mRNA SEQUENCE |
| hP16-052.1 | SEQ ID NO: 1127 | HUMAN PROTEIN SEQUENCE |
| mD16-054 | SEQ ID NO: 1128 | MOUSE GENOMIC SEQUENCE |
| mR16-054.1 | SEQ ID NO: 1129 | MOUSE mRNA SEQUENCE |
| mP16-054.1 | SEQ ID NO: 1130 | MOUSE PROTEIN SEQUENCE |
| hD16-054 | SEQ ID NO: 1131 | HUMAN GENOMIC SEQUENCE |
| hR16-054.1 | SEQ ID NO: 1132 | HUMAN mRNA SEQUENCE |
| hP16-054.1 | SEQ ID NO: 1133 | HUMAN PROTEIN SEQUENCE |
| hR16-054.2 | SEQ ID NO: 1134 | HUMAN mRNA SEQUENCE |
| hP16-054.2 | SEQ ID NO: 1135 | HUMAN PROTEIN SEQUENCE |
| hR16-054.3 | SEQ ID NO: 1136 | HUMAN mRNA SEQUENCE |
| hP16-054.3 | SEQ ID NO: 1137 | HUMAN PROTEIN SEQUENCE |
| hR16-054.4 | SEQ ID NO: 1138 | HUMAN mRNA SEQUENCE |
| hP16-054.4 | SEQ ID NO: 1139 | HUMAN PROTEIN SEQUENCE |
| hR16-054.5 | SEQ ID NO: 1140 | HUMAN mRNA SEQUENCE |
| hP16-054.5 | SEQ ID NO: 1141 | HUMAN PROTEIN SEQUENCE |
| hR16-054.6 | SEQ ID NO: 1142 | HUMAN mRNA SEQUENCE |
| hP16-054.6 | SEQ ID NO: 1143 | HUMAN PROTEIN SEQUENCE |
| hR16-054.7 | SEQ ID NO: 1144 | HUMAN mRNA SEQUENCE |
| hP16-054.7 | SEQ ID NO: 1145 | HUMAN PROTEIN SEQUENCE |
| hR16-054.8 | SEQ ID NO: 1146 | HUMAN mRNA SEQUENCE |
| hP16-054.8 | SEQ ID NO: 1147 | HUMAN PROTEIN SEQUENCE |
| hR16-054.9 | SEQ ID NO: 1148 | HUMAN mRNA SEQUENCE |
| hP16-054.9 | SEQ ID NO: 1149 | HUMAN PROTEIN SEQUENCE |
| mD16-055 | SEQ ID NO: 1150 | MOUSE GENOMIC SEQUENCE |
| mR16-055.1 | SEQ ID NO: 1151 | MOUSE mRNA SEQUENCE |
| mP16-055.1 | SEQ ID NO: 1152 | MOUSE PROTEIN SEQUENCE |
| hD16-055 | SEQ ID NO: 1153 | HUMAN GENOMIC SEQUENCE |
| hR16-055.1 | SEQ ID NO: 1154 | HUMAN mRNA SEQUENCE |
| hP16-055.1 | SEQ ID NO: 1155 | HUMAN PROTEIN SEQUENCE |
| mD16-067 | SEQ ID NO: 1156 | MOUSE GENOMIC SEQUENCE |
| mR16-067.1 | SEQ ID NO: 1157 | MOUSE mRNA SEQUENCE |
| mP16-067.1 | SEQ ID NO: 1158 | MOUSE PROTEIN SEQUENCE |
| hD16-067 | SEQ ID NO: 1159 | HUMAN GENOMIC SEQUENCE |
| hR16-067.1 | SEQ ID NO: 1160 | HUMAN mRNA SEQUENCE |
| hP16-067.1 | SEQ ID NO: 1161 | HUMAN PROTEIN SEQUENCE |
| hR16-067.2 | SEQ ID NO: 1162 | HUMAN mRNA SEQUENCE |
| hP16-067.2 | SEQ ID NO: 1163 | HUMAN PROTEIN SEQUENCE |
| hR16-067.3 | SEQ ID NO: 1164 | HUMAN mRNA SEQUENCE |
| hP16-067.3 | SEQ ID NO: 1165 | HUMAN PROTEIN SEQUENCE |
| mD16-069 | SEQ ID NO: 1166 | MOUSE GENOMIC SEQUENCE |
| mR16-069.1 | SEQ ID NO: 1167 | MOUSE mRNA SEQUENCE |
| mP16-069.1 | SEQ ID NO: 1168 | MOUSE PROTEIN SEQUENCE |
| mR16-069.2 | SEQ ID NO: 1169 | MOUSE mRNA SEQUENCE |
| mP16-069.2 | SEQ ID NO: 1170 | MOUSE PROTEIN SEQUENCE |
| hD16-069 | SEQ ID NO: 1171 | HUMAN GENOMIC SEQUENCE |
| hR16-069.1 | SEQ ID NO: 1172 | HUMAN mRNA SEQUENCE |
| hP16-069.1 | SEQ ID NO: 1173 | HUMAN PROTEIN SEQUENCE |
| mD16-070 | SEQ ID NO: 1174 | MOUSE GENOMIC SEQUENCE |
| mR16-070.1 | SEQ ID NO: 1175 | MOUSE mRNA SEQUENCE |
| mP16-070.1 | SEQ ID NO: 1176 | MOUSE PROTEIN SEQUENCE |
| mR16-070.2 | SEQ ID NO: 1177 | MOUSE mRNA SEQUENCE |
| mP16-070.2 | SEQ ID NO: 1178 | MOUSE PROTEIN SEQUENCE |
| mR16-070.3 | SEQ ID NO: 1179 | MOUSE mRNA SEQUENCE |
| mP16-070.3 | SEQ ID NO: 1180 | MOUSE PROTEIN SEQUENCE |
| mR16-070.4 | SEQ ID NO: 1181 | MOUSE mRNA SEQUENCE |
| mP16-070.4 | SEQ ID NO: 1182 | MOUSE PROTEIN SEQUENCE |
| hD16-070 | SEQ ID NO: 1183 | HUMAN GENOMIC SEQUENCE |
| hR16-070.1 | SEQ ID NO: 1184 | HUMAN mRNA SEQUENCE |
| hP16-070.1 | SEQ ID NO: 1185 | HUMAN PROTEIN SEQUENCE |
| hR16-070.2 | SEQ ID NO: 1186 | HUMAN mRNA SEQUENCE |
| hP16-070.2 | SEQ ID NO: 1187 | HUMAN PROTEIN SEQUENCE |
| hR16-070.3 | SEQ ID NO: 1188 | HUMAN mRNA SEQUENCE |
| hP16-070.3 | SEQ ID NO: 1189 | HUMAN PROTEIN SEQUENCE |
| hR16-070.4 | SEQ ID NO: 1190 | HUMAN mRNA SEQUENCE |
| hP16-070.4 | SEQ ID NO: 1191 | HUMAN PROTEIN SEQUENCE |
| mD16-073 | SEQ ID NO: 1192 | MOUSE GENOMIC SEQUENCE |
| mR16-073.1 | SEQ ID NO: 1193 | MOUSE mRNA SEQUENCE |
| mP16-073.1 | SEQ ID NO: 1194 | MOUSE PROTEIN SEQUENCE |
| hD16-073 | SEQ ID NO: 1195 | HUMAN GENOMIC SEQUENCE |
| hR16-073.1 | SEQ ID NO: 1196 | HUMAN mRNA SEQUENCE |
| hP16-073.1 | SEQ ID NO: 1197 | HUMAN PROTEIN SEQUENCE |
| hR16-073.2 | SEQ ID NO: 1198 | HUMAN mRNA SEQUENCE |
| hP16-073.2 | SEQ ID NO: 1199 | HUMAN PROTEIN SEQUENCE |
| hR16-073.3 | SEQ ID NO: 1200 | HUMAN mRNA SEQUENCE |
| hP16-073.3 | SEQ ID NO: 1201 | HUMAN PROTEIN SEQUENCE |
| mD16-074 | SEQ ID NO: 1202 | MOUSE GENOMIC SEQUENCE |
| mR16-074.1 | SEQ ID NO: 1203 | MOUSE mRNA SEQUENCE |
| mP16-074.1 | SEQ ID NO: 1204 | MOUSE PROTEIN SEQUENCE |
| hD16-074 | SEQ ID NO: 1205 | HUMAN GENOMIC SEQUENCE |
| hR16-074.1 | SEQ ID NO: 1206 | HUMAN mRNA SEQUENCE |
| hP16-074.1 | SEQ ID NO: 1207 | HUMAN PROTEIN SEQUENCE |
| hR16-074.2 | SEQ ID NO: 1208 | HUMAN mRNA SEQUENCE |
| hP16-074.2 | SEQ ID NO: 1209 | HUMAN PROTEIN SEQUENCE |
| mD17-002 | SEQ ID NO: 1210 | MOUSE GENOMIC SEQUENCE |
| mR17-002.1 | SEQ ID NO: 1211 | MOUSE mRNA SEQUENCE |
| mP17-002.1 | SEQ ID NO: 1212 | MOUSE PROTEIN SEQUENCE |
| hD17-002 | SEQ ID NO: 1213 | HUMAN GENOMIC SEQUENCE |
| hR17-002.1 | SEQ ID NO: 1214 | HUMAN mRNA SEQUENCE |
| hP17-002.1 | SEQ ID NO: 1215 | HUMAN PROTEIN SEQUENCE |
| hR17-002.2 | SEQ ID NO: 1216 | HUMAN mRNA SEQUENCE |
| hP17-002.2 | SEQ ID NO: 1217 | HUMAN PROTEIN SEQUENCE |
| hR17-002.3 | SEQ ID NO: 1218 | HUMAN mRNA SEQUENCE |
| hP17-002.3 | SEQ ID NO: 1219 | HUMAN PROTEIN SEQUENCE |
| hR17-002.4 | SEQ ID NO: 1220 | HUMAN mRNA SEQUENCE |
| hP17-002.4 | SEQ ID NO: 1221 | HUMAN PROTEIN SEQUENCE |
| hR17-002.5 | SEQ ID NO: 1222 | HUMAN mRNA SEQUENCE |
| hP17-002.5 | SEQ ID NO: 1223 | HUMAN PROTEIN SEQUENCE |
| mD17-005 | SEQ ID NO: 1224 | MOUSE GENOMIC SEQUENCE |
| mR17-005.1 | SEQ ID NO: 1225 | MOUSE mRNA SEQUENCE |
| mP17-005.1 | SEQ ID NO: 1226 | MOUSE PROTEIN SEQUENCE |
| mR17-005.2 | SEQ ID NO: 1227 | MOUSE mRNA SEQUENCE |
| mP17-005.2 | SEQ ID NO: 1228 | MOUSE PROTEIN SEQUENCE |
| mR17-005.3 | SEQ ID NO: 1229 | MOUSE mRNA SEQUENCE |
| mP17-005.3 | SEQ ID NO: 1230 | MOUSE PROTEIN SEQUENCE |
| mR17-005.4 | SEQ ID NO: 1231 | MOUSE mRNA SEQUENCE |
| mP17-005.4 | SEQ ID NO: 1232 | MOUSE PROTEIN SEQUENCE |
| mR17-005.5 | SEQ ID NO: 1233 | MOUSE mRNA SEQUENCE |
| mP17-005.5 | SEQ ID NO: 1234 | MOUSE PROTEIN SEQUENCE |
| mR17-005.6 | SEQ ID NO: 1235 | MOUSE mRNA SEQUENCE |
| mP17-005.6 | SEQ ID NO: 1236 | MOUSE PROTEIN SEQUENCE |
| hD17-005 | SEQ ID NO: 1237 | HUMAN GENOMIC SEQUENCE |
| hR17-005.1 | SEQ ID NO: 1238 | HUMAN mRNA SEQUENCE |
| hP17-005.1 | SEQ ID NO: 1239 | HUMAN PROTEIN SEQUENCE |
| hR17-005.2 | SEQ ID NO: 1240 | HUMAN mRNA SEQUENCE |
| hP17-005.2 | SEQ ID NO: 1241 | HUMAN PROTEIN SEQUENCE |
| hR17-005.3 | SEQ ID NO: 1242 | HUMAN mRNA SEQUENCE |
| hP17-005.3 | SEQ ID NO: 1243 | HUMAN PROTEIN SEQUENCE |
| hR17-005.4 | SEQ ID NO: 1244 | HUMAN mRNA SEQUENCE |
| hP17-005.4 | SEQ ID NO: 1245 | HUMAN PROTEIN SEQUENCE |
| hR17-005.5 | SEQ ID NO: 1246 | HUMAN mRNA SEQUENCE |
| hP17-005.5 | SEQ ID NO: 1247 | HUMAN PROTEIN SEQUENCE |
| hR17-005.6 | SEQ ID NO: 1248 | HUMAN mRNA SEQUENCE |
| hP17-005.6 | SEQ ID NO: 1249 | HUMAN PROTEIN SEQUENCE |
| hR17-005.7 | SEQ ID NO: 1250 | HUMAN mRNA SEQUENCE |
| hP17-005.7 | SEQ ID NO: 1251 | HUMAN PROTEIN SEQUENCE |
| hR17-005.8 | SEQ ID NO: 1252 | HUMAN mRNA SEQUENCE |
| hP17-005.8 | SEQ ID NO: 1253 | HUMAN PROTEIN SEQUENCE |
| hR17-005.9 | SEQ ID NO: 1254 | HUMAN mRNA SEQUENCE |
| hP17-005.9 | SEQ ID NO: 1255 | HUMAN PROTEIN SEQUENCE |
| hR17-005.10 | SEQ ID NO: 1256 | HUMAN mRNA SEQUENCE |
| hP17-005.10 | SEQ ID NO: 1257 | HUMAN PROTEIN SEQUENCE |
| hR17-005.11 | SEQ ID NO: 1258 | HUMAN mRNA SEQUENCE |
| hP17-005.11 | SEQ ID NO: 1259 | HUMAN PROTEIN SEQUENCE |
| mD17-011 | SEQ ID NO: 1260 | MOUSE GENOMIC SEQUENCE |
| mR17-011.1 | SEQ ID NO: 1261 | MOUSE mRNA SEQUENCE |
| mP17-011.1 | SEQ ID NO: 1262 | MOUSE PROTEIN SEQUENCE |
| mR17-011.2 | SEQ ID NO: 1263 | MOUSE mRNA SEQUENCE |
| mP17-011.2 | SEQ ID NO: 1264 | MOUSE PROTEIN SEQUENCE |
| hD17-011 | SEQ ID NO: 1265 | HUMAN GENOMIC SEQUENCE |
| hR17-011.1 | SEQ ID NO: 1266 | HUMAN mRNA SEQUENCE |
| hP17-011.1 | SEQ ID NO: 1267 | HUMAN PROTEIN SEQUENCE |
| hR17-011.2 | SEQ ID NO: 1268 | HUMAN mRNA SEQUENCE |
| hP17-011.2 | SEQ ID NO: 1269 | HUMAN PROTEIN SEQUENCE |
| hR17-011.3 | SEQ ID NO: 1270 | HUMAN mRNA SEQUENCE |
| hP17-011.3 | SEQ ID NO: 1271 | HUMAN PROTEIN SEQUENCE |
| mD17-013 | SEQ ID NO: 1272 | MOUSE GENOMIC SEQUENCE |
| mR17-013.1 | SEQ ID NO: 1273 | MOUSE mRNA SEQUENCE |
| mP17-013.1 | SEQ ID NO: 1274 | MOUSE PROTEIN SEQUENCE |
| mR17-013.2 | SEQ ID NO: 1275 | MOUSE mRNA SEQUENCE |
| mP17-013.2 | SEQ ID NO: 1276 | MOUSE PROTEIN SEQUENCE |
| hD17-013 | SEQ ID NO: 1277 | HUMAN GENOMIC SEQUENCE |
| hR17-013.1 | SEQ ID NO: 1278 | HUMAN mRNA SEQUENCE |
| hP17-013.1 | SEQ ID NO: 1279 | HUMAN PROTEIN SEQUENCE |
| mD17-017 | SEQ ID NO: 1280 | MOUSE GENOMIC SEQUENCE |
| mR17-017.1 | SEQ ID NO: 1281 | MOUSE mRNA SEQUENCE |
| mP17-017.1 | SEQ ID NO: 1282 | MOUSE PROTEIN SEQUENCE |
| hD17-017 | SEQ ID NO: 1283 | HUMAN GENOMIC SEQUENCE |
| hR17-017.1 | SEQ ID NO: 1284 | HUMAN mRNA SEQUENCE |
| hP17-017.1 | SEQ ID NO: 1285 | HUMAN PROTEIN SEQUENCE |
| hR17-017.2 | SEQ ID NO: 1286 | HUMAN mRNA SEQUENCE |
| hP17-017.2 | SEQ ID NO: 1287 | HUMAN PROTEIN SEQUENCE |
| hR17-017.3 | SEQ ID NO: 1288 | HUMAN mRNA SEQUENCE |
| hP17-017.3 | SEQ ID NO: 1289 | HUMAN PROTEIN SEQUENCE |
| hR17-017.4 | SEQ ID NO: 1290 | HUMAN mRNA SEQUENCE |
| hP17-017.4 | SEQ ID NO: 1291 | HUMAN PROTEIN SEQUENCE |
| mD17-018 | SEQ ID NO: 1292 | MOUSE GENOMIC SEQUENCE |
| mR17-018.1 | SEQ ID NO: 1293 | MOUSE mRNA SEQUENCE |
| mP17-018.1 | SEQ ID NO: 1294 | MOUSE PROTEIN SEQUENCE |
| hD17-018 | SEQ ID NO: 1295 | HUMAN GENOMIC SEQUENCE |
| hR17-018.1 | SEQ ID NO: 1296 | HUMAN mRNA SEQUENCE |
| hP17-018.1 | SEQ ID NO: 1297 | HUMAN PROTEIN SEQUENCE |
| hR17-018.2 | SEQ ID NO: 1298 | HUMAN mRNA SEQUENCE |
| hP17-018.2 | SEQ ID NO: 1299 | HUMAN PROTEIN SEQUENCE |
| hR17-018.3 | SEQ ID NO: 1300 | HUMAN mRNA SEQUENCE |
| hP17-018.3 | SEQ ID NO: 1301 | HUMAN PROTEIN SEQUENCE |
| mD17-019 | SEQ ID NO: 1302 | MOUSE GENOMIC SEQUENCE |
| mR17-019.1 | SEQ ID NO: 1303 | MOUSE mRNA SEQUENCE |
| mP17-019.1 | SEQ ID NO: 1304 | MOUSE PROTEIN SEQUENCE |
| hD17-019 | SEQ ID NO: 1305 | HUMAN GENOMIC SEQUENCE |
| hR17-019.1 | SEQ ID NO: 1306 | HUMAN mRNA SEQUENCE |
| hP17-019.1 | SEQ ID NO: 1307 | HUMAN PROTEIN SEQUENCE |
| mD17-024 | SEQ ID NO: 1308 | MOUSE GENOMIC SEQUENCE |
| mR17-024.1 | SEQ ID NO: 1309 | MOUSE mRNA SEQUENCE |
| mP17-024.1 | SEQ ID NO: 1310 | MOUSE PROTEIN SEQUENCE |
| mR17-024.2 | SEQ ID NO: 1311 | MOUSE mRNA SEQUENCE |
| mP17-024.2 | SEQ ID NO: 1312 | MOUSE PROTEIN SEQUENCE |
| mR17-024.3 | SEQ ID NO: 1313 | MOUSE mRNA SEQUENCE |
| mP17-024.3 | SEQ ID NO: 1314 | MOUSE PROTEIN SEQUENCE |
| hD17-024 | SEQ ID NO: 1315 | HUMAN GENOMIC SEQUENCE |
| hR17-024.1 | SEQ ID NO: 1316 | HUMAN mRNA SEQUENCE |
| hP17-024.1 | SEQ ID NO: 1317 | HUMAN PROTEIN SEQUENCE |
| hR17-024.2 | SEQ ID NO: 1318 | HUMAN mRNA SEQUENCE |
| hP17-024.2 | SEQ ID NO: 1319 | HUMAN PROTEIN SEQUENCE |
| mD17-025 | SEQ ID NO: 1320 | MOUSE GENOMIC SEQUENCE |
| mR17-025.1 | SEQ ID NO: 1321 | MOUSE mRNA SEQUENCE |
| mP17-025.1 | SEQ ID NO: 1322 | MOUSE PROTEIN SEQUENCE |
| mR17-025.2 | SEQ ID NO: 1323 | MOUSE mRNA SEQUENCE |
| mP17-025.2 | SEQ ID NO: 1324 | MOUSE PROTEIN SEQUENCE |
| mD17-025 | SEQ ID NO: 1325 | MOUSE GENOMIC SEQUENCE |
| mR17-025.1 | SEQ ID NO: 1326 | MOUSE mRNA SEQUENCE |
| mP17-025.1 | SEQ ID NO: 1327 | MOUSE PROTEIN SEQUENCE |
| hD17-025 | SEQ ID NO: 1328 | HUMAN GENOMIC SEQUENCE |
| hR17-025.1 | SEQ ID NO: 1329 | HUMAN mRNA SEQUENCE |
| hP17-025.1 | SEQ ID NO: 1330 | HUMAN PROTEIN SEQUENCE |
| hR17-025.2 | SEQ ID NO: 1331 | HUMAN mRNA SEQUENCE |
| hP17-025.2 | SEQ ID NO: 1332 | HUMAN PROTEIN SEQUENCE |
| hR17-025.3 | SEQ ID NO: 1333 | HUMAN mRNA SEQUENCE |
| hP17-025.3 | SEQ ID NO: 1334 | HUMAN PROTEIN SEQUENCE |
| hR17-025.4 | SEQ ID NO: 1335 | HUMAN mRNA SEQUENCE |
| hP17-025.4 | SEQ ID NO: 1336 | HUMAN PROTEIN SEQUENCE |
| hR17-025.5 | SEQ ID NO: 1337 | HUMAN mRNA SEQUENCE |
| hP17-025.5 | SEQ ID NO: 1338 | HUMAN PROTEIN SEQUENCE |
| hR17-025.6 | SEQ ID NO: 1339 | HUMAN mRNA SEQUENCE |
| hP17-025.6 | SEQ ID NO: 1340 | HUMAN PROTEIN SEQUENCE |
| hR17-025.7 | SEQ ID NO: 1341 | HUMAN mRNA SEQUENCE |
| hP17-025.7 | SEQ ID NO: 1342 | HUMAN PROTEIN SEQUENCE |
| hR17-025.8 | SEQ ID NO: 1343 | HUMAN mRNA SEQUENCE |
| hP17-025.8 | SEQ ID NO: 1344 | HUMAN PROTEIN SEQUENCE |
| hR17-025.9 | SEQ ID NO: 1345 | HUMAN mRNA SEQUENCE |
| hP17-025.9 | SEQ ID NO: 1346 | HUMAN PROTEIN SEQUENCE |
| hR17-025.10 | SEQ ID NO: 1347 | HUMAN mRNA SEQUENCE |
| hP17-025.10 | SEQ ID NO: 1348 | HUMAN PROTEIN SEQUENCE |
| mD17-027 | SEQ ID NO: 1349 | MOUSE GENOMIC SEQUENCE |
| mR17-027.1 | SEQ ID NO: 1350 | MOUSE mRNA SEQUENCE |
| mP17-027.1 | SEQ ID NO: 1351 | MOUSE PROTEIN SEQUENCE |
| mR17-027.2 | SEQ ID NO: 1352 | MOUSE mRNA SEQUENCE |
| mP17-027.2 | SEQ ID NO: 1353 | MOUSE PROTEIN SEQUENCE |
| hD17-027 | SEQ ID NO: 1354 | HUMAN GENOMIC SEQUENCE |
| hR17-027.1 | SEQ ID NO: 1355 | HUMAN mRNA SEQUENCE |
| hP17-027.1 | SEQ ID NO: 1356 | HUMAN PROTEIN SEQUENCE |
| hR17-027.2 | SEQ ID NO: 1357 | HUMAN mRNA SEQUENCE |
| hP17-027.2 | SEQ ID NO: 1358 | HUMAN PROTEIN SEQUENCE |
| mD17-028 | SEQ ID NO: 1359 | MOUSE GENOMIC SEQUENCE |
| mR17-028.1 | SEQ ID NO: 1360 | MOUSE mRNA SEQUENCE |
| mP17-028.1 | SEQ ID NO: 1361 | MOUSE PROTEIN SEQUENCE |
| hD17-028 | SEQ ID NO: 1362 | HUMAN GENOMIC SEQUENCE |
| hR17-028.1 | SEQ ID NO: 1363 | HUMAN mRNA SEQUENCE |
| hP17-028.1 | SEQ ID NO: 1364 | HUMAN PROTEIN SEQUENCE |
| hR17-028.2 | SEQ ID NO: 1365 | HUMAN mRNA SEQUENCE |
| hP17-028.2 | SEQ ID NO: 1366 | HUMAN PROTEIN SEQUENCE |
| hR17-028.3 | SEQ ID NO: 1367 | HUMAN mRNA SEQUENCE |
| hP17-028.3 | SEQ ID NO: 1368 | HUMAN PROTEIN SEQUENCE |
| hR17-028.4 | SEQ ID NO: 1369 | HUMAN mRNA SEQUENCE |
| hP17-028.4 | SEQ ID NO: 1370 | HUMAN PROTEIN SEQUENCE |
| hR17-028.5 | SEQ ID NO: 1371 | HUMAN mRNA SEQUENCE |
| hP17-028.5 | SEQ ID NO: 1372 | HUMAN PROTEIN SEQUENCE |
| mD17-031 | SEQ ID NO: 1373 | MOUSE GENOMIC SEQUENCE |
| mR17-031.1 | SEQ ID NO: 1374 | MOUSE mRNA SEQUENCE |
| mP17-031.1 | SEQ ID NO: 1375 | MOUSE PROTEIN SEQUENCE |
| hD17-031 | SEQ ID NO: 1376 | HUMAN GENOMIC SEQUENCE |
| hR17-031.1 | SEQ ID NO: 1377 | HUMAN mRNA SEQUENCE |
| hP17-031.1 | SEQ ID NO: 1378 | HUMAN PROTEIN SEQUENCE |
| hR17-031.2 | SEQ ID NO: 1379 | HUMAN mRNA SEQUENCE |
| hP17-031.2 | SEQ ID NO: 1380 | HUMAN PROTEIN SEQUENCE |
| hR17-031.3 | SEQ ID NO: 1381 | HUMAN mRNA SEQUENCE |
| hP17-031.3 | SEQ ID NO: 1382 | HUMAN PROTEIN SEQUENCE |
| mD17-034 | SEQ ID NO: 1383 | MOUSE GENOMIC SEQUENCE |
| mR17-034.1 | SEQ ID NO: 1384 | MOUSE mRNA SEQUENCE |
| mP17-034.1 | SEQ ID NO: 1385 | MOUSE PROTEIN SEQUENCE |
| hD17-034 | SEQ ID NO: 1386 | HUMAN GENOMIC SEQUENCE |
| hR17-034.1 | SEQ ID NO: 1387 | HUMAN mRNA SEQUENCE |
| hP17-034.1 | SEQ ID NO: 1388 | HUMAN PROTEIN SEQUENCE |
| hR17-034.2 | SEQ ID NO: 1389 | HUMAN mRNA SEQUENCE |
| hP17-034.2 | SEQ ID NO: 1390 | HUMAN PROTEIN SEQUENCE |
| hR17-034.3 | SEQ ID NO: 1391 | HUMAN mRNA SEQUENCE |
| hP17-034.3 | SEQ ID NO: 1392 | HUMAN PROTEIN SEQUENCE |
| hR17-034.4 | SEQ ID NO: 1393 | HUMAN mRNA SEQUENCE |
| hP17-034.4 | SEQ ID NO: 1394 | HUMAN PROTEIN SEQUENCE |
| mD17-035 | SEQ ID NO: 1395 | MOUSE GENOMIC SEQUENCE |
| mR17-035.1 | SEQ ID NO: 1396 | MOUSE mRNA SEQUENCE |
| mP17-035.1 | SEQ ID NO: 1397 | MOUSE PROTEIN SEQUENCE |
| hD17-035 | SEQ ID NO: 1398 | HUMAN GENOMIC SEQUENCE |
| hR17-035.1 | SEQ ID NO: 1399 | HUMAN mRNA SEQUENCE |
| hP17-035.1 | SEQ ID NO: 1400 | HUMAN PROTEIN SEQUENCE |
| hR17-035.2 | SEQ ID NO: 1401 | HUMAN mRNA SEQUENCE |
| hP17-035.2 | SEQ ID NO: 1402 | HUMAN PROTEIN SEQUENCE |
| hR17-035.3 | SEQ ID NO: 1403 | HUMAN mRNA SEQUENCE |
| hP17-035.3 | SEQ ID NO: 1404 | HUMAN PROTEIN SEQUENCE |
| mD17-040 | SEQ ID NO: 1405 | MOUSE GENOMIC SEQUENCE |
| mR17-040.1 | SEQ ID NO: 1406 | MOUSE mRNA SEQUENCE |
| mP17-040.1 | SEQ ID NO: 1407 | MOUSE PROTEIN SEQUENCE |
| hD17-040 | SEQ ID NO: 1408 | HUMAN GENOMIC SEQUENCE |
| hR17-040.1 | SEQ ID NO: 1409 | HUMAN mRNA SEQUENCE |
| hP17-040.1 | SEQ ID NO: 1410 | HUMAN PROTEIN SEQUENCE |
| mD17-047 | SEQ ID NO: 1411 | MOUSE GENOMIC SEQUENCE |
| mR17-047.1 | SEQ ID NO: 1412 | MOUSE mRNA SEQUENCE |
| mP17-047.1 | SEQ ID NO: 1413 | MOUSE PROTEIN SEQUENCE |
| mR17-047.2 | SEQ ID NO: 1414 | MOUSE mRNA SEQUENCE |
| mP17-047.2 | SEQ ID NO: 1415 | MOUSE PROTEIN SEQUENCE |
| mR17-047.3 | SEQ ID NO: 1416 | MOUSE mRNA SEQUENCE |
| mP17-047.3 | SEQ ID NO: 1417 | MOUSE PROTEIN SEQUENCE |
| hD17-047 | SEQ ID NO: 1418 | HUMAN GENOMIC SEQUENCE |
| hR17-047.1 | SEQ ID NO: 1419 | HUMAN mRNA SEQUENCE |
| hP17-047.1 | SEQ ID NO: 1420 | HUMAN PROTEIN SEQUENCE |
| mD17-058 | SEQ ID NO: 1421 | MOUSE GENOMIC SEQUENCE |
| mR17-058.1 | SEQ ID NO: 1422 | MOUSE mRNA SEQUENCE |
| mP17-058.1 | SEQ ID NO: 1423 | MOUSE PROTEIN SEQUENCE |
| hD17-058 | SEQ ID NO: 1424 | HUMAN GENOMIC SEQUENCE |
| hR17-058.1 | SEQ ID NO: 1425 | HUMAN mRNA SEQUENCE |
| hP17-058.1 | SEQ ID NO: 1426 | HUMAN PROTEIN SEQUENCE |
| hR17-058.2 | SEQ ID NO: 1427 | HUMAN mRNA SEQUENCE |
| hP17-058.2 | SEQ ID NO: 1428 | HUMAN PROTEIN SEQUENCE |
| mD17-063 | SEQ ID NO: 1429 | MOUSE GENOMIC SEQUENCE |
| mR17-063.1 | SEQ ID NO: 1430 | MOUSE mRNA SEQUENCE |
| mP17-063.1 | SEQ ID NO: 1431 | MOUSE PROTEIN SEQUENCE |
| mR17-063.2 | SEQ ID NO: 1432 | MOUSE mRNA SEQUENCE |
| mP17-063.2 | SEQ ID NO: 1433 | MOUSE PROTEIN SEQUENCE |
| hD17-063 | SEQ ID NO: 1434 | HUMAN GENOMIC SEQUENCE |
| hR17-063.1 | SEQ ID NO: 1435 | HUMAN mRNA SEQUENCE |
| hP17-063.1 | SEQ ID NO: 1436 | HUMAN PROTEIN SEQUENCE |
| hR17-063.2 | SEQ ID NO: 1437 | HUMAN mRNA SEQUENCE |
| hP17-063.2 | SEQ ID NO: 1438 | HUMAN PROTEIN SEQUENCE |
| hR17-063.3 | SEQ ID NO: 1439 | HUMAN mRNA SEQUENCE |
| hP17-063.3 | SEQ ID NO: 1440 | HUMAN PROTEIN SEQUENCE |
| hR17-063.4 | SEQ ID NO: 1441 | HUMAN mRNA SEQUENCE |
| hP17-063.4 | SEQ ID NO: 1442 | HUMAN PROTEIN SEQUENCE |
| mD17-065 | SEQ ID NO: 1443 | MOUSE GENOMIC SEQUENCE |
| mR17-065.1 | SEQ ID NO: 1444 | MOUSE mRNA SEQUENCE |
| mP17-065.1 | SEQ ID NO: 1445 | MOUSE PROTEIN SEQUENCE |
| hD17-065 | SEQ ID NO: 1446 | HUMAN GENOMIC SEQUENCE |
| hR17-065.1 | SEQ ID NO: 1447 | HUMAN mRNA SEQUENCE |
| hP17-065.1 | SEQ ID NO: 1448 | HUMAN PROTEIN SEQUENCE |
| mD17-070 | SEQ ID NO: 1449 | MOUSE GENOMIC SEQUENCE |
| mR17-070.1 | SEQ ID NO: 1450 | MOUSE mRNA SEQUENCE |
| mP17-070.1 | SEQ ID NO: 1451 | MOUSE PROTEIN SEQUENCE |
| mR17-070.2 | SEQ ID NO: 1452 | MOUSE mRNA SEQUENCE |
| mP17-070.2 | SEQ ID NO: 1453 | MOUSE PROTEIN SEQUENCE |
| mR17-070.3 | SEQ ID NO: 1454 | MOUSE mRNA SEQUENCE |
| mP17-070.3 | SEQ ID NO: 1455 | MOUSE PROTEIN SEQUENCE |
| hD17-070 | SEQ ID NO: 1456 | HUMAN GENOMIC SEQUENCE |
| hR17-070.1 | SEQ ID NO: 1457 | HUMAN mRNA SEQUENCE |
| hP17-070.1 | SEQ ID NO: 1458 | HUMAN PROTEIN SEQUENCE |
| hR17-070.2 | SEQ ID NO: 1459 | HUMAN mRNA SEQUENCE |
| hP17-070.2 | SEQ ID NO: 1460 | HUMAN PROTEIN SEQUENCE |
| hR17-070.3 | SEQ ID NO: 1461 | HUMAN mRNA SEQUENCE |
| hP17-070.3 | SEQ ID NO: 1462 | HUMAN PROTEIN SEQUENCE |
| mD17-080 | SEQ ID NO: 1463 | MOUSE GENOMIC SEQUENCE |
| mR17-080.1 | SEQ ID NO: 1464 | MOUSE mRNA SEQUENCE |
| mP17-080.1 | SEQ ID NO: 1465 | MOUSE PROTEIN SEQUENCE |
| mR17-080.2 | SEQ ID NO: 1466 | MOUSE mRNA SEQUENCE |
| mP17-080.2 | SEQ ID NO: 1467 | MOUSE PROTEIN SEQUENCE |
| hD17-080 | SEQ ID NO: 1468 | HUMAN GENOMIC SEQUENCE |
| hR17-080.1 | SEQ ID NO: 1469 | HUMAN mRNA SEQUENCE |
| hP17-080.1 | SEQ ID NO: 1470 | HUMAN PROTEIN SEQUENCE |
| hR17-080.2 | SEQ ID NO: 1471 | HUMAN mRNA SEQUENCE |
| hP17-080.2 | SEQ ID NO: 1472 | HUMAN PROTEIN SEQUENCE |
| hR17-080.3 | SEQ ID NO: 1473 | HUMAN mRNA SEQUENCE |
| hP17-080.3 | SEQ ID NO: 1474 | HUMAN PROTEIN SEQUENCE |
| hR17-080.4 | SEQ ID NO: 1475 | HUMAN mRNA SEQUENCE |
| hP17-080.4 | SEQ ID NO: 1476 | HUMAN PROTEIN SEQUENCE |
| mD17-081 | SEQ ID NO: 1477 | MOUSE GENOMIC SEQUENCE |
| mR17-081.1 | SEQ ID NO: 1478 | MOUSE mRNA SEQUENCE |
| mP17-081.1 | SEQ ID NO: 1479 | MOUSE PROTEIN SEQUENCE |
| hD17-081 | SEQ ID NO: 1480 | HUMAN GENOMIC SEQUENCE |
| hR17-081.1 | SEQ ID NO: 1481 | HUMAN mRNA SEQUENCE |
| hP17-081.1 | SEQ ID NO: 1482 | HUMAN PROTEIN SEQUENCE |
| mD17-084 | SEQ ID NO: 1483 | MOUSE GENOMIC SEQUENCE |
| mR17-084.1 | SEQ ID NO: 1484 | MOUSE mRNA SEQUENCE |
| mP17-084.1 | SEQ ID NO: 1485 | MOUSE PROTEIN SEQUENCE |
| hD17-084 | SEQ ID NO: 1486 | HUMAN GENOMIC SEQUENCE |
| hR17-084.1 | SEQ ID NO: 1487 | HUMAN mRNA SEQUENCE |
| hP17-084.1 | SEQ ID NO: 1488 | HUMAN PROTEIN SEQUENCE |
| mD17-087 | SEQ ID NO: 1489 | MOUSE GENOMIC SEQUENCE |
| mR17-087.1 | SEQ ID NO: 1490 | MOUSE mRNA SEQUENCE |
| mP17-087.1 | SEQ ID NO: 1491 | MOUSE PROTEIN SEQUENCE |
| mD17-087 | SEQ ID NO: 1492 | MOUSE GENOMIC SEQUENCE |
| mR17-087.1 | SEQ ID NO: 1493 | MOUSE mRNA SEQUENCE |
| mP17-087.1 | SEQ ID NO: 1494 | MOUSE PROTEIN SEQUENCE |
| hD17-087 | SEQ ID NO: 1495 | HUMAN GENOMIC SEQUENCE |
| hR17-087.1 | SEQ ID NO: 1496 | HUMAN mRNA SEQUENCE |
| hP17-087.1 | SEQ ID NO: 1497 | HUMAN PROTEIN SEQUENCE |
| hR17-087.2 | SEQ ID NO: 1498 | HUMAN mRNA SEQUENCE |
| hP17-087.2 | SEQ ID NO: 1499 | HUMAN PROTEIN SEQUENCE |
| hR17-087.3 | SEQ ID NO: 1500 | HUMAN mRNA SEQUENCE |
| hP17-087.3 | SEQ ID NO: 1501 | HUMAN PROTEIN SEQUENCE |
| mD17-089 | SEQ ID NO: 1502 | MOUSE GENOMIC SEQUENCE |
| mR17-089.1 | SEQ ID NO: 1503 | MOUSE mRNA SEQUENCE |
| mP17-089.1 | SEQ ID NO: 1504 | MOUSE PROTEIN SEQUENCE |
| hD17-089 | SEQ ID NO: 1505 | HUMAN GENOMIC SEQUENCE |
| hR17-089.1 | SEQ ID NO: 1506 | HUMAN mRNA SEQUENCE |
| hP17-089.1 | SEQ ID NO: 1507 | HUMAN PROTEIN SEQUENCE |
| hR17-089.2 | SEQ ID NO: 1508 | HUMAN mRNA SEQUENCE |
| hP17-089.2 | SEQ ID NO: 1509 | HUMAN PROTEIN SEQUENCE |
| hR17-089.3 | SEQ ID NO: 1510 | HUMAN mRNA SEQUENCE |
| hP17-089.3 | SEQ ID NO: 1511 | HUMAN PROTEIN SEQUENCE |
| mD17-092 | SEQ ID NO: 1512 | MOUSE GENOMIC SEQUENCE |
| mR17-092.1 | SEQ ID NO: 1513 | MOUSE mRNA SEQUENCE |
| mP17-092.1 | SEQ ID NO: 1514 | MOUSE PROTEIN SEQUENCE |
| hD17-092 | SEQ ID NO: 1515 | HUMAN GENOMIC SEQUENCE |
| hR17-092.1 | SEQ ID NO: 1516 | HUMAN mRNA SEQUENCE |
| hP17-092.1 | SEQ ID NO: 1517 | HUMAN PROTEIN SEQUENCE |
| hR17-092.2 | SEQ ID NO: 1518 | HUMAN mRNA SEQUENCE |
| hP17-092.2 | SEQ ID NO: 1519 | HUMAN PROTEIN SEQUENCE |
| hR17-092.3 | SEQ ID NO: 1520 | HUMAN mRNA SEQUENCE |
| hP17-092.3 | SEQ ID NO: 1521 | HUMAN PROTEIN SEQUENCE |
| mD18-003 | SEQ ID NO: 1522 | MOUSE GENOMIC SEQUENCE |
| mR18-003.1 | SEQ ID NO: 1523 | MOUSE mRNA SEQUENCE |
| mP18-003.1 | SEQ ID NO: 1524 | MOUSE PROTEIN SEQUENCE |
| hD18-003 | SEQ ID NO: 1525 | HUMAN GENOMIC SEQUENCE |
| hR18-003.1 | SEQ ID NO: 1526 | HUMAN mRNA SEQUENCE |
| hP18-003.1 | SEQ ID NO: 1527 | HUMAN PROTEIN SEQUENCE |
| hR18-003.2 | SEQ ID NO: 1528 | HUMAN mRNA SEQUENCE |
| hP18-003.2 | SEQ ID NO: 1529 | HUMAN PROTEIN SEQUENCE |
| mD18-007 | SEQ ID NO: 1530 | MOUSE GENOMIC SEQUENCE |
| mR18-007.1 | SEQ ID NO: 1531 | MOUSE mRNA SEQUENCE |
| mP18-007.1 | SEQ ID NO: 1532 | MOUSE PROTEIN SEQUENCE |
| mR18-007.2 | SEQ ID NO: 1533 | MOUSE mRNA SEQUENCE |
| mP18-007.2 | SEQ ID NO: 1534 | MOUSE PROTEIN SEQUENCE |
| hD18-007 | SEQ ID NO: 1535 | HUMAN GENOMIC SEQUENCE |
| hR18-007.1 | SEQ ID NO: 1536 | HUMAN mRNA SEQUENCE |
| hP18-007.1 | SEQ ID NO: 1537 | HUMAN PROTEIN SEQUENCE |
| hR18-007.2 | SEQ ID NO: 1538 | HUMAN mRNA SEQUENCE |
| hP18-007.2 | SEQ ID NO: 1539 | HUMAN PROTEIN SEQUENCE |
| mD18-011 | SEQ ID NO: 1540 | MOUSE GENOMIC SEQUENCE |
| mR18-011.1 | SEQ ID NO: 1541 | MOUSE mRNA SEQUENCE |
| mP18-011.1 | SEQ ID NO: 1542 | MOUSE PROTEIN SEQUENCE |
| mR18-011.2 | SEQ ID NO: 1543 | MOUSE mRNA SEQUENCE |
| mP18-011.2 | SEQ ID NO: 1544 | MOUSE PROTEIN SEQUENCE |
| mR18-011.3 | SEQ ID NO: 1545 | MOUSE mRNA SEQUENCE |
| mP18-011.3 | SEQ ID NO: 1546 | MOUSE PROTEIN SEQUENCE |
| mR18-011.4 | SEQ ID NO: 1547 | MOUSE mRNA SEQUENCE |
| mP18-011.4 | SEQ ID NO: 1548 | MOUSE PROTEIN SEQUENCE |
| hD18-011 | SEQ ID NO: 1549 | HUMAN GENOMIC SEQUENCE |
| hR18-011.1 | SEQ ID NO: 1550 | HUMAN mRNA SEQUENCE |
| hP18-011.1 | SEQ ID NO: 1551 | HUMAN PROTEIN SEQUENCE |
| hR18-011.2 | SEQ ID NO: 1552 | HUMAN mRNA SEQUENCE |
| hP18-011.2 | SEQ ID NO: 1553 | HUMAN PROTEIN SEQUENCE |
| hR18-011.3 | SEQ ID NO: 1554 | HUMAN mRNA SEQUENCE |
| hP18-011.3 | SEQ ID NO: 1555 | HUMAN PROTEIN SEQUENCE |
| mD18-017 | SEQ ID NO: 1556 | MOUSE GENOMIC SEQUENCE |
| mR18-017.1 | SEQ ID NO: 1557 | MOUSE mRNA SEQUENCE |
| mP18-017.1 | SEQ ID NO: 1558 | MOUSE PROTEIN SEQUENCE |
| hD18-017 | SEQ ID NO: 1559 | HUMAN GENOMIC SEQUENCE |
| hR18-017.1 | SEQ ID NO: 1560 | HUMAN mRNA SEQUENCE |
| hP18-017.1 | SEQ ID NO: 1561 | HUMAN PROTEIN SEQUENCE |
| hR18-017.2 | SEQ ID NO: 1562 | HUMAN mRNA SEQUENCE |
| hP18-017.2 | SEQ ID NO: 1563 | HUMAN PROTEIN SEQUENCE |
| hR18-017.3 | SEQ ID NO: 1564 | HUMAN mRNA SEQUENCE |
| hP18-017.3 | SEQ ID NO: 1565 | HUMAN PROTEIN SEQUENCE |
| mD18-020 | SEQ ID NO: 1566 | MOUSE GENOMIC SEQUENCE |
| mR18-020.1 | SEQ ID NO: 1567 | MOUSE mRNA SEQUENCE |
| mP18-020.1 | SEQ ID NO: 1568 | MOUSE PROTEIN SEQUENCE |
| mR18-020.2 | SEQ ID NO: 1569 | MOUSE mRNA SEQUENCE |
| mP18-020.2 | SEQ ID NO: 1570 | MOUSE PROTEIN SEQUENCE |
| hD18-020 | SEQ ID NO: 1571 | HUMAN GENOMIC SEQUENCE |
| hR18-020.1 | SEQ ID NO: 1572 | HUMAN mRNA SEQUENCE |
| hP18-020.1 | SEQ ID NO: 1573 | HUMAN PROTEIN SEQUENCE |
| hR18-020.2 | SEQ ID NO: 1574 | HUMAN mRNA SEQUENCE |
| hP18-020.2 | SEQ ID NO: 1575 | HUMAN PROTEIN SEQUENCE |
| hR18-020.3 | SEQ ID NO: 1576 | HUMAN mRNA SEQUENCE |
| hP18-020.3 | SEQ ID NO: 1577 | HUMAN PROTEIN SEQUENCE |
| mD18-021 | SEQ ID NO: 1578 | MOUSE GENOMIC SEQUENCE |
| mR18-021.1 | SEQ ID NO: 1579 | MOUSE mRNA SEQUENCE |
| mP18-021.1 | SEQ ID NO: 1580 | MOUSE PROTEIN SEQUENCE |
| mR18-021.2 | SEQ ID NO: 1581 | MOUSE mRNA SEQUENCE |
| mP18-021.2 | SEQ ID NO: 1582 | MOUSE PROTEIN SEQUENCE |
| mR18-021.3 | SEQ ID NO: 1583 | MOUSE mRNA SEQUENCE |
| mP18-021.3 | SEQ ID NO: 1584 | MOUSE PROTEIN SEQUENCE |
| mR18-021.4 | SEQ ID NO: 1585 | MOUSE mRNA SEQUENCE |
| mP18-021.4 | SEQ ID NO: 1586 | MOUSE PROTEIN SEQUENCE |
| hD18-021 | SEQ ID NO: 1587 | HUMAN GENOMIC SEQUENCE |
| hR18-021.1 | SEQ ID NO: 1588 | HUMAN mRNA SEQUENCE |
| hP18-021.1 | SEQ ID NO: 1589 | HUMAN PROTEIN SEQUENCE |
| hR18-021.2 | SEQ ID NO: 1590 | HUMAN mRNA SEQUENCE |
| hP18-021.2 | SEQ ID NO: 1591 | HUMAN PROTEIN SEQUENCE |
| hR18-021.3 | SEQ ID NO: 1592 | HUMAN mRNA SEQUENCE |
| hP18-021.3 | SEQ ID NO: 1593 | HUMAN PROTEIN SEQUENCE |
| hR18-021.4 | SEQ ID NO: 1594 | HUMAN mRNA SEQUENCE |
| hP18-021.4 | SEQ ID NO: 1595 | HUMAN PROTEIN SEQUENCE |
| mD18-022 | SEQ ID NO: 1596 | MOUSE GENOMIC SEQUENCE |
| mR18-022.1 | SEQ ID NO: 1597 | MOUSE mRNA SEQUENCE |
| mP18-022.1 | SEQ ID NO: 1598 | MOUSE PROTEIN SEQUENCE |
| mR18-022.2 | SEQ ID NO: 1599 | MOUSE mRNA SEQUENCE |
| mP18-022.2 | SEQ ID NO: 1600 | MOUSE PROTEIN SEQUENCE |
| mR18-022.3 | SEQ ID NO: 1601 | MOUSE mRNA SEQUENCE |
| mP18-022.3 | SEQ ID NO: 1602 | MOUSE PROTEIN SEQUENCE |
| mR18-022.4 | SEQ ID NO: 1603 | MOUSE mRNA SEQUENCE |
| mP18-022.4 | SEQ ID NO: 1604 | MOUSE PROTEIN SEQUENCE |
| mR18-022.5 | SEQ ID NO: 1605 | MOUSE mRNA SEQUENCE |
| mP18-022.5 | SEQ ID NO: 1606 | MOUSE PROTEIN SEQUENCE |
| hD18-022 | SEQ ID NO: 1607 | HUMAN GENOMIC SEQUENCE |
| hR18-022.1 | SEQ ID NO: 1608 | HUMAN mRNA SEQUENCE |
| hP18-022.1 | SEQ ID NO: 1609 | HUMAN PROTEIN SEQUENCE |
| hR18-022.2 | SEQ ID NO: 1610 | HUMAN mRNA SEQUENCE |
| hP18-022.2 | SEQ ID NO: 1611 | HUMAN PROTEIN SEQUENCE |
| hR18-022.3 | SEQ ID NO: 1612 | HUMAN mRNA SEQUENCE |
| hP18-022.3 | SEQ ID NO: 1613 | HUMAN PROTEIN SEQUENCE |
| mD18-023 | SEQ ID NO: 1614 | MOUSE GENOMIC SEQUENCE |
| mR18-023.1 | SEQ ID NO: 1615 | MOUSE mRNA SEQUENCE |
| mP18-023.1 | SEQ ID NO: 1616 | MOUSE PROTEIN SEQUENCE |
| hD18-023 | SEQ ID NO: 1617 | HUMAN GENOMIC SEQUENCE |
| hR18-023.1 | SEQ ID NO: 1618 | HUMAN mRNA SEQUENCE |
| hP18-023.1 | SEQ ID NO: 1619 | HUMAN PROTEIN SEQUENCE |
| hR18-023.2 | SEQ ID NO: 1620 | HUMAN mRNA SEQUENCE |
| hP18-023.2 | SEQ ID NO: 1621 | HUMAN PROTEIN SEQUENCE |
| hR18-023.3 | SEQ ID NO: 1622 | HUMAN mRNA SEQUENCE |
| hP18-023.3 | SEQ ID NO: 1623 | HUMAN PROTEIN SEQUENCE |
| hR18-023.4 | SEQ ID NO: 1624 | HUMAN mRNA SEQUENCE |
| hP18-023.4 | SEQ ID NO: 1625 | HUMAN PROTEIN SEQUENCE |
| mD18-024 | SEQ ID NO: 1626 | MOUSE GENOMIC SEQUENCE |
| mR18-024.1 | SEQ ID NO: 1627 | MOUSE mRNA SEQUENCE |
| mP18-024.1 | SEQ ID NO: 1628 | MOUSE PROTEIN SEQUENCE |
| hD18-024 | SEQ ID NO: 1629 | HUMAN GENOMIC SEQUENCE |
| hR18-024.1 | SEQ ID NO: 1630 | HUMAN mRNA SEQUENCE |
| hP18-024.1 | SEQ ID NO: 1631 | HUMAN PROTEIN SEQUENCE |
| hR18-024.2 | SEQ ID NO: 1632 | HUMAN mRNA SEQUENCE |
| hP18-024.2 | SEQ ID NO: 1633 | HUMAN PROTEIN SEQUENCE |
| hR18-024.3 | SEQ ID NO: 1634 | HUMAN mRNA SEQUENCE |
| hP18-024.3 | SEQ ID NO: 1635 | HUMAN PROTEIN SEQUENCE |
| hR18-024.4 | SEQ ID NO: 1636 | HUMAN mRNA SEQUENCE |
| hP18-024.4 | SEQ ID NO: 1637 | HUMAN PROTEIN SEQUENCE |
| hR18-024.5 | SEQ ID NO: 1638 | HUMAN mRNA SEQUENCE |
| hP18-024.5 | SEQ ID NO: 1639 | HUMAN PROTEIN SEQUENCE |
| mD18-025 | SEQ ID NO: 1640 | MOUSE GENOMIC SEQUENCE |
| mR18-025.1 | SEQ ID NO: 1641 | MOUSE mRNA SEQUENCE |
| mP18-025.1 | SEQ ID NO: 1642 | MOUSE PROTEIN SEQUENCE |
| mR18-025.2 | SEQ ID NO: 1643 | MOUSE mRNA SEQUENCE |
| mP18-025.2 | SEQ ID NO: 1644 | MOUSE PROTEIN SEQUENCE |
| mR18-025.3 | SEQ ID NO: 1645 | MOUSE mRNA SEQUENCE |
| mP18-025.3 | SEQ ID NO: 1646 | MOUSE PROTEIN SEQUENCE |
| hD18-025 | SEQ ID NO: 1647 | HUMAN GENOMIC SEQUENCE |
| hR18-025.1 | SEQ ID NO: 1648 | HUMAN mRNA SEQUENCE |
| hP18-025.1 | SEQ ID NO: 1649 | HUMAN PROTEIN SEQUENCE |
| hR18-025.2 | SEQ ID NO: 1650 | HUMAN mRNA SEQUENCE |
| hP18-025.2 | SEQ ID NO: 1651 | HUMAN PROTEIN SEQUENCE |
| mD18-028 | SEQ ID NO: 1652 | MOUSE GENOMIC SEQUENCE |
| mR18-028.1 | SEQ ID NO: 1653 | MOUSE mRNA SEQUENCE |
| mP18-028.1 | SEQ ID NO: 1654 | MOUSE PROTEIN SEQUENCE |
| hD18-028 | SEQ ID NO: 1655 | HUMAN GENOMIC SEQUENCE |
| hR18-028.1 | SEQ ID NO: 1656 | HUMAN mRNA SEQUENCE |
| hP18-028.1 | SEQ ID NO: 1657 | HUMAN PROTEIN SEQUENCE |
| mD18-029 | SEQ ID NO: 1658 | MOUSE GENOMIC SEQUENCE |
| mR18-029.1 | SEQ ID NO: 1659 | MOUSE mRNA SEQUENCE |
| mP18-029.1 | SEQ ID NO: 1660 | MOUSE PROTEIN SEQUENCE |
| mR18-029.2 | SEQ ID NO: 1661 | MOUSE mRNA SEQUENCE |
| mP18-029.2 | SEQ ID NO: 1662 | MOUSE PROTEIN SEQUENCE |
| hD18-029 | SEQ ID NO: 1663 | HUMAN GENOMIC SEQUENCE |
| hR18-029.1 | SEQ ID NO: 1664 | HUMAN mRNA SEQUENCE |
| hP18-029.1 | SEQ ID NO: 1665 | HUMAN PROTEIN SEQUENCE |
| hR18-029.2 | SEQ ID NO: 1666 | HUMAN mRNA SEQUENCE |
| hP18-029.2 | SEQ ID NO: 1667 | HUMAN PROTEIN SEQUENCE |
| hR18-029.3 | SEQ ID NO: 1668 | HUMAN mRNA SEQUENCE |
| hP18-029.3 | SEQ ID NO: 1669 | HUMAN PROTEIN SEQUENCE |
| hR18-029.4 | SEQ ID NO: 1670 | HUMAN mRNA SEQUENCE |
| hP18-029.4 | SEQ ID NO: 1671 | HUMAN PROTEIN SEQUENCE |
| hR18-029.5 | SEQ ID NO: 1672 | HUMAN mRNA SEQUENCE |
| hP18-029.5 | SEQ ID NO: 1673 | HUMAN PROTEIN SEQUENCE |
| hR18-029.6 | SEQ ID NO: 1674 | HUMAN mRNA SEQUENCE |
| hP18-029.6 | SEQ ID NO: 1675 | HUMAN PROTEIN SEQUENCE |
| hR18-029.7 | SEQ ID NO: 1676 | HUMAN mRNA SEQUENCE |
| hP18-029.7 | SEQ ID NO: 1677 | HUMAN PROTEIN SEQUENCE |
| hR18-029.8 | SEQ ID NO: 1678 | HUMAN mRNA SEQUENCE |
| hP18-029.8 | SEQ ID NO: 1679 | HUMAN PROTEIN SEQUENCE |
| mD18-030 | SEQ ID NO: 1680 | MOUSE GENOMIC SEQUENCE |
| mR18-030.1 | SEQ ID NO: 1681 | MOUSE mRNA SEQUENCE |
| mP18-030.1 | SEQ ID NO: 1682 | MOUSE PROTEIN SEQUENCE |
| mR18-030.2 | SEQ ID NO: 1683 | MOUSE mRNA SEQUENCE |
| mP18-030.2 | SEQ ID NO: 1684 | MOUSE PROTEIN SEQUENCE |
| hD18-030 | SEQ ID NO: 1685 | HUMAN GENOMIC SEQUENCE |
| hR18-030.1 | SEQ ID NO: 1686 | HUMAN mRNA SEQUENCE |
| hP18-030.1 | SEQ ID NO: 1687 | HUMAN PROTEIN SEQUENCE |
| hR18-030.2 | SEQ ID NO: 1688 | HUMAN mRNA SEQUENCE |
| hP18-030.2 | SEQ ID NO: 1689 | HUMAN PROTEIN SEQUENCE |
| hR18-030.3 | SEQ ID NO: 1690 | HUMAN mRNA SEQUENCE |
| hP18-030.3 | SEQ ID NO: 1691 | HUMAN PROTEIN SEQUENCE |
| mD18-032 | SEQ ID NO: 1692 | MOUSE GENOMIC SEQUENCE |
| mR18-032.1 | SEQ ID NO: 1693 | MOUSE mRNA SEQUENCE |
| mP18-032.1 | SEQ ID NO: 1694 | MOUSE PROTEIN SEQUENCE |
| mR18-032.2 | SEQ ID NO: 1695 | MOUSE mRNA SEQUENCE |
| mP18-032.2 | SEQ ID NO: 1696 | MOUSE PROTEIN SEQUENCE |
| mR18-032.3 | SEQ ID NO: 1697 | MOUSE mRNA SEQUENCE |
| mP18-032.3 | SEQ ID NO: 1698 | MOUSE PROTEIN SEQUENCE |
| mR18-032.4 | SEQ ID NO: 1699 | MOUSE mRNA SEQUENCE |
| mP18-032.4 | SEQ ID NO: 1700 | MOUSE PROTEIN SEQUENCE |
| hD18-032 | SEQ ID NO: 1701 | HUMAN GENOMIC SEQUENCE |
| hR18-032.1 | SEQ ID NO: 1702 | HUMAN mRNA SEQUENCE |
| hP18-032.1 | SEQ ID NO: 1703 | HUMAN PROTEIN SEQUENCE |
| hR18-032.2 | SEQ ID NO: 1704 | HUMAN mRNA SEQUENCE |
| hP18-032.2 | SEQ ID NO: 1705 | HUMAN PROTEIN SEQUENCE |
| hR18-032.3 | SEQ ID NO: 1706 | HUMAN mRNA SEQUENCE |
| hP18-032.3 | SEQ ID NO: 1707 | HUMAN PROTEIN SEQUENCE |
| mD18-035 | SEQ ID NO: 1708 | MOUSE GENOMIC SEQUENCE |
| mR18-035.1 | SEQ ID NO: 1709 | MOUSE mRNA SEQUENCE |
| mP18-035.1 | SEQ ID NO: 1710 | MOUSE PROTEIN SEQUENCE |
| hD18-035 | SEQ ID NO: 1711 | HUMAN GENOMIC SEQUENCE |
| hR18-035.1 | SEQ ID NO: 1712 | HUMAN mRNA SEQUENCE |
| hP18-035.1 | SEQ ID NO: 1713 | HUMAN PROTEIN SEQUENCE |
| hR18-035.2 | SEQ ID NO: 1714 | HUMAN mRNA SEQUENCE |
| hP18-035.2 | SEQ ID NO: 1715 | HUMAN PROTEIN SEQUENCE |
| mD18-039 | SEQ ID NO: 1716 | MOUSE GENOMIC SEQUENCE |
| mR18-039.1 | SEQ ID NO: 1717 | MOUSE mRNA SEQUENCE |
| mP18-039.1 | SEQ ID NO: 1718 | MOUSE PROTEIN SEQUENCE |
| hD18-039 | SEQ ID NO: 1719 | HUMAN GENOMIC SEQUENCE |
| hR18-039.1 | SEQ ID NO: 1720 | HUMAN mRNA SEQUENCE |
| hP18-039.1 | SEQ ID NO: 1721 | HUMAN PROTEIN SEQUENCE |
| hR18-039.2 | SEQ ID NO: 1722 | HUMAN mRNA SEQUENCE |
| hP18-039.2 | SEQ ID NO: 1723 | HUMAN PROTEIN SEQUENCE |
| hR18-039.3 | SEQ ID NO: 1724 | HUMAN mRNA SEQUENCE |
| hP18-039.3 | SEQ ID NO: 1725 | HUMAN PROTEIN SEQUENCE |
| hR18-039.4 | SEQ ID NO: 1726 | HUMAN mRNA SEQUENCE |
| hP18-039.4 | SEQ ID NO: 1727 | HUMAN PROTEIN SEQUENCE |
| hR18-039.5 | SEQ ID NO: 1728 | HUMAN mRNA SEQUENCE |
| hP18-039.5 | SEQ ID NO: 1729 | HUMAN PROTEIN SEQUENCE |
| hR18-039.6 | SEQ ID NO: 1730 | HUMAN mRNA SEQUENCE |
| hP18-039.6 | SEQ ID NO: 1731 | HUMAN PROTEIN SEQUENCE |
| mD19-003 | SEQ ID NO: 1732 | MOUSE GENOMIC SEQUENCE |
| mR19-003.1 | SEQ ID NO: 1733 | MOUSE mRNA SEQUENCE |
| mP19-003.1 | SEQ ID NO: 1734 | MOUSE PROTEIN SEQUENCE |
| hD19-003 | SEQ ID NO: 1735 | HUMAN GENOMIC SEQUENCE |
| hR19-003.1 | SEQ ID NO: 1736 | HUMAN mRNA SEQUENCE |
| hP19-003.1 | SEQ ID NO: 1737 | HUMAN PROTEIN SEQUENCE |
| hR19-003.2 | SEQ ID NO: 1738 | HUMAN mRNA SEQUENCE |
| hP19-003.2 | SEQ ID NO: 1739 | HUMAN PROTEIN SEQUENCE |
| hR19-003.3 | SEQ ID NO: 1740 | HUMAN mRNA SEQUENCE |
| hP19-003.3 | SEQ ID NO: 1741 | HUMAN PROTEIN SEQUENCE |

[0312] The CA sequences were analyzed by Panther™ (Molecular Diagnostics, Palo Alto, Calif.) software designed to detect homologs and enable prediction of molecular function through a system for protein functional classification. Human Gene Ontlogy annotations were prepared in accordance with the Gene Ontology Consortium (Gene Ontology: tool for the unification of biology. The Gene Ontology Consortium Nature Genet. 25: 25-29 (2000)). Similar analysis was carried out by determining IPR information regarding the CA polypeptides from InterPro, which is an integrated documentation resource for protein families, domains and functional sites (Apweiler at al. Bioinformatics 16(12):1145-1150 (2000)).

[0313] The CA sequences may be classified according to the following predicted general classifications of function by Panther™ analysis, human gene ontology and IPR domain information for polypeptides having SEQ ID NOS: 8, 14, 16, 18, 20, 26, 28, 30, 32, 34, 40, 42, 48, 50, 58, 60, 66, 68, 70, 72, 74, 80, 82, 84, 86, 92, 101, 103, 105, 107, 113, 115, 117, 119, 121, 123, 125, 127, 133, 135, 141, 143, 149, 157, 159, 161, 163, 179, 181, 183, 189, 191, 193, 195, 197, 203, 209, 211, 213, 219, 221, 223, 225, 236, 238, 240, 242, 244, 246, 248, 251, 253, 255, 257, 259, 261, 263, 273, 275, 277, 294, 296, 302, 304, 312, 314, 316, 318, 324, 330, 332, 338, 352, 354, 356, 358, 360, 362, 364, 366, 368, 370, 376, 378, 380, 382, 384, 386, 388, 396, 398, 409, 411, 413, 415, 421, 423, 425, 427, 429, 431, 439, 441, 443, 445, 447, 449, 451, 457, 459, 467, 469, 471, 473, 475, 477, 479, 487, 489, 491, 500, 502, 508, 510, 520, 528, 530, 536, 538, 544, 546, 552, 558, 560, 566, 568, 574, 576, 578, 580, 582, 584, 590, 592, 594, 596, 604, 606, 612, 614, 620, 622, 624, 626, 628, 634, 636, 638, 640, 646, 648, 650, 656, 662, 664, 670, 676, 678, 680, 688, 690, 692, 694, 696, 702, 704, 706, 708, 714, 716, 722, 734, 736, 751, 753, 755, 757, 759, 765, 767, 769, 771, 777, 787, 789, 791, 797, 799, 801, 803, 805, 807, 809, 815, 821, 823, 831, 833, 839, 841, 843, 845, 847, 853, 855, 861, 863, 871, 873, 875, 877, 879, 881, 889, 891, 893, 895, 897, 899, 901, 907, 909, 911, 913, 921, 923, 929, 939, 941, 943, 945, 947, 953, 955, 957, 963, 965, 967, 973, 975, 977, 979, 985, 987, 989, 991, 997, 999, 1001, 1007, 1009, 1011, 1013, 1015, 1021, 1023, 1025, 1031, 1037, 1039, 1041, 1043, 1049, 1055, 1061, 1063, 1069, 1071, 1073, 1075, 1081, 1083, 1089, 1095, 1097, 1103, 1105, 1107, 1109, 1111, 1113, 1119, 1121, 1127, 1133, 1135, 1137, 1139, 1141, 1143, 1145, 1147, 1149, 1155, 1161, 1163, 1165, 1173, 1185, 1187, 1189, 1191, 1197, 1199, 1201, 1207, 1209, 1215, 1217, 1219, 1221, 1223, 1239, 1241, 1243, 1245, 1247, 1249, 1251, 1253, 1255, 1257, 1259, 1267, 1269, 1271, 1279, 1285, 1287, 1289, 1291, 1297, 1299, 1301, 1307, 1317, 1319, 1330, 1332, 1334, 1336, 1338, 1340, 1342, 1344, 1346, 1348, 1356, 1358, 1364, 1366, 1368, 1370, 1372, 1378, 1380, 1382, 1388, 1390, 1392, 1394, 1400, 1402, 1404, 1410, 1420, 1426, 1428, 1436, 1438, 1440, 1442, 1448, 1458, 1460, 1462, 1470, 1472, 1474, 1476, 1482, 1488, 1497, 1499, 1501, 1507, 1509, 1511, 1517, 1519, 1521, 1527, 1529, 1537, 1539, 1551, 1553, 1555, 1561, 1563, 1565, 1573, 1575, 1577, 1589, 1591, 1593, 1595, 1609, 1611, 1613, 1619, 1621, 1623, 1625, 1631, 1633, 1635, 1637, 1639, 1649, 1651, 1657, 1665, 1667, 1669, 1671, 1673, 1675, 1677, 1679, 1687, 1689, 1691, 1703, 1705, 1707, 1713, 1715, 1721, 1723, 1725, 1727, 1729, 1731, 1737, 1739, and 1741 as shown in Tables 1-152. The classifications of each protein SEQ ID NO are shown in Tables 1-152 with reference to their SEQ ID NO.

[0314] A CA protein (CAP) has an activity selected from tumor suppressor, low density lipoprotein receptor, G protein coupled receptor, apoptosis inhibitor, ion transport, calcium binding, cell adhesion, signalling, protein kinase receptor, and signal transduction, and any other activity described for a CA protein in Tables 1-152.

[0315] A CA protein (CAP) is expressed on a cell surface, wherein the CA protein is selected from the group consisting of SEQ ID NOS: 8, 14, 16, 18, 20, 26, 28, 30, 32, 34, 40, 42, 48, 50, 58, 60, 66, 68, 70, 72, 74, 80, 82, 84, 86, 92, 101, 103, 105, 107, 113, 115, 117, 119, 121, 123, 125, 127, 133, 135, 141, 143, 149, 157, 159, 161, 163, 179, 181, 183, 189, 191, 193, 195, 197, 203, 209, 211, 213, 219, 221, 223, 225, 236, 238, 240, 242, 244, 246, 248, 251, 253, 255, 257, 259, 261, 263, 273, 275, 277, 294, 296, 302, 304, 312, 314, 316, 318, 324, 330, 332, 338, 352, 354, 356, 358, 360, 362, 364, 366, 368, 370, 376, 378, 380, 382, 384, 386, 388, 396, 398, 409, 411, 413, 415, 421, 423, 425, 427, 429, 431, 439, 441, 443, 445, 447, 449, 451, 457, 459, 467, 469, 471, 473, 475, 477, 479, 487, 489, 491, 500, 502, 508, 510, 520, 528, 530, 536, 538, 544, 546, 552, 558, 560, 566, 568, 574, 576, 578, 580, 582, 584, 590, 592, 594, 596, 604, 606, 612, 614, 620, 622, 624, 626, 628, 634, 636, 638, 640, 646, 648, 650, 656, 662, 664, 670, 676, 678, 680, 688, 690, 692, 694, 696, 702, 704, 706, 708, 714, 716, 722, 734, 736, 751, 753, 755, 757, 759, 765, 767, 769, 771, 777, 787, 789, 791, 797, 799, 801, 803, 805, 807, 809, 815, 821, 823, 831, 833, 839, 841, 843, 845, 847, 853, 855, 861, 863, 871, 873, 875, 877, 879, 881, 889, 891, 893, 895, 897, 899, 901, 907, 909, 911, 913, 921, 923, 929, 939, 941, 943, 945, 947, 953, 955, 957, 963, 965, 967, 973, 975, 977, 979, 985, 987, 989, 991, 997, 999, 1001, 1007, 1009, 1011, 1013, 1015, 1021, 1023, 1025, 1031, 1037, 1039, 1041, 1043, 1049, 1055, 1061, 1063, 1069, 1071, 1073, 1075, 1081, 1083, 1089, 1095, 1097, 1103, 1105, 1107, 1109, 1111, 1113, 1119, 1121, 1127, 1133, 1135, 1137, 1139, 1141, 1143, 1145, 1147, 1149, 1155, 1161, 1163, 1165, 1173, 1185, 1187, 1189, 1191, 1197, 1199, 1201, 1207, 1209, 1215, 1217, 1219, 1221, 1223, 1239, 1241, 1243, 1245, 1247, 1249, 1251, 1253, 1255, 1257, 1259, 1267, 1269, 1271, 1279, 1285, 1287, 1289, 1291, 1297, 1299, 1301, 1307, 1317, 1319, 1330, 1332, 1334, 1336, 1338, 1340, 1342, 1344, 1346, 1348, 1356, 1358, 1364, 1366, 1368, 1370, 1372, 1378, 1380, 1382, 1388, 1390, 1392, 1394, 1400, 1402, 1404, 1410, 1420, 1426, 1428, 1436, 1438, 1440, 1442, 1448, 1458, 1460, 1462, 1470, 1472, 1474, 1476, 1482, 1488, 1497, 1499, 1501, 1507, 1509, 1511, 1517, 1519, 1521, 1527, 1529, 1537, 1539, 1551, 1553, 1555, 1561, 1563, 1565, 1573, 1575, 1577, 1589, 1591, 1593, 1595, 1609, 1611, 1613, 1619, 1621, 1623, 1625, 1631, 1633, 1635, 1637, 1639, 1649, 1651, 1657, 1665, 1667, 1669, 1671, 1673, 1675, 1677, 1679, 1687, 1689, 1691, 1703, 1705, 1707, 1713, 1715, 1721, 1723, 1725, 1727, 1729, 1731, 1737, 1739, and 1741.

[0316] Certain aspects of the present invention are described in greater detail in the non-limiting examples that follow.

### EXAMPLES

[0317] The following examples are put forth so as to provide those of ordinary skill in the art with a complete disclosure and description of how to make and use the present invention, and are not intended to limit the scope of what the inventors regard as their invention nor are they intended to represent that the experiments below are all and only experiments performed. Efforts have been made to ensure accuracy with respect to numbers used (e.g. amounts, temperature, etc.) but some experimental errors and deviations should be accounted for. Unless indicated otherwise, parts are parts by weight, molecular weight is weight average molecular weight, temperature is in degrees Celsius, and pressure is at or near atmospheric.

### Example 1

### Insertion Site Analysis Following Tumor Induction in Mice

[0318] Tumors are induced in mice using either mouse mammary tumor virus (MMTV) or murine leukemia virus (MLV). MMTV causes mammary adenocarcinomas and MLV causes a variety of different hematopoetic malignancies (primarily T- or B-cell lymphomas). Three routes of infection are used: (1) injection of neonates with purified virus preparations, (2) infection by milk-borne virus during nursing, and (3) genetic transmission of pathogenic proviruses via the germ-line (Akvr1 and/or Mtv2). The type of malignancy present in each affected mouse is determined by histological analysis of H&E-stained thin sections of formalin-fixed, paraffin-embedded biopsy samples. Host DNA sequences flanking all clonally-integrated proviruses in each tumor are recovered by nested anchored-PCR using two virus-specific primers and two primers specific for a 40 bp double stranded DNA anchor ligated to restriction enzyme digested tumor DNA. Amplified bands representing host/virus junction fragments are cloned and sequenced. Then the host sequences (called “tags”) are used to BLAST analyze the Celera mouse genomic sequence. For each individual tag, three parameters are recorded: (1) the mouse chromosome assignment, (2) base pair coordinates at which the integration occurred, and (3) provirus orientation. Using this information, all available tags from all analyzed tumors are mapped to the mouse genome. To identify the protooncogene targets of provirus insertion mutation, the provirus integration pattern at each cluster of integrants is analyzed relative to the locations of all known genes in the transcriptome. The presence of provirus at the same locus in two or more independent tumors is prima facie evidence that a protooncogene is present at or very near the proviral integration sites. This is because the genome is too large for random integrations to result in observable clustering. Any clustering that is detected is unequivocal evidence for biological selection during tumorigenesis. In order to identify the human orthologs of the protooncogene targets of provirus insertion mutation, a comparative analysis of syntenic regions of the mouse and human genomes is performed.

[0319] An example of PCR amplification of host/virus junction fragments is presented in FIG. 1. Lane 1 contains the amplification products from normal control DNA and lane 2 contains the amplification products from tumor DNA. The bands result from 5′ host/virus junction fragments present in the DNA samples. Lane 1 has bands from the env/3′ LTR junctions from all proviruses (upper) and the host/5′ LTR from the pathogenic endogenous Mtv2 provirus present in this particular mouse strain. This endogenous provirus is detected because its sequence is identical to the new clonally integrated proviruses in the tumor. All four new clonally integrated proviruses known to be in this tumor are readily detected.

### Example 2

### Analysis of Quantitative RT-PCR: Comparative C_{T} Method

[0320] The expression level of target genes is quantified using the ABI PRISM 7900HT Sequence Detection System (Applied Biosystems, California). The method is based on the quantitation of the initial copy number of target template in comparison to that of a reference (normalizer) housekeeper gene (Pre-Developed TaqMan® Assay Reagents Gene Expression Quantification Protocol, Applied Biosystems, 2001). Accumulation of DNA product with each PCR cycle is related to amplicon efficiency and the initial template concentration. Therefore the amplification efficiency of both the target and the normalizer must be approximately equal. The threshold cycle (C_{T}), which is dependent on the starting template copy number and the DNA amplification efficiency, is a PCR cycle during which PCR product growth is exponential. With a similar dynamic range for the target and normalizer, the comparative C_{T} method is applicable.

[0321] An example of the comparative C_{T} method of gene expression for quantitative RT-PCR is shown in FIG. 2. In the first step, assays are performed in quadruplicate on a normal tissue and several sample tissues. In these tissues, the means and standard deviations of C_{T} values are determined for housekeeper genes (chosen as controls if shown to be biologically stable among various samples, irrespective of disease state) and for the target gene. FIG. 2 shows an example of average C_{T} values for a housekeeper gene and target gene. These values can fall within a range from upper teens to 40 depending on the intrinsic expression level of the gene in the particular tissue. The coefficient of variance of all replicate sets cannot exceed 1.5%.

[0322] An assessment of how the ACT changes with template dilution verifies that the efficiencies of the target and housekeeper amplicons are approximately equal if the log input amount of template RNA versus ACT plot has a slope <0.10. With the relative efficiencies verified for target and housekeeper, the ΔΔC_{T} comparative calculation becomes valid, as mentioned above. An example of the calculated difference between the C_{T} values of target and housekeeper genes (ΔC_{T}) for various samples is shown in FIG. 3. The ΔΔC_{T} is calculated for each sample by subtracting its ΔC_{T} value from the ΔC_{T} value of the baseline (calibrator) sample. If the expression is increased in some samples and decreased in others, ΔΔC_{T} will be a mixture of negative and positive values. The final step in the calculation is to transform these values to absolute values. The formula for this is:

Comparative expression level=2^{-ΔΔCT}

[0323] The final value for the calibrator should always be one. FIG. 4 shows the ΔΔC_{T} and comparative expression level for each sample from FIG. 3.

### Example 3

### Detection of Elevated Levels of cDNA Associated with Cancer using Arrays

[0324] cDNA sequences representing a variety of candidate CA genes to be screened for differential expression in cancer are assayed by hybridization on polynucleotide arrays. The cDNA sequences include cDNA clones isolated from cell lines or tissues of interest. The cDNA sequences analyzed also include polynucleotides comprising sequence overlap with sequences in the Unigene database, and which encode a variety of gene products of various origins, functionality, and levels of characterization. cDNAs are spotted onto reflective slides (Amersham) according to methods well known in the art at a density of 9,216 spots per slide representing 4,068 sequences (including controls) spotted in duplicate, with approximately 0.8 μl of an approximately 200 ng/μl solution of cDNA.

[0325] PCR products of selected cDNA clones corresponding to the gene products of interest are prepared in a 50% DMSO solution. These PCR products are spotted onto Amersham aluminum microarray slides at a density of 9216 clones per array using a Molecular Dynamics Generation III spotting robot. Clones are spotted in duplicate, for a total of 4608 different sequences per chip.

[0326] cDNA probes are prepared from total RNA obtained by laser capture microdissection (LCM, Arcturus Enginering Inc., Mountain View, Calif.) of tumor tissue samples and normal tissue samples isolated from patients.

[0327] Total RNA is first reverse transcribed into cDNA using a primer containing a T7 RNA polymerase promoter, followed by second strand DNA synthesis. cDNA is then transcribed in vitro to produce antisense RNA using the T7 promoter-mediated expression (see, e.g., Luo et al (1999) Nature Med 5:117-122), and the antisense RNA is then converted into cDNA. The second set of cDNAs are again transcribed in vitro, using the T7 promoter, to provide antisense RNA. This antisense RNA is then fluorescently labeled, or the RNA is again converted into cDNA, allowing for a third round of T7-mediated amplification to produce more antisense RNA. Thus the procedure provides for two or three rounds of in vitro transcription to produce the final RNA used for fluorescent labeling. Probes are labeled by making fluorescently labeled cDNA from the RNA starting material. Fluorescently labeled cDNAs prepared from the tumor RNA sample are compared to fluorescently labeled cDNAs prepared from normal cell RNA sample. For example, the cDNA probes from the normal cells are labeled with Cy3 fluorescent dye (green) and the cDNA probes prepared from suspected cancer cells are labeled with Cy5 fluorescent dye (red).

[0328] The differential expression assay is performed by mixing equal amounts of probes from tumor cells and normal cells of the same patient. The arrays are prehybridized by incubation for about 2 hrs at 60° C. in 5×SSC, 0.2% SDS, 1 mM EDTA, and then washing three times in water and twice in isopropanol. Following prehybridization of the array, the probe mixture is then hybridized to the array under conditions of high stringency (overnight at 42° C. in 50% formamide, 5×SSC, and 0.2% SDS. After hybridization, the array is washed at 55° C. three times as follows: 1) first wash in 1×SSC/0.2% SDS; 2) second wash in 0.1×SSC/0.2% SDS; and 3) third wash in 0.1×SSC.

[0329] The arrays are then scanned for green and red fluorescence using a Molecular Dynamics Generation III dual color laser-scanner/detector. The images are processed using BioDiscovery Autogene software, and the data from each scan set normalized. The experiment is repeated, this time labeling the two probes with the opposite color in order to perform the assay in both “color directions.” Each experiment is sometimes repeated with two more slides (one in each color direction). The data from each scan is normalized, and the level of fluorescence for each sequence on the array expressed as a ratio of the geometric mean of 8 replicate spots/genes from the four arrays or 4 replicate spots/gene from 2 arrays or some other permutation.

[0330] Normalization: The objective of normalization is to generate a cDNA library in which all transcripts expressed in a particular cell type or tissue are equally represented (S. M. Weissman, Mol. Biol. Med. 4(3):133-143 (1987); Patanjali, et al., Proc. Natl. Acad. Sci. USA 88(5):1943-1947 (1991)), and therefore isolation of as few as 30,000 recombinant clones in an optimally normalized library may represent the entire gene expression repertoire of a cell, estimated to number 10,000 per cell.

[0331] Total RNA is extracted from harvested cells using RNeasy™ Protect Kit (Qiagen, Valencia, Calif.), following manufacturer's recommended procedures. RNA is quantified using RiboGreen™ RNA quantification kit (Molecular Probes, Inc. Eugene, Oreg.). One μg of total RNA is reverse transcribed and PCR amplified using SMART™ PCR cDNA synthesis kit (ClonTech, Palo Alto, Calif.). The cDNA products are size-selected by agarose gel electrophoresis using standard procedures (Sambrook, J. T., et al. Molecular Cloning: A Laboratory Manual, 2d ed., Cold Spring Harbor Laboratory Press, NY). The cDNA is extracted using Bio 101 Geneclean® II kit (Qbiogene, Carlsbad, Calif.). Normalization of the cDNA is carried out using kinetics of hybridization principles: 1.0 μg of cDNA is denatured by heat at 100° C. for 10 minutes, then incubated at 42° C. for_{—}42 hours in the presence of 120 mM NaCl, 10 mM Tris.HCl (pH=8.0), 5 mM EDTA.Na+ and 50% form amide. Single-stranded cDNA (“normalized”) is purified by hydroxyapatite chromatography (#130-0520, BioRad, Hercules, Calif.) following the manufacturer's recommended procedures, amplified and converted to double-stranded cDNA by three cycles of PCR amplification, and cloned into plasmid vectors using standard procedures (Sambrook, J. T., et al. Molecular Cloning: A Laboratory Manual, 2d ed., Cold Spring Harbor Laboratory Press, NY). All primers/adaptors used in the normalization and cloning process are provided by the manufacturer in the SMART™ PCR cDNA synthesis kit (ClonTech, Palo Alto, Calif.). Supercompetent cells (XL-2 Blue Ultracompetent Cells, Stratagene, Calif.) are transfected with the normalized cDNA libraries, plated on solid media and grown overnight at 36° C.

[0332] The sequences of 10,000 recombinants per normalized library are analyzed by capillary sequencing using the ABI PRISM 3700 DNA Analyzer (Applied Biosystems, California). To determine the representation of transcripts in a library, BLAST analysis is performed on the clone sequences to assign transcript identity to each isolated clone, i.e., the sequences of the isolated polynucleotides are first masked to eliminate low complexity sequences using the XBLAST masking program (Claverie “Effective Large-Scale Sequence Similarity Searches,” Computer Methods for Macromolecular Sequence Analysis, Doolittle, ed., Meth. Enzymol. 266:212-227 Academic Press, NY, N.Y. (1996); see particularly Claverie, in “Automated DNA Sequencing and Analysis Techniques” Adams et al., eds., Chap. 36, p. 267 Academic Press, San Diego, 1994 and Claverie et al. Comput. Chem. (1993) 17:191). Generally, masking does not influence the final search results, except to eliminate sequences of relative little interest due to their low complexity, and to eliminate multiple “hits” based on similarity to repetitive regions common to multiple sequences, e.g., Alu repeats. The remaining sequences are then used in a BLASTN vs. GenBank search. The sequences are also used as query sequence in a BLASTX vs. NRP (non-redundant proteins) database search.

[0333] Automated sequencing reactions are performed using a Perkin-Elmer PRISM Dye Terminator Cycle Sequencing Ready Reaction Kit containing AmpliTaq DNA Polymerase, FS, according to the manufacturer's directions. The reactions are cycled on a GeneAmp PCR System 9600 as per manufacturer's instructions, except that they are annealed at 20° C. or 30° C. for one minute. Sequencing reactions are ethanol precipitated, pellets are resuspended in 8 microliters of loading buffer, 1.5 microliters is loaded on a sequencing gel, and the data is collected by an ABI PRISM 3700 DNA Sequencer. (Applied Biosystems, Foster City, Calif.).

[0334] The number of times a sequence is represented in a library is determined by performing sequence identity analysis on the cloned cDNA sequences and assigning transcript identity to each isolated clone. First, each sequence is checked to determine if it is a bacterial, ribosomal, or mitochondrial contaminant. Such sequences are excluded from the subsequent analysis. Second, sequence artifacts, such as vector and repetitive elements, are masked and/or removed from each sequence.

[0335] The remaining sequences are compared via BLAST (Altschul et. al, J. Mol. Biol., 215:40, 1990) to GenBank and EST databases for gene identification and are compared with each other via FastA (Pearson & Lipman, PNAS, 85:2444, 1988) to calculate the frequency of cDNA appearance in the normalized cDNA library. The sequences are also searched against the GenBank and GeneSeq nucleotide databases using the BLASTN program (BLASTN 1.3 MP: Altschul et al., J. Mol. Bio. 215:403, 1990). Fourth, the sequences are analyzed against a non-redundant protein (NRP) database with the BLASTX program (BLASTX 1.3 MP: Altschul et al., supra). This protein database is a combination of the Swiss-Prot, PIR, and NCBI GenPept protein databases. The BLASTX program is run using the default BLOSUM-62 substitution matrix with the filter parameter: “xnu+seg”. The score cutoff utilized is 75. Assembly of overlapping clones into contigs is done using the program Sequencher (Gene Codes Corp.; Ant Arbor, Mich.). The assembled contigs are analyzed using the programs in the GCG package (Genetic Computer Group, University Research Park, 575 Science Drive, Madison, Wis. 53711) Suite Version 10.1.

### Example 4

### Detection of CA-Sequences in Human Cancer Cells and Tissues

[0336] DNA from prostate and breast cancer tissues and other human cancer tissues, human colon, normal human tissues including non-cancerous prostate, and from other human cell lines are extracted following the procedure of Delli Bovi et al. (1986, Cancer Res. 46:6333-6338). The DNA is resuspended in a solution containing 0.05 M Tris HCl buffer, pH 7.8, and 0.1 mM EDTA, and the amount of DNA recovered is determined by microfluorometry using Hoechst 33258 dye. Cesarone, C. et al., Anal Biochem 100:188-197 (1979).

[0337] Polymerase chain reaction (PCR) is performed using Taq polymerase following the conditions recommended by the manufacturer (Perkin Elmer Cetus) with regard to buffer, Mg²⁺, and nucleotide concentrations. Thermocycling is performed in a DNA cycler by denaturation at 94° C. for 3 rain. followed by either 35 or 50 cycles of 94° C. for 1.5 min., 50° C. for 2 min. and 72° C. for 3 min. The ability of the PCR to amplify the selected regions of the CA gene is tested by using a cloned CA polynucleotide(s) as a positive template(s). Optimal Mg²⁺, primer concentrations and requirements for the different cycling temperatures are determined with these templates. The master mix recommended by the manufacturer is used. To detect possible contamination of the master mix components, reactions without template are routinely tested.

[0338] Southern blotting and hybridization are performed as described by Southern, E. M., (J. Mol. Biol. 98:503-517, 1975), using the cloned sequences labeled by the random primer procedure (Feinberg, A. P., et al., 1983, Anal. Biochem. 132:6-13). Prehybridization and hybridization are performed in a solution containing 6×SSPE, 5% Denhardt's, 0.5% SDS, 50% formamide, 100 μg/ml denaturated salmon testis DNA, incubated for 18 hrs at 42° C., followed by washings with 2×SSC and 0.5% SDS at room temperature and at 37° C. and finally in 0.1×SSC with 0.5% SDS at 68° C. for 30 min (Sambrook et al., 1989, in “Molecular Cloning: A Laboratory Manual”, Cold Spring Harbor Lab. Press). For paraffin-embedded tissue sections the conditions described by Wright and Manos (1990, in “PCR Protocols”, Innis et al., eds., Academic Press, pp. 153-158) are followed using primers designed to detect a 250 bp sequence.

### Example 5

### Expression of Cloned Polynucleotides in Host Cells

[0339] To study the protein products of CA genes, restriction fragments from CA DNA are cloned into the expression vector pMT2 (Sambrook, et al., Molecular Cloning: A Laboratory Manual, Cold Spring Harbor Laboratory Press pp 16.17-16.22 (1989)) and transfected into COS cells grown in DMEM supplemented with 10% FCS. Transfections are performed employing calcium phosphate techniques (Sambrook, et al (1989) pp. 16.32-16.40, supra) and cell lysates are prepared forty-eight hours after transfection from both transfected and untransfected COS cells. Lysates are subjected to analysis by immunoblotting using anti-peptide antibody.

[0340] In immunoblotting experiments, preparation of cell lysates and electrophoresis are performed according to standard procedures. Protein concentration is determined using BioRad protein assay solutions. After semi-dry electrophoretic transfer to nitrocellulose, the membranes are blocked in 500 mM NaCl, 20 mM Tris, pH 7.5, 0.05% Tween-20 (TTBS) with 5% dry milk. After washing in TTBS and incubation with secondary antibodies (Amersham), enhanced chemiluminescence (ECL) protocols (Amersham) are performed as described by the manufacturer to facilitate detection.

### Example 6

### Generation of Antibodies Against Polypeptides

[0341] Polypeptides, unique to CA genes are synthesized or isolated from bacterial or other (e.g., yeast, baculovirus) expression systems and conjugated to rabbit serum albumin (RSA) with m-maleimido benzoic acid N-hydroxysuccinimide ester (MBS) (Pierce, Rockford, Ill.). Immunization protocols with these peptides are performed according to standard methods. Initially, a pre-bleed of the rabbits is performed prior to immunization. The first immunization includes Freund's complete adjuvant and 500 μg conjugated peptide or 100 μg purified peptide. All subsequent immunizations, performed four weeks after the previous injection, include Freund's incomplete adjuvant with the same amount of protein. Bleeds are conducted seven to ten days after the immunizations.

[0342] For affinity purification of the antibodies, the corresponding CA polypeptide is conjugated to RSA with MBS, and coupled to CNBr-activated Sepharose (Pharmacia, Uppsala, Sweden). Antiserum is diluted 10-fold in 10 mM Tris-HCl, pH 7.5, and incubated overnight with the affinity matrix. After washing, bound antibodies are eluted from the resin with 100 mM glycine, pH 2.5.

### Example 7

### Generation of Monoclonal Antibodies Against a CA Polypeptide

[0343] A non-denaturing adjuvant (Ribi, R730, Corixa, Hamilton Mont.) is rehydrated to 4 ml in phosphate buffered saline. 100 μl of this rehydrated adjuvant is then diluted with 400 μl of Hank's Balanced Salt Solution and this is then gently mixed with the cell pellet used for immunization. Approximately 500 μg conjugated peptide or 100 μg purified peptide and Freund's complete are injected into Balb/c mice via foot-pad, once a week. After 6 weeks of weekly injection, a drop of blood is drawn from the tail of each immunized animal to test the titer of antibodies against CA polypeptides using FACS analysis. When the titer reaches at least 1:2000, the mice are sacrificed in a CO₂ chamber followed by cervical dislocation. Lymph nodes are harvested for hybridoma preparation. Lymphocytes from mice with the highest titer are fused with the mouse myeloma line X63-Ag8.653 using 35% polyethylene glycol 4000. On day 10 following the fusion, the hybridoma supernatants are screened for the presence of CAP-specific monoclonal antibodies by fluorescence activated cell sorting (FACS). Conditioned medium from each hybridoma is incubated for 30 minutes with a combined aliquot of PC3, Colo-205, LnCap, or Panc-1 cells. After incubation, the cell samples are washed, resuspended in 0.1 ml diluent and incubated with 1 μg/ml of FITC conjugated F(ab′)2 fragment of goat anti-mouse IgG for 30 min at 4° C. The cells are washed, resuspended in 0.5 ml FACS diluent and analyzed using a FACScan cell analyzer (Becton Dickinson; San Jose, Calif.). Hybridoma clones are selected for further expansion, cloning, and characterization based on their binding to the surface of one or more of cell lines which express the CA polypeptide as assessed by FACS. A hybridoma making a monoclonal antibody designated mAbCA which binds an antigen designated Ag-CA.x and an epitope on that antigen designated Ag-CA.x. 1 is selected.

### Example 8

### ELISA Assay for Detecting CA Related Antigens

[0344] To test blood samples for antibodies that bind specifically to recombinantly produced CA antigens, the following procedure is employed. After a recombinant CA related protein is purified, the recombinant protein is diluted in PBS to a concentration of 5 μg/ml (500 ng/100 μl). 100 microliters of the diluted antigen solution is added to each well of a 96-well Immulon 1 plate (Dynatech Laboratories, Chantilly, Va.), and the plate is then incubated for 1 hour at room temperature, or overnight at 4° C., and washed 3 times with 0.05% Tween 20 in PBS. Blocking to reduce nonspecific binding of antibodies is accomplished by adding to each well 200 μl of a 1% solution of bovine serum albumin in PBS/Tween 20 and incubation for 1 hour. After aspiration of the blocking solution, 100 μl of the primary antibody solution (anticoagulated whole blood, plasma, or serum), diluted in the range of 1/16 to 1/2048 in blocking solution, is added and incubated for 1 hour at room temperature or overnight at 4° C. The wells are then washed 3 times, and 100 μl of goat anti-human IgG antibody conjugated to horseradish peroxidase (Organon Teknika, Durham, N.C.), diluted 1/500 or 1/1000 in PBS/Tween 20, 100 μl of o-phenylenediamine dihydrochloride (OPD, Sigma) solution is added to each well and incubated for 5-15 minutes. The OPD solution is prepared by dissolving a 5 mg OPD tablet in 50 ml 1% methanol in H₂O and adding 50 μl 30% H₂O₂ immediately before use. The reaction is stopped by adding 25 l of 4M H₂SO₄. Absorbances are read at 490 nm in a microplate reader (Bio-Rad).

### Example 9

### Identification and Characterization of CA Antigen on Cancer Cell Surface

[0345] A cell pellet of proximately 25 ul packed cell volume of a cancer cell preparation is lysed by first diluting the cells to 0.5 ml in water followed by freezing and thawing three times. The solution is centrifuged at 14,000 rpm. The resulting pellet, containing the cell membrane fragments, is resuspended in 50 μl of SDS sample buffer (Invitrogen, Carlsbad, Calif.). The sample is heated at 80° C. for 5 minutes and then centrifuged for 2 minutes at 14,000 rpm to remove any insoluble materials.

[0346] The samples are analyzed by Western blot using a 4 to 20% polyacrylamide gradient gel in Tris-Glycine SDS (Invitrogen; Carlsbad Calif.) following the manufacturer's directions. Ten microliters of membrane sample are applied to one lane on the polyacrylamide gel. A separate 10 μL sample is reduced first by the addition of 2 μL of dithiothreitol (100 mM) with heating at 80° C. for 2 minutes and then loaded into another lane. Pre-stained molecular weight markers SeeBlue Plus2 (Invitrogen; Carlsbad, Calif.) are used to assess molecular weight on the gel. The gel proteins are transferred to a nitrocellulose membrane using a transfer buffer of 14.4 g/l glycine, 3 g/l of Tris Base, 10% methanol, and 0.05% SDS. The membranes are blocked, probed with a CAP-specific monoclonal antibody (at a concentration of 0.5 ug/ml), and developed using the Invitrogen WesternBreeze Chromogenic Kit-AntiMouse according to the manufacturer's directions. In the reduced sample of the tumor cell membrane samples, a prominent band is observed migrating at a molecular weight within about 10% of the predicted molecular weight of the corresponding CA protein.

### Example 10

### Preparation of Vaccines

[0347] The present invention also relates to a method of stimulating an immune response against cells that express CA polypeptides in a patient using CA polypeptides of the invention that act as an antigen produced by or associated with a malignant cell. This aspect of the invention provides a method of stimulating an immune response in a human against cancer cells or cells that express CA polynucleotides and polypeptides. The method comprises the step of administering to a human an immunogenic amount of a polypeptide comprising: (a) the amino acid sequence of a huma CA protein or (b) a mutein or variant of a polypeptide comprising the amino acid sequence of a human endogenous retrovirus CA protein.

### Example 11

### Generation of Transgenic Animals Expressing Polypeptides as a Means for Testing Therapeutics

[0348] CA nucleic acids are used to generate genetically modified non-human animals, or site specific gene modifications thereof, in cell lines, for the study of function or regulation of prostate tumor-related genes, or to create animal models of diseases, including prostate cancer. The term “transgenic” is intended to encompass genetically modified animals having an exogenous CA gene(s) that is stably transmitted in the host cells where the gene(s) may be altered in sequence to produce a modified protein, or having an exogenous CA LTR promoter operably linked to a reporter gene. Transgenic animals may be made through a nucleic acid construct randomly integrated into the genome. Vectors for stable integration include plasmids, retroviruses and other animal viruses, YACs, and the like. Of interest are transgenic mammals, e.g. cows, pigs, goats, horses, etc., and particularly rodents, e.g. rats, mice, etc.

[0349] The modified cells or animals are useful in the study of CA gene function and regulation. For example, a series of small deletions and/or substitutions may be made in the CA genes to determine the role of different genes in tumorigenesis. Specific constructs of interest include, but are not limited to, antisense constructs to block CA gene expression, expression of dominant negative CA gene mutations, and over-expression of a CA gene. Expression of a CA gene or variants thereof in cells or tissues where it is not normally expressed or at abnormal times of development is provided. In addition, by providing expression of proteins derived from CA in cells in which it is otherwise not normally produced, changes in cellular behavior can be induced.

[0350] DNA constructs for random integration need not include regions of homology to mediate recombination. Conveniently, markers for positive and negative selection are included. For various techniques for transfecting mammalian cells, see Keown et al., Methods in Enzymology 185:527-537 (1990).

[0351] For embryonic stem (ES) cells, an ES cell line is employed, or embryonic cells are obtained freshly from a host, e.g. mouse, rat, guinea pig, etc. Such cells are grown on an appropriate fibroblast-feeder layer or grown in the presence of appropriate growth factors, such as leukemia inhibiting factor (LIF). When ES cells are transformed, they may be used to produce transgenic animals. After transformation, the cells are plated onto a feeder layer in an appropriate medium. Cells containing the construct may be detected by employing a selective medium. After sufficient time for colonies to grow, they are picked and analyzed for the occurrence of integration of the construct. Those colonies that are positive may then be used for embryo manipulation and blastocyst injection. Blastocysts are obtained from 4 to 6 week old superovulated females. The ES cells are trypsinized, and the modified cells are injected into the blastocoel of the blastocyst. After injection, the blastocysts are returned to each uterine horn of pseudopregnant females. Females are then allowed to go to term and the resulting chimeric animals screened for cells bearing the construct. By providing for a different phenotype of the blastocyst and the ES cells, chimeric progeny can be readily detected.

[0352] The chimeric animals are screened for the presence of the modified gene and males and females having the modification are mated to produce homozygous progeny. If the gene alterations cause lethality at some point in development, tissues or organs are maintained as allogeneic or congenic grafts or transplants, or in in vitro culture. The transgenic animals may be any non-human mammal, such as laboratory animals, domestic animals, etc. The transgenic animals are used in functional studies, drug screening, etc., e.g. to determine the effect of a candidate drug on prostate cancer, to test potential therapeutics or treatment regimens, etc.

### Example 12

### Diagnostic Imaging Using CA Specific Antibodies

[0353] The present invention encompasses the use of antibodies to CA polypeptides to accurately stage cancer patients at initial presentation and for early detection of metastatic spread of cancer. Radioimmunoscintigraphy using monoclonal antibodies specific for CA polypeptides can provide an additional cancer-specific diagnostic test. The monoclonal antibodies of the instant invention are used for histopathological diagnosis of carcinomas.

[0354] Subcutaneous human xenografts of cancer cells in nude mice is used to test whether a technetium-99m (^{99m}Tc)-labeled monoclonal antibody of the invention can successfully image the xenografted cancer by external gamma scintography as described for seminoma cells by Marks, et al., Brit. J. Urol. 75:225 (1995). Each monoclonal antibody specific for a CA polypeptide is purified from ascitic fluid of BALB/c mice bearing hybridoma tumors by affinity chromatography on protein A-Sepharose. Purified antibodies, including control monoclonal antibodies such as an avidin-specific monoclonal antibody (Skea, et al., J. Immunol. 151:3557 (1993)) are labeled with ^{99m}Tc following reduction, using the methods of Mather, et al., J. Nucl. Med. 31:692 (1990) and Zhang et al., Nucl. Med. Biol. 19:607 (1992). Nude mice bearing human cancer cells are injected intraperitoneally with 200-500 μCi of ^{99m}Tc-labeled antibody. Twenty-four hours after injection, images of the mice are obtained using a Siemens ZLC3700 gamma camera equipped with a 6 mm pinhole collimator set approximately 8 cm from the animal. To determine monoclonal antibody biodistribution following imaging, the normal organs and tumors are removed, weighed, and the radioactivity of the tissues and a sample of the injectate are measured. Additionally, CA-specific antibodies conjugated to antitumor compounds are used for cancer-specific chemotherapy.

### Example 13

### Immunohistochemical Methods

[0355] Frozen tissue samples from cancer patients are embedded in an optimum cutting temperature (OCT) compound and quick-frozen in isopentane with dry ice. Cryosections are cut with a Leica 3050 CM mictrotome at thickness of 5 μm and thaw-mounted on vectabound-coated slides. The sections are fixed with ethanol at −20° C. and allowed to air dry overnight at room temperature. The fixed sections are stored at −80° C. until use. For immunohistochemistry, the tissue sections are retrieved and first incubated in blocking buffer (PBS, 5% normal goat serum, 0.1% Tween 20) for 30 minutes at room temperature, and then incubated with the CA protein-specific monoclonal antibody and control monoclonal antibodies diluted in blocking buffer (1 μg/ml) for 120 minutes. The sections are then washed three times with the blocking buffer. The bound monoclonal antibodies are detected with a goat anti-mouse IgG+IgM (H+L) F(ab′)²-peroxidase conjugates and the peroxidase substrate diaminobenzidine (1 mg/ml, Sigma Catalog No. D 5637) in 0.1 M sodium acetate buffer pH 5.05 and 0.003% hydrogen peroxide (Sigma cat. No. H1009). The stained slides are counter-stained with hematoxylin and examined under Nikon microscope.

[0356] Monoclonal antibody against a CA protein (antigen) is used to test reactivity with various cell lines from different types of tissues. Cells from different established cell lines are removed from the growth surface without using proteases, packed and embedded in OCT compound. The cells are frozen and sectioned, then stained using a standard IHC protocol. The CellArray™ technology is described in WO 01/43869. Normal tissue (human) obtained by surgical resection are frozen and mounted. Cryosections are cut with a Leica 3050 CM mictrotome at thickness of 5 μm and thaw-mounted on vectabound-coated slides. The sections are fixed with ethanol at −20° C. and allowed to air dry overnight at room temperature. PolyMICA™ Detection kit is used to determine binding of a CA-specific monoclonal antibody to normal tissue. Primary monoclonal antibody is used at a final concentration of 1 μg/ml.

[0357] All publications and patent applications cited in this specification are herein incorporated by reference as if each individual publication or patent application were specifically and individually indicated to be incorporated by reference.

[0358] Although the foregoing invention has been described in some detail by way of illustration and example for purposes of clarity of understanding, it will be readily apparent to those of ordinary skill in the art in light of the teachings of this invention that certain changes and modifications may be made thereto without departing from the spirit or scope of the appended claims.

What is claimed is:

1. A method for diagnosing colon or prostate cancer comprising:
a) determining the level of an expression product in a patient colon or prostate sample;
said expression product comprising a nucleic acid comprising a sequence at least 95% identical to SEQ ID NO:669; and
b) comparing said level of the expression product in (a) to a level of the expression product in a second sample, said second sample comprising a normal tissue, wherein a difference between the level of the expression products in (a) and the level of the expression products in the second sample indicates that the patient has colon or prostate cancer;
wherein said nucleotide sequence at least 95% identical to SEQ ID NO:669 encodes a polypeptide with serine/threonine kinase activity.

2. The method of claim 1 wherein the expression product encodes a polypeptide comprising SEQ ID NO:670.

3. The method of claim 2 wherein the control is a normal tissue of the same tissue type as in the patient sample.

4. The method of claim 2 wherein the level of the expression product in the sample is increased at least 50% relative to the control.

5. The method of claim 2 wherein the level of the expression product in the sample is increased at least 100% relative to the control.

6. The method of claim 1 wherein the expression product is a mRNA having a sequence at least 98% identical to SEQ ID NO: 669.

7. The method of claim 1 wherein the expression product is a mRNA having a sequence at least 99% identical to SEQ ID NO: 669.

8. The method of claim 1 wherein the expression product is a mRNA having a sequence of SEQ ID NO: 669.

9. The method of claim 1 wherein the level of the expression product in the sample is increased at least 50% relative to the control.

10. The method of claim 1 wherein the level of the expression product in the sample is increased at least 100% relative to the control.

11. A method for diagnosing colon cancer comprising detecting evidence of differential expression of STK4 in a patient colon or prostate sample wherein evidence of differential expression of STK4 indicates that the patient has colon or prostate cancer.

12. The method of claim 11, wherein STK4 gene expression in the patient sample is up-regulated relative to STK4 gene expression in normal tissue.

13. The method of claim 11 wherein evidence of differential expression is detected by measuring the level of an expression product of STK4.

14. The method of claim 13 wherein the expression product encodes a polypeptide comprising SEQ ID NO:670.

15. The method of claim 13 wherein the expression product is a polypeptide or mRNA.

16. The method of claim 13 wherein the expression product is a mRNA having a sequence at least 95% identical to SEQ ID NO: 669.

17. The method of claim 13 wherein the expression product is a mRNA having a sequence at least 99% identical to SEQ ID NO: 669.

18. The method of claim 13 wherein the expression product is a mRNA having a sequence of SEQ ID NO: 669.

19. The method of claim 13 wherein the level of expression product in the patient sample is compared to a control.

20. A method of diagnosing colon or prostate cancer comprising:
a) determining the level of a nucleotide sequence that hybridizes under highly stringent conditions to SEQ ID NO:669, or a complement thereof, in a patient colon or prostate sample;
wherein hybridization is performed at 50° C. to 60° C. in 5×SSC (9 mM saline/0.9 mM sodium citrate); and
b) comparing said level of nucleotide sequence in (a) to a level of the nucleotide sequence in a second sample, said second sample comprising a negative control comprising non-cancerous tissue;
wherein an increase of at least 50% between the level of the nucleotide sequence in (a) and the level of the nucleotide sequence in the second sample indicates that the patient has colon or prostate cancer.

21. The method of claim 20 wherein the level of the nucleotide sequence in (a) is increased at least 100% relative to the control.

22. The method of claim 20 wherein the level of the nucleotide sequence in (a) is increased at least 300% relative to the control.

The application's sequence listing, which the Patent Office published only in electronic form, follows.

SEQUENCE LISTING (1741 sequences)

SEQ ID NO: 1 - DNA, 57889 bp, Mus musculus
  misc_feature (1)...(57889): n = A,T,C or G
gcacaaaatcactcccacccattccttaaagtaagaaaaagcagaggtaagccaagaggtaaaattgccaacaatgatgggttctattcgagttccattgaggcttaaaacctggcattagatgtaaagaattgaggaatcatcatgcatcaacagcatggtttcaggaacacagagctcttcagttctcactagtggaagcacccccagccacaggaacatccatgtcctcatagctctgcttgttttaaattgctctggtcagccgctctgcgacccacagctgttgtcgatgatcctggggaaacaaacgaacagaccctctcgcccacgtcaacaccagtgggcaatgatttccacgcccttatgacaatctgattcacctgctcaaacacctgcactggatatcctgtctgttattgtgcaaagcgaccttgatcaagcagcatatctctatcccatgctggatttcctgcagcagagttagccgctgcctgttcatttgcaaattcaacaaggaaggctttccaatctaaatactgcccaggtgaaaggcatgcctttaccaagcctgcccaatcggacggcgtcatgcagtgtctattcaatgcctctacttgagccacagtataggaggcagttaagccgtatatctgcacagactcagccaaattcctgattactttgaaatctagaggctcatgatatctctgccctgcttggtcagtggaaataggacatcccagcaaggagaaactaacctctctccaaacctccagacagaaggtccgcctataggtggctgccgaggaggcatagggagggggcgcagaagctaattcaccttcctcctctgcctcggctcttttgttttgtcctttctgtccacctgataacactgtgtctcctttctttttcctttttctttttaagcccttctcctcttccgacgtactttcttgttgctctgtaagaattttctgacctgtcttgactgcctctacacacagtttcaaacagtaacagagtccatatatcagaacaaacaagaccaaaactatcagacctacccacaaagggtcaatgggagaaaaaagcataactcatgaaccttaagttgtcccaaagccgggaaccttatcgtctcaatcccttctttccttctctctttcccttctctccttcctttctgtcctttcttttctttctttcccttcctttcctttcctttcctttcctttcccttttcctttcctttccttcactatttccttttctttatcactgattcctttcattttcctcccttttcttttccttttttaaaaaaacatatccccctttaacccagggatcaatttgtgagacttaccggtaccaccgttcctcagctgaagagttctgaatccacgcagtcagatccttctcagcagtctgtttgcaagaacacttcattaccaccattccccagctgaacagttctgaatccatgccggatccttctcagcagtctggtttatgggaacactttattaagcgctccttcccctcgatgtagttctgaatcctccctgtagcagggggtcttcgctcttgcctgaagatgtttctttacccgggtttcggcaccacttcttgtgcgccccctgactcgccagcaagaaccacactgcaacaggatccttctgcacacgtttattgggagagcttgattgccgaggcaaagagacaccaagcccagaactagtgctgcttatataggcctaggagaggcatgtctcacacccggattggttatgcatgggttatgcttaccacctcatttgcatttctcacatctgattggttaacatgtctctcatctgattggttaacttgtctctcatctgattggttaattctcaaaacctcatcttggcaaaaaaaaaaaaaaaaacctttactgcctatgtatgcgtggtagccagcgccatcctgcaacagcacatgtggcttcccacaggaaggttgtccacaccagcaatcatcacaagcctgatcagaaatggtagcattaactagatagctatgacaaattccacaagccagcataaagtcagatctgtctgggatggcacgagtttaaaaatcagttcctaaaatgtctttcaacttgtgtagacaacttttctctgcctgccacaaatgttcattatctttactctgagggccttttccatgtggtcagtcagctccaacaaggcagcattcagtggcacaggagcatgcctgggtcttcttctgttttcatagatacctcatcccctaatgcaattgtttctcactattgccctttaagctgcactttgaatacccagatctcatccatttattccatagcatccaaaaatgctttcagtgattctcatgctgccaaaacctcactctgaatgcttactggaagtccatggtatctaggaaacaggtaagggagctgtttcttagggtcattaatgatgaaacatcatgatcaaaggcaacgtgcaggggaaagggtttgtttggcttacaaatcctgaatcaccatccactgagggaagccaagacaggaagtcaaactgggtgagaacctggaggcagaagctgaagcagaggccatgaagagatgctgctcactggcttgctcagcctgctttcctatagcattcaggaccctctgcctgagggatggcaccatcctcaatgggtgaggcctcctctaacaattattaattaagaaaatgccctacaggcttgcctaaagccccattatatggagctgatttctcagctgaagctcccttctttcagatgactatagcttgtctcaagttgacctataacttgtactgtaagatcgagaatcgacaaatgggacctaatgaaactccaaagtttctgcaaggcaaaagacaccgtcaataagacaaaaagaccaccaacagattgggaaaggatctttacctatcctaaatcagataggggactaatatccaacatatataaagaactcaagaaggtggacttcagaaaatcaaataaccccattaaaaaatggggctcagaactgaacaaagaattctcacctgaggaataccgaatgcagatctcagatctcatccatttattccatagcatccaaaaatgctttcagtgattctcatgctgccaaaacctcactctgaatgcttactggaagtccatggtatctaggaaacaggtaagggagctgtttcttagggtcattaatgatgaaacatcatgatcaaaggcaacgtgcaggggaaagggtttgttagcatgcaccagctaactgtaaaagccaagaaacaatgtgttggttcggagggcatttaaacttggagtaagatgttgtccactagaagcatcctctggttttaacttaacatcactgaggtaggtatccacccatagaagtttatcccaaccacagctcctgtctctagaataagccagtgaggtgaagagagagtgcctgaggttccaaaagccatcttaaactccataaagctcattagaccagagcctgctgcattttctgttagactgtttgatgggttccatttaatattgctcacaggtgccaagcacataggaaccctttgttcttcagttgtaaatctctgggcaacagtattacgaaatggaggcttcttccctgagccaaggaatctttcataggctattttcttggagcacttgatgtcctgggagcctcaagaggctttcattggggtctgaacttgaaaatggggcaatttggcatatgccttcactcaaatgcattaatattgatttatctgttcatactttttaatgggtgaaaatctgtatcaatcaatacttgttttgatattcaacttacccttatttggcccagagaaaacctttcaaactgacttcattctcctttggttctctgagcacttccttggtagctgctctaaatgttccatgtgcaacctgctgttcccatgctccagtgctggagccaggtgtttcttcaggggtcttgatgtcctttagtgaagcattcagtatgtagaagccaagattcagatgctgagtgtgctcattgttataggcaggtaagttaactgctctaaggcccctcagaggacagtgtcaagcagtgtctctctctctctctctctctctctctctctctttctctctctctctctcgtgtgtgtgtgtgtgtgtgtgtgtgtgtgtgtgtgtgtgtgtgcatgtctctgtgtgtttcggtatgtgtaagtcttccttatctcttacttctatacatgtctgtgtttcttgaaaactacaggttccaacaagccattctcattcaaatgcagaagctcagactttacaatatttctcttttgcacttctccaattcccctttccagtgaaatttcaattaaactgagtaagcctgtgtacagtcagtctcctaatgccactgctgtgtctcctgcttgactatcttctcagcctcctgggcactggaactccccaccacacagcccctctgcctcatgtccccattgttccttaatgactttaggattgtcttgttatgaatggaaaggatgtaggggataaacttctaaactttgtgaatggaggctgggactatagcttactgttggagcacttgctaggatgtatgagcaccccagcactattaaaaatgaaactaaataatatgcatgcatgatgaagatgaggggatagaaaggacagtatggtaacaaaaatatggttagataagaggaatcagctttgatattccatggcatggtaggaaggctacaattaccaataatttactatctatttcgaatagccaaatgtgccagatagtttttgtcaacttggcacaagccaggaacatctgggaaggaggaacttcaagtgataaaatgtctccatcaggctggcctgtaggcaaatctgtgggatatttccttaattaacgatgggtgtggaagggtcagctcactgtgggcggtgctccccatggggaagtagcccaagtgctcagaaagcaggctgaacaagccatagggagcaaaccaacaaacagcatcactctgtttctttacctgtgggttctgtttatctcattccttccctgacttcctgtcctgtcttccccatggtggactgtgacctgggagttgtaagaggaagtaaagactatcttccctcaagttacttctggccacgttccttatcactgcgacagaaacccagataggccaccaaaagatagaattttttttatattcttaaaagttttaaaggtatccaggtgtggtggctcacacctttgatcccagcactcaggttgcagatctctgtaagttgaggccagcctggcctacaaagtgagtccagggcagccagagatattacacagattaaccttgtcttgaaacaccaaaaatgtagttaatattaattgatttttattaattatcattcatgggtattaattatcagttgatgaaattataaatgatgtgttgttttattatcaatcagttcattgattaattgactaatagtaattaacacctttgttcattcagttcccagagaaaagacaaaaaacctttttgtttataataagccttaacagcactagagctgggcagatatcaaccctctgtgctattttgtctacttccctgtcaataaccccgagttataacttgccatgttctgtctgggactctcttaactccaactagtcagccctcgtggccatgttttcacacagtgccttctctgctctccttatctccctcccttctcgggtgtggtctctgccttaggcccaaagcctggcaaacaaagtcccccttccatgtcttctgcccagctacagtctataggcatctttattcaccagtcagggagaacttggagtcaaggttacatagcatcacttggtatatgcaaggatctattcacccctgggggcaaggagaccatggaggccagtatttagcattataacacatagtaacagatcaaactggacctaaattctacacaaaaatgaataaataattaaatgtaatggtaaaattttaagatgatgaattttctaactactctgaattgatcattacacactatgagcatgtgtttcataattgtgtataattaatagcatattaattaattatatattagggattaaagccatgtgtcaccgtgcctggttgattgactgatgttgattcctgggaccctccctatcttctggatttttctttccaatttctctttgtttgccttttaaatgctggttctgtccattctcctttgtcaagcagattttttattctttttttttctttctttttaaaatatacttgatttagaaccttgttttatttaaatgtgctcttcatgttacaggacaacctttcagggtcaatcaaatatgtgacatcagggagtttcctccaaacttctaaaggctcacaggcagggctctaaacttctctaaggcagcttcaggatccaaaggagcacggcacagtaattgtggcctaagaagtaagggttcctgccaggacacgggctgagaaagaaggtcagctgggtgctttctctgcctctctgagcttgcaggctctcaccccagcatctggcttctgagtcttcattggcaaaattggacaattgaaattttgtttaaaaaacaacaaagtatgaaactatattttgtgtgtgtgtctgcgcaggagtgtatgttttttgagacagggttcctggcctgactggcttgaaacttgctttgtagattatattggccttgaactctcagagatccacctactcctgcctcgtgagggctggaaataaaggcatgcacctccatgctgggctaaaactctactttttgacataagatgttggtaacagtctcactatctttgtgttttctttaacaattaagtatgagtcaacattccatgcatccaaaaacccagaaagattggaggctttgggcgtcgacttggcttctgtcttcactgtattaagtttgacatctgcaagcatctttgcattgtattgttttctcattgttttatatgaaggaccgaatgccacaacagtttcaaatttaaaaaactctctaaacaggctggcaagtggtgtcaacagcattagctaaaaaattttttttcagcacgcaaagtgtgccaaagaatgtggtgttagtgcaaaatacataaactcaaatattatttcacaaaacttaattttttttacttcactgaaatcactaaattattaaggaacaaaatagtcacatcacgtgcagacattattgataataggccataaattttagcaagtacaattagaaattaaagcattaaaagaagaaagagcagaaagagaaaagtcgtgggacacttgcatctgcacagctccccttcctctgcactgccagtccctcctgcgtgccctagtggtctctgtcactgacctgcctgctgccaacacaaagcacaaaccctctaagcatacaaactctgtcagccttcctcttaagaagggaagtgccagttgtggtgatgcctgtgagcccaacatttgggagaccgatgtgggactgtctgtccaaaacctccctgtgctgtgtcgggagtgaggtggagaagatggaggagtgaaactccaactgtggtccctctgggtgtgatcacaggagcacgagctttcacatttctgcagctccttggttggaactttcgggtgcagctgagagtccaagagggttagcacagcatcctaaagtcagaactcaaaagtcaaaaagcaaagccgggcgttgtggcacacacctttaatcccagcactcgggaggcaggcagatttctgagttcgaggcctgcctggtctacaaagtgagttccaggacagccagggttacacagagaaaccctgtctcgaaaaacaaaacaaaacaaaaaaacaaacaaaaaaagcagccagtggcagctgagtgccctggagatctttgcacacctctgaagagaacactcttcctcttgggtccattcacacagtcagcaaatacagtcacactttaaatgcaaagctcctggctgctcaaggctcatagcatttgctacctcaggagggcagcaacatcacacaaaccaagactgatagcaagggccaacctactaaaatgctagcccttgttccctccatgccttgaggaaagacaccatgaataccacttccctttgaaagccttcacttcatgccccatctgctgttttggcgctgacaaaagtgtaactgtattgaggctggagtatattggggtgtgggtgtttggggtagaaggtaccgatatctcaatatggcattagtgctgggcatgtagctcagtgggtgacagagcctgcctctatctgaccaccacagggaaacaactgaactgacgctaacaggttgatgtatgcctgaggtgagcaagcatctggagtttccttcaccatctattgtcctcgtgttaatggcataagagaagccagttagcaggcctgtggctgagtcctctcacttactgaccacactgcctccaggttgtcttacacgtcacagtcgcctacatgttcacccactccctcaatcaatcactaaatccgtttttagagtcgtctttgaacgtatgggacttctgataaattctccagtagacatcaccagtcaggtgtccccttggggcctccgaatgtccaaaacagaatggacagtctcttctcaaatctgttcatccccaacatagtccaaccagtgagctgcactaacagcagttcagccactggagttggagactcaggagttgaatgcctctccttccctccctctcacgtcccagcctgtgttgtcttctggtcatcgccactgctggcccacatctaaggctcatcaggcctctaagatatttctacatggtttctctgtctcatactacggctcttcctcctgtttctttgctttggttgacatggtctatcttacatgtaaatctagtcagataannnnnnnnnnnnnnnnnnnnnnnnnnnnnnnnnnnnnnnnnnnnnnnnnnnnnnnnnnnnnnnnnnnagaaatctgcctgcaattgagtctcttaaggtaacatttttcagctcttctctgtccattagcctttctttctgctccactgagcacaggactgaggtcgcaccccgtgcctagctgcactggcattcagaggatacaggaggcttgtgaacttccagcttttgtaaactatgaagtgtgaaccatcacaggaccaggaagccaatctaatggattacaatcagtcttgatttataaaagaaaaacagaatagtaaacaatagagtattgtttgtgaaccttcagtataaaatgtgtgtcttttagtgagttgtattaaaattaaatgaataagccagcacttttttggtttggttgttttgtcttttttgttttgctttatttagcaagatcaacttcgcctaggggaaaactaaaaccgcacaggtagctaaaaatttcatcgtttctgtggattgccacaggtctcaaaggctgagcttcaaagaaggaagtgcccactgtagttagttctaggtttctgaaaaacggaggaagttaaaatcaactacaaaaatccaggaactgtggccatgtgtccataaagcctagtggtcccgcagtaagtctactgttgtggaaattaagcttctagggcctcacatgtgatactggaactcttatatgtattccctgctgttgaggatctgacttgagtgtgaagatttaacagtttaactggctgcttccccaacattctgttgggaagaacagagagctttgggccaatgaggtgccgccattgggtttccatagtgataaaagaaacaaaccatcctggggcacaagtcaggctcagtcaaaggactagctagagggtgaattcctcctcaagggactttcaggtaataactggggacaactgaactgtcttctaagggaagctcctggggtggatggccgcggaacccttctaaacaccactggctgggtttgcaagtcttcaaggcagtctggagatttctgccttggcatctcaaccacttgggaataaacacagcaaccatgagttctgaaacaccttgattgggtgagaaatgacccctgagtttccctaaaacattatggtttctttaagactcacaacctgggaagggaccacaaggccaatgaatctttgaaagaattaaagtaagatcttgggaagagtttccagccgcttgttgaaaacccaccctttctaaagctctgctcactcagcgacaacttccggctgtgagtgaaacaccagggagataagacaggggaagaaaagaagggaacacacacacgtgcccacacgcacatacatccacacacatatcctcacatgtctaaacatacacacacacacacactcacacacgcacacacacacacacacacacacacacacgcacacacacacgcccgaatgcacatacatctgcacacgtgcccgcacgcacatatatcagcacacacatccacacatgtatgcgcgcacacacacacacgcacacgcaaactcaccaaccagtaaacgatcattatcaaaaggccctaaaagtggtccttaccagcttccttgcctcagtttcaaccctgacaccctcagacctacctcgggatttgctaagagcccaagtctgttctaagggctcaatagctttgcattactgattttaaatgctttgaatatggttcccatagatgcaaagggaacttttctttttaagaaaaagtaataaataataaggcgtttttttgtttagaatgggaaaaaaggaaacaaacatttatcaatacaaaactggttaaaatataagtaagtgaactgatataaatgtagagttgtgaggcaagagaaatggcccagggattagggtgcgtgctgagcttcaagagaacctcaggttcgttgccataaaccccatctaatggctcccgacagcctgtagctccagctcccgagtggctaatgctggcttctggcttccatggctcctgaacacttatgatctacacgcacacagtcaaacacacacacacaaatacgaataaagcttttttttttttttaatttagaattgcagccgggcggtggtggcgcatgcctttgatcccagcacttgggaggcagagacaggcagatttctgagttcaaggccagcctggtctacaaagtgagttccaggacagccagggctgtacagagaaaccctgtctcaaaaagacaaaaaaaaaaaaaaaatttagaattgcaatgatacagaaacatatcccagacttacttgaaaggttgtttaaattttgctttaagataatacgatgctggaggagtaaaatgcagtgggggaggggtatagacaagcaagattagtcacactgacattgttgaatctaggggataggtgagcttactttactctttctctacatttggaatacttttatatttctttttttttatttatttttattttatttatttatttatttatttatttatttattatatgtaagtacactgtagctgtcttcagacactccagaagagggagtcagatctcattacggatggttgtgagccaccatgtggttgctgggatttgaactccagaccttcggaagagcagtcgggtgctcttacccactgagccatctcaccagccctcttttatatttcttgattgtaaaaaaaaaaccttacatttaaaaatgatgacatcttttacataataggaactcgtggtattatcttaaaaaatatatccaggatgtaaatatagtttgttcctgtttataggaaattatgtaagtctgtttctttagaatgcagaaaattctggaaggcatacactcaagtattctcactagtcatctctggattttgtatttttgatgtttttcacttccttaatcttttctgtaatgactgtctctgtaacaagctgatttcaagttaatatacacatacatacaaataaacctatgttcttttaaaaagagagagtttttctatatgtaaaagccatgtagttcatgggattcctttccatgcacagggctgagaacatggttcttagtaaatgttcagagcaatgcaacccagcccggagcagctcaagctagacttttaaaggtgctcatttaactttaaattttatttttttctaagatttacttattattattacatctaagtacactgtagctgtcttcagatgcaccagaaaagggcatcagatctcattacagatggttgtgagccaccatgtggttgctgggatttgaactcaggacctgctgaagagcagtcagtgctcttaaccactgagccatctctccagcccaactttaaattttaaataaaacaatgtttaattttataagctcaaaagagcaggcttcctacgttcccatgtctaatgtgtaaagtcaggcctacctgatttcaaagaacccccaaaattttcataacaggtgtcatgaggggaacaggaaacaaagttctagcattctgacctaattttcagtttttagtacctgagctacaaagtctctttctctatgtacaggtgtgtgtgcgcgtgcatgcgtgcgtgtgcgtgtgcacatgtgtgctcacacgcttatatatgtatgtatgtatgtatgtatgtatgtatgtgcatgtatgcatcatcaggctctgggggggtgggaacagggatgggtctggttctgaaaacacagggacactattgattgtaccatagactccatgtactgtcaagtctacctatcagtgtcttcaggattcagatctctccctgtctgggctcacccgagagtaactctcatgcagcaatcataaagagggctgtttttagttcccttctgcaattcagacacatgacccaaattaagaaacagggccatttgtgctccagttggagaaggacaacaaatttcccggaaagttctgtgcagaacccgctgtgaggaatctcttcatgcagagcaagctatgtgaacttgaggaggactgaggtcataggaactgagctaatgctcccaactttgcaacgtgttgcctctgtgacatccatgcgtgtcacctgaaggctagccagcaatagttaggcaaagattgtacacttggattacagtcatgactcaattattcaagatatgtatttgctttcctgtcaagtagcaaccataaggcagtgacagcctgtgtcagctcagcctctgcccttgttcttggtgctgccctgtcttctgttgtccctgtctctgtttgccttggtttctgagtggtttaactctctgtggttgtttttgcatctcaacaggagcccctggcctagcaagactgccttgtaccatggaccccaatcctttcatctactgtacctgctgtgactgctgcaaattgggacaaccaaagctaatcaagaccccttatccacttccaaagcaccccacggggaagtttaagtaaggataagctaggttggactaggaacaggaggtgaaagtttcctctgtggtcctctttgccttacaagacttcccagtagagagcttgccaccaattccccacagaacagggtgccctgcattcctgccttcccctccagcctcctgttgccctgatcttgcaagcctgtttgactcaatggcatttcagtaaagtcccaactttgcaattttgtggtacaatgtgtgtgtgtgtgtgtgtgtgtgtgtgtgtgtgtgtgtgtgtgtgtgtgtaaaacacccagagagctttggtgccagctgcccctccccaggaacctggccttggggttcgtgctgatgaccaggagatagtagataagaacctgcaccttggacctgaggtcttaaaggcctgtactctccacaatcccagtgatcactttccagtttggagtcagcatgggcactcccttatctgggaagattgagttagcttttttgatttccagtgttcatttatttattgtttccaggccagttttacctccaccaatttcaaaagaacacaactcactcctgtcccaaccaggaaaatctactgtttccccaaggtaagtacttttaactccatgaagcaatgaataaaataataacactatacaagagatcagttttctctgagagcaaaaaagagtacacccctgctcccattcattttggacttcttcactgaggccctgtgccaacaaattaccctaggtgcccaggagacaaacacatacacacacacacacacaaacacacacacacacacacacacacacacacaagacctcatggctgacttgaactaatttgctatcaaggatgtcagaaaactgccacaatccattgatttgtcccctcaaccaaatccatggtgatttcagctcagagaaggtaaggaagcagtgcctggctgcagagaggagcccacagccctggagagcagggagatggagcatggcacagactggaggtggtcaggtggctgacctaagatgtaactgtgtggggccaatgcacttatgagaaacaaagtgtcagtcagcaataagatgtgaactctgtgcagacaaacacggggtcatgggaaggctctgaatgttgcaaaggcatggagttaatttgccctgagagctccagactgcacccacatccatttggactgctccctcaatggggccctaggccaaagtgaccccagctccccagggtgctcctccagaagggcagagctggcgacaccagggtgcggctccctgggctccacctgttttctgctcttctgctttctgagcatgtttctctcttgcagggacaaggtccagtcaggaaacacagagagcagcaaagcaccttctgtgagtaaaaatgggaaaagggacagggtgagcatttatctggcacctactgtgtgcaagcatgaggtttttacaccctcactctgccaaatcttaacagagatcctcggagagatccttatattattaatggtatgcatttgaggtggctgctatgtggccaaactttaactaaccccagctactttccttggctatggaggtccctgggggaaaacagatggtagtgtgttacggtacaactcatgccccaatataggaagacctctgtgtactggaagccagagaccttgaggcagctgtcagggcacctatggctgtaaagggcaaggacattggcctcaaatcgtgagtcttcacagttctgacacaattgtgagagcaggtgtgaccgcccacagccacaagaacctgtttctcctgaaaggcaggccagggctaaaagcaaataaacggggagaaaaggaagaggccaagacaaaaaactgatcaaagcccaaagttaactaaaaatctgtgtttatatggggggaaagcccatctcccacagatccacacttgatgcctatcaacagcctataagcaatctgtctgacagcactggtttggctagaagtgtcaatcactgggttgcctgcagtctctggaatctctcaggaatctctcagcctctcagcaggtagcagtatcttggagaagacacttgacagaacaatagaaccatctaggtgggaaggcttcacctcaggtggtctcattctcattggcagcgaggtctgagccagcctactcaaggctgggggaggctacaattcctccctaatatataattaaaattagctggactgagacataaaatttttttatgctccattgtcctgcctgggaattacggtagctggcagccgtgcccagcttgggaacttggattttctatgaattattcttatctgtcaaggagagtatatgcagcttgcttgtgtttattttgcacaaacatggctctatggtgtattattaataaactacggcctcttggcatatacctctgtcttaagattgatatagttcagaaatctggttgcccgtcattggctaaccggccctcatagcacaccttattcccaaatcagactaaagccacaatacatactcaatatgttccttcatattgatgaatttctgtcacctgtgcttgctggagggaggctgcaagcttgctgaagacaggctgtagggaggtgactgacctgcttgaaattcaaagcccagagttgaaaagcaacaggataaaggcttctttggtgaagtccaggtagtctattcagttgcaaattagcaatgatcaagctcaaactctggcatccagtgttggggaggtagcaatagcagttaattctctgaaagtggaggctgtgttcaaatgaactcttctggctaaaaaaagatttttagccatcatcaaggttggaatcatacttactagaagattcggggctctttccaattgacaaaccaatctttcaggcagccattgctctctgtcttctttttgtgaaaaaaacacagacagagcctcttccccaaattaaaacagggtctggaaaattccacgtattagttagggggtccccccatttaaccatggcataagaactggaagcaactggatgccagtagcaatcccctgcaggctgacttttaacatcagtttgcaaaaaatttaaaataaataagacaaaagcaagatgtgcttttggtgaccttggggggtataattgcccctgttttgcttttaaaagccaaatttttagagtgagatgagcatgttcaacaattctttgtcccatggggttgtaaggaatttcagttttatgtttgataccaaattcctaacaaaatgaaataaaattgttgccaggataggatggcccattatctgtcttaatgactttaagcaatcccatagcattaaaggcttctaggcaatgatcaattacatttttagaggcctctcctgtatgtagagaaacaaaaagaaatccagaacaagtgtcaatacaaatgtgtacatattttaattttccagattctacataatgagttacatccatttgccaaatgtgattgggcataaggtcttgtggattaacccctaaatgtggaactggagataatgtaatatatttaggacattgttttacaatcatttttgcctcctccttagtgatcttatgttggagccttaagatatggctagaaagatgaaatttatcatgatcatgtctagccaatgtaacaggatctgaaactaaggcctctcctatcaatgcaatcattgactgtagctaaaggtccaggaagaccagaatgagctcatatattaccaatataaaacgtatttttttttgatataaaatagaggaagaatgatgttttgcaattgtgaaaacagagattctcctggcgtattaaagttaaacattccacaagtctccaataagggaattgattgcacaacatataaactatcagtaaaaatattaaaagcatcattcacagactgaaaaacattcaataccgctgtcagttctgctaactgagctgagaggccaggagtctctatgactatttgttgattattcataagatatccagcttgccctttagaggggctttcagtaaaaatcaaaagagcattacacaaggctgtaaagaagttatattagaaaatatcacctcatatacattgaaaaattttatcaacttatcttgaggataatgatcatctatagttcctataaatcctatttgagaaagcaaccaatccttactgttttacttcagccaactatcttgatctacactataaggctgaacaatgatatctggctctttatcaaaataagttagtgcctgcttccttcaagtataatgaatgatctgggctactgctgcataatatggcaggatattatgtttaggagatatcctcaaatgtatccacattagaggagccctttgccacaacaatcctgtaggcgtatgaatcgtattaaaaattaacagatgtaaaggcaaagagtaatctatataagtaacaaattgttcttcaatagctctttctacttgttgtaaggccagcaatccttcagaggttaaagatataggggaggtaggatcagaactccctttaagaatatcaaataaaggtttcaactcccctgtagtaagctttaaatagggcgaagccaattaatatcacccaacaatatttgaaaatcatatacagtttttaagctgtccctgcgaataactatcttctagggaaaaacagcttggtctgtaagtctaaaacccaaataattataaggatcctgagtctgtaccttctcaggagttatttgcagtcctttatcagctaaggcctgttgtaagtctctataacataaaagcaagtcctgacgatcttttcccactattaagacattatctgtgtaatgaacgatgtatatcataggccattgttgtcttacaggctgaatggcttgtgccacaaacttttgacataaggtaggactattagccatgccttgtggaagaactgtccattgatatcttttcataggttccttaaaattaatagaaggaacactgaaagcaaatctttcacaatcctcagggttcaaaggaatagtacagaagcaacctttcaaatataccacaattttataatatcctttaggaatggctactggagacagaagcccaggttgtaaagctcccataggtaccatcgtttcagtaacctttcttagatcttgtaacaatctccatttaccagattttatctttataacaaatattgaagtattccgaggagactgagattctactaaatgtcctgcctctaattgctcctgcactagcaaagagatggcttctattttctctttaggtaaaatccactgatcaacccacaccggaatattattaagccattgaattttatcagcatgggatgcaggcaagatagtggccattactgaaaataccccaaacctcttgtgttagagtgaggttcaggaccttcaaaagtcttaataccttgtcctttctttcctagcccatgatcaggcaaaaatccttgtcttagcatctgcttagtcactgcctcattaggactgcacattataaggcccatctgtgacaagagatctcttccccatagggtaacaggcaaatttgacataacatacggctgaatttgtcctgaattgccctcctcatctctccaggttagcaatttggagctttgttttgggttattggcataacaattccttggaggtgagtaagtgtatcagtcaaaggccatgttgaaggccaatcttgtcctataatacttgttacatcaactccagtatctattaattctttaaagctttttccttcaattgtcaatttaaggttaggtctctgattagtaatagattgaacccagtacacatcagaggaaccaaagccactctgtcctctctcattcttaacaaatctggaaggtggcacatgcaagggaactaagacaaattgagcaatttttgattagcaggtacagttataataacatgaggggaaacagccatgattttaatttctccctcataatcattatctataatacctgaataaacctgcagaccttctacaatagaactacttcgtcctaaaagaaatccccaagtttcttcaggcagaggtccaaaaactcctgtaggcagagtgtgaattccaatttctggggttaatactacgtgggtggtggaacagagggtccaatcctgcacttcctggggttgccctaataagttcaaaaatggatttccttgactgggcagcagcttcatggctccataagatgcctgctgtgggtatctcgggcctgaggctggcccctcttttcgtttccgaacaccagagagccctgaatatctgtcttggatgtacattctctagcccaatggttgcccttccatcatagaggacaaactcctggagcacggtctgattgcccactctcagcacctctattcctagaacaatcatttttaaaatgacccaaacttccacacttaaaacatgcattacagtggccaaggccaaaccctgattatatgaaggcccaatctctgcacaaaatggatataccctgctaagtctgtctgtcctttgtgcagcatgaccattctcatatgccaattgcataacaaaattcccgtttgagaatctccaagaattccactagctgcttttaatagcctatccactaagtcctggaaaagctcatcaggaccctgccgaatgctggctaaacttccaccaagatcccctttagttggtaactgattccaagcgtggtgggcagccattgcaacctgtgcatacactccaacaggaaacccaacctgattagcattgctttcatattgaccttctcctaaaagtatgttaatatcccagtctgcgttacctgtctgagcattcaaagtggcagttttcttactggcttctcaccattcagaactccaaagtaggaaatctcctcctgacaaaatagacttacacagtgtcttccaatcttgggggtttaaatgtgactccatgacagtatccaataatgcttgtgtaaaagaagctgtagggccatattgtgcaggcgttcttcctgagattctttaagttctgtctgggtactatctgatgcctgcgaggtctcttcatcagtagcatcttttacgagtgcccagaggcagcaaaaatctatctgatctgaaaaatcttctaacaattgttctacaaaccctactcctcttccctgaagcagatattgaaggctgtggacaaatggcagtttagaattttctatttccattttccgctgtcagccccgaaatggaatcagcgccaggtcaacactgtcccaacttagcccgtatcctatcacacctacagcaacatttttaaaaagatgatgtttaaagccaatgttagagtgaatatctattgcttactgtgccagatatgatcttcttgtttttcccttctcctggagctccactttagacagtgttccctcagtcgatcctactgtgttcaggccccacgttgggtgccaaactgtgaccgcccatggccacatgaaccaggtcctcctgaaaagcaggctggagctaaaagagaataaatggcgaaaaaaggacgaggccaagacaaaatgttgttcaaagcccaaagtttactagaaatctgtgtttatatagggggaaagcccatctcccacagatccactcttgatgcctgtcaccagcctttaagcaatctgtctgacagcactggtttggcaagaaggtatcaatcattgggttgcctgatgtctctggaatctctcaggaatctcttagcctctcagcagtagcagtgtcttagagaagaacagcatcagtgacagaacaatagaaccatctaggtgggaaggctctgcctcaggtggtctcattctcagtggcaacgaggtctgagccagcctactcaaggctgggggaggctacaatcaggttatattgacattttagaaaatgaacttttgccaggaagtggtggtacacgcctttaatcccagcacttgggaggcagaagcagccagatttctgagtttgaggccagcctggtctaccgagtgagttccagacagccagggctataaagagaaaccctgtctagaaaaaagaaaaagaaaaataaagaaaatgaactttctggtaggatgttctggctactttgtcttatggttttattcatccttcccttcctaaaacaagaatcatgcagaaagaaaaaggagagagaaagaagggaacacagggttgtgggggcagagaggtcaaacagtccttttatagaaagccaggctcctaactggctgttgcctgataactgttgggaggagcttagaagaaatgctaaccttgagagtctaagcacaggatgctgtgcacttgatccaggactgagcaagatttaaaggaaggtgatgcagagaagccacttaggagacgccacaatggccgggatggctccatactgctaagtgttctgcacgtctctagatgctacacttgtatccaagttagccactgactctgccagggttctgccatgtcatctgattgatacaggaggattaactcactgaatgtttgtgtccttgctaatcatcttcttgagagttaatttgttgtttttctccctttaaaaaaccctttgaagttattttgtgcaggtttttctttcttttctttttcttttcttcttttctgtttttctttcttttttgcatttttattggatactctatttacatttcaaatttcacacacacactattccattctctcccctctgcccccgcttctgtgagggtgttctcccacccacccattccaacataccccttccacttcattccctacactagggcatcgagccttcacaggaccaagggcctcttctcccactgatgcctgacaaagccatcctctgctacatatgcagctggaaccatgggtccctccatgtgtactctttggttggtggtttagtccctgggagctcctcggggtctggttggttgatattgttgttcttcctatggggttgcgaaccccttcagctcctttagtcatttctctaagtcctcaattagggaccccatgctcagtccaatggttgtctacaagcatccccctctgtatttgtcaggctctggcagagcccctcagcagacagctgtatctgggtcctgtcagcatgcacttcttggcatccacaataatgtctgggtttagtgactgtatatgggatggatccccaggtggggcagtctctgagtggcctttccttcagtctctgctccacactttgtctctgtatttgctcccgtcagtattttgttcccctttctaagaaggaccaaagcatccacacctggcacacttggtcttccttcttgagcttcataggtctgtgaattatatcttgggtattcggaacttttagctaatatccacttttcagtgagtgcatagcatgtgtgtttttttgttttttgttttttgtttttgtgattaggttacctcactcaggatgatattttctagttccattcatttgcctaagaatttcatgaattcattctttttttttttttttttttttttgggttttcgagacagcgtttctctgtgtagccctggctgtcctgaaactaactttgtagacctggctggcctcgaactcagaaatccacctgcctctgcctcctgagtgctgggattaaaggcatgcgccaccacgcctggctgaattcatttttaaatagctgaatagtactccattgtgtaaatgtatcacattttctgaatccattcctctgttgaaggacatctgggttgtttccagcttctggctattataaataaggctgctatgaacatagtggagcatgtgtccttgttatatgttggagcatttttgggtatatgcccaggagtagtatagttgggtcctgaggtagtgctatgtccaattatctgaggaatcaacagactgattttcagagtggttgtaccagtttccaatcccaccaacaatggaggagtgttcctctttctccacatcctcgctagtatctgctgtcacctgagttttttatcttagccattctgactggtctgaggtggaatctcagggtcattttgatttgcatttccctgattactaaaaatgtagaacatttctttaggtgcttcttggtcattagagtttcctcagttttgacatagaatatcttgttttctccatctacggtgattgagagttttgctgggtatagtagcctgggttggcatttgtgttctcttagggtatgtatgacatctacccaggatcttctagctttcatagtctctggtgagaagtctggtgtaattctgataggtctgcctttatatgttacttgacatttttcgcttactgcttttagtattctttctttgttttgtgcatttggtgttttaactattatgtgacaggaggaatttcttttctaggtcaatctatttgtaattctataggctttttgtattttcatgggcatctctttctttgggttagggaagttttcgtctagaattttgttgaagatatatactggccctttacgttgggaatcttcactctcttctataccgattatacttaggtttcatcttctcattgtgtcctggatttcctggatgttttgggtcaggagcttttttgctttttgtgttttctttcactgttgtgtcaatgttttctatggtatcctctgtacctgagattctctcttctatctcttgtattctgttagtggtgcttgcatctatgactcttgatctctttcctaggttttgtatctccagggttgcctccctttgtgatttctttattgtttctaattctacttttagatcctggatggtttgttcatttcctttgcctttttgattgtgttttcctgtaattctttaagggatttttgtgtttgctctttaagtgcttctacctgtttaactgtgttctgtatttccttaagggaattatttatgttcttcttaaagtcctctatcatcatcatgagaagtgattttagacccgaatcttgcttttcatgtgtgatggtgtatccaggacttgctatggtggaatatctaggttctgatgatgccaagttaaccttagtttttgttgcatatattcttatgcttacctctcaccacccggttatctctagtgcttccagcccatgccctctctgactggagcctgtccctcctaggagactgtccctcctgtgatcctggttgtataggaactccttagagtcaagctgtctctgtgatcctgtgattctgtgatcctgtgatcctgagatcctgactgtgtcagagctcctgggagtcaggctgcttctggatcctgaaatcctggcgtgaccaagttcctgagatcttgtgatcctgggattgttagaacacctgagagttgagcttcctctgggtgttgtggcactggttgcctccatttttctgatggggacactgagtcacagagatgttaaaaatctccatggctaaatatataaaccttggtctgtccattccaaaagttgagcagtttccacactgcccatctactgcccataatggaggaaggggaggaaaaggagagtggtaaccatggatcagttggcactgctgagtttaatgggcccctgggggccaggtgattgttgagattagatctgagggtagtgcctgggggaaggcacagaagggtcctgtggcctagaatttcagagaatttcagcacagtgtcaatgtgtataagatgtgaggaagctgtcttagagtttccattgctgtgaacaaacaccatgaccaacgttactcttataaaggacaacatttaattggggctggcttacaggtttagaggttcagtcctttatcatcaaggcaggaagcatggcagcatccaggcaggcatggtgcaggaggagctgagagttctacatcctcatgtgaaggccgctaagagaagactgggtctcaggttgttagggggtctcattgcccacccccactgtgatacacttcctccaacaaggccacacctgctccaataaggccacacctcctaatgtgccacttctgggccaagcattttcaaactaccatggaagcacacagtaggtggaggaacctcaactcttctgggttcacagtttccatttgtcttccaccttgtgacccaggaagtgattcaagtgtcacctggctatacactcattcgaaatcgagaacagatatcagtcaccttgggagatgagatgttcaacaggaaaaagcacttggaatcagatgtcttgagcaaagtcaaattttccaggtaaagtctttgggtcagcaccggcttctcagagctggccctgcccagctattcagccgtgcttggcaccagttcagcacctgacatctacacccacgccacaggtccttgacaagaaacagttacaaagatagggggtccagccagcatgactaaagaggcaagtgcttctgccaggaagggacaggtgaaatacccaaaaaatggtctggcttctgaatatgggaataaagagcaaagccagagattttggaagcctggagtgtgtctgtttcaatataagtaacccaaagtgcccatgactctgcgagacactattaggcgggttctactgttaagtaaccaccatctgctttctcagaagccctgcctcttttttctatcctccgacgttacactcatatccatccacacatctcgtttctacttcctaaaaccctcattcatgtcttctagtcaggcctctccttactacatcactggagagctctcccagtgtctcctctttccagcctttgtctgctgtaagaactactgttctgaagccacagtgggcacacactgttaaccctgtactgggggtgagtgtaggggttgatctctgtgagttaaagaccatcctgatctgtatagcaagtttcaggacagccagaactatgtagaaagaccctgtattgaaaacaaaaagcaagcaagaaaagagctattgttccaaagatctggaagatgttcaacagatcaagcttgttcttatctctagcatccttgtaaaaatctggacatggtgacacatgcccataatcctagcactgaaagacagcagagaatctctggggctcattagccagctgaatgagttgaaacattagttctaggttcagtgagaaaacctgtctcataaaatgagtggagagtaacagaggaagacacttaaaattgatccctgtcttccatgtttgtacacacacacacacatttttgttttatttggttgttgttgttgttgttttgaagcactatgttgctgtataacccaagcaggacactactaccctgttcttgagtgttgggagtgcagacatgtttgcacacacatattcatttgcacctcctcttagccgcatcctcaggcagtccttgtctactggtgcctgtcagcatgagtctccccacacttcctcatttcctaatcctctgacctcttgagttcgactattgataaccacactctggtaagtgtccaacacattgttatttctcttctgctcagtgggacaccacacagcccacatcacttccagcttaattaccttcagggctagatgccaggtccaaacactctactatgaaacgccttatcgaccactgcatccccatgccttagtcgtggagaagacacaaacagaccagagtcaggcagtctgggggcctggctggtgtgactaacaacaagctctcttggtgatagagtgtttgtcccacaggactgatatcatttctgaccttcaggagcaaattgctgagttgatggcaataatagaacagatgaacagagaccagcagtctgccctgaaactggtgagtgacccttgtatcagccacaccctcatggctaatacattcagattacccaagtgccaggtaacatggcaggcggatcaccaccgtactgaagcgtggtatccaagcgccagactcggcatagtgtgcagtgagcagtaccttccctcctccatcctcatccatctctgtaaaaactgaaagacattgcattcctggggttccaggtgcctttgggtgtgtgcatggtaacactgtctcttctacactgctaacactgtcatgagatccgcaggcttcagaggttgccaggctattgctaatgaccccggcatggaagatgcctcctgtgtcttggaaaaccttctaggaagccctagggcccaccctctgttactatgaaggtcccagagcccattcttcagaatcaactggagtccatttagtctggatgcatatgtatgtttatgtatatatatatataattatgcctgcatgtacacccacaggccagaagagggcaccagatctcattatagagggttatgaggcatctataatggttctgctgggaattgagctcaggatctctggaagagcagccagtgctcctagcctctgagccatctttccagcccctcttgatgcattcttaacaggtgacatttttagcattttggtcaccagttccagttttgagcctttcttccccagctcaggcatgtgaccagggctggagtaacagaccatagccatgctcagaaagtaccccctggtgttcctgaagggaaccgtgaggctctgccttcccacagcagcctctcatgctgattaaccttaggctgtctgaatcttacagtcacgggctggttcgtgaccaggcttagaccttccccacctcagctgggctgatgtcttctacaaaagaaatctgaagcttgaggaagcttgtggaaggtggtggggcttcaggcaacctcacattttgactcaccaccacaagccctgcaccacacaactttagcgactgtcttttttgcaagtggaagtgggggtgttgaaaatattctaacctttgaaaggtctctgtgcagaatccaggatgacaccgagatggggtataagaagtttttaggaaaagttagtaacaccacggacagacagacagaaagacagacagtctcctagcagagactctgaggagttgatgccccgttgcctccgcatgctgggactctgaggaagaatccaggtccacaatgtggaggaggggcctgcagccaagatggctgattccctggcagagggcaaggagggaagaggagggactgtgtggccacacgtagccctttgatgtgtccacagtctgattgttggttctttttgactcttccagtcaagtctctcgctaaataagtgattcccaaaggtgaaagagcccagaggttacagtattaggatgaaatgacagaaggaaccagacccaatgacaaagtagcaacaaaatggtggccgtgcattacccgcatgatgcactgactagggagaggacagtcagtagtccctctgctatgtgtgtgtcctgtgcactgcagaacatgcccaggagagactgagaggggcatcccctcagaacggaggggcttcgcgtatatagataagagcgggctggggctctgaatgcttggctgttaacgttggcctcatttctagctctccaaagatctggatctccgctgttccaacatgaagcagaagtttgaaaccgagagcaggtatgctttctggcagaggactgcgtgctgagagcccaggatcccgtgccctggcaggattctaggtccccaggcatccccagcagggctaagtgcagcctgtgacactagagagcagggtagcctcattactgccactaagatgaatcagtttgtgtttggtatccctgcctttcatcgttcatccgtctcattgccactgtagtatttcttttgattggttgctgaggaaagttatgttgttctccacgaagcttctgtcaccctggatttgttataagtacattctccttcccggtcctcctcctcctccgcctctcctcctcctcctnnnnnnnnnnnnnnnnnnnnnnnnnnnnnnnnnnnnnnnnnnnnnnnnnnnnnnnnnnnnnnnnntctcctcctcctcctcctcctcctcctcctcctcctccttccctcctacttctgtctcttagctcagggcctgggcaacaaaggaaggagagatgggtggagaggggacaggccatggcaagttggggccagggggagagaataagaaggaagtgtgttgtgtgttgtctgtgtggggaacattattttttttaaagcctggaggccatcttggtgagagacaatcacctctggctgcaccatccacacttgcttgcttataattactttctgatttttaaagaacagttttagcgtcttggcaaaataagggagagtctgaactcccaggcaggcacattgtgtaccatgcacaacagcctccttgtagaaccgacctgtgttctgtcggcagatgagagtttaaaatgctattctgctccaaaagagaagggaattctcccagttgtgagaacatgggtggatcggaaggatggaagtgaaataaaccaggcaaagaaaagtctctgtgttctcactcagagctgaaacctcttaggaaacagaacctagactgatggttggttacttaggctagcctatgagaggtgactgtcaaagtgtacagaatttgggccagcgcttccaccaggcctgatgacctggatttgatccccaggacccatgtggtagaacactgagtctcttaagttacactctggtctccatgcatggatggatggttggtgtacacacacgccatgcacactaaataaattaagtaagtaagtaagtaaataaataaataaataaataaataaaataccaatgttttaaagtatataaaatctcagacagtagaaatattttttaaaatctttgcaggccttaggataataatactaccgtgttcttcatttcttattgcacaagagcacattttaaggctgtagagatgactcagtggtcctaagtttatactgctcttgcagcggatagttaaacatgctgttctagtttatgaatacaatgtggaaataattaaatcaacatagctgacacacagatgtcaactcaatgattacaattttttgtggtaagaatgtttgaaactcgcttttttttttaaaaaaagttgttttggttgttcattttgtttatatgtatgagtctgtgtggggtaagtgtgcatgagtatagtacagaggtcagaaggtgctggaccccctggagctggacaggtagtggcaagccaccataccagtgtatgtttaactccacaagcttgtgtaatgtacatgagtatttatttttatttttatttattttttaaacatatataagaaataaatgtaataaaccaaatacatggacaaaaaaatacaagaatcatatgagcatctcaatggaagaaaaaaaaaaagaaaaaaaaagaaaacagaaaaagtctttgataagattcaatattccttcttagtaaaaaccctagaataagtaggacgtaggaagcatattccaacataataaagattgtgtatgacaaatccatggccaatatcatcctaaatgaataaaaccattaataagccccattaacatcagagatgggagaggactgcccactgtccctacttctcatccataatgtgattgaagcattagctggagcagtaaggcaagagaagggaaacaaatgggaaaatattaggtcaaagtattttcagttgaagaatatattatcttatacccaatattctcaaaatttgactagaaaaattgtagaaattatcaataatttcagcaaagtgttgtgattcataattgacttacaaaatttatcagtcttaatacataagcgtaacaagcctgctgaaaaagaggtcatggacacgttcctctgccaagttctcaaatcaaataaagtatttagaatatacataacaaaagaggttaaaaaaaaaccctctacaatgaaaactttaaatgtgtgaagaaagagattgagaaacatactagaatttgaagacctcccaagcatacaacttggtagaattaacattgtgaaaaaaagactttcctaccaaaacaatttactgattcaataaagtcacaatcaacatccccatctcattcttcacataaatagaaaaaaaaattcgcaatttgatatggaacaacaaaagactcagagtagtcaattagtcctagataagtgtttgtgtctatgcattctgctcattttaggggccaagtgcctctgtctatgaccccaacatttatgtatctgtttctattgagtcaattttgttagatattagaatggctactccagcttgtttcttgggaccatttgcttggaaaattctttttctaccttttactctgaggtagtgtctgtctttgttactgagatgcgtttcctatatgcagcgaaatgctgggtcctgtttatgtatccagtctgttagtctatgtctttttattagggaactgagtccattgatattaggagatattaaggaaaagtgattgttactccctgttacttttgttgttagaggtagaattatgtttgtgtggctatcttattttgggtttcttgaaggaagattacttcttgctttttctagggtgtagtttccctctttgtgttggtgttctccatctattatcctttgtagggctggatttaaggaaagataatgtgtaaatttagtttttgtcatgggatatcttgttttctcagtctatggtaattgaaagatttactgggtataatagcctgggctggcatttgtgttcccttagggtctgtatgacatctgtccaggatcttctggatttcataatacctggtgagaagtctggtataattctaataactctgcctttatgtgttacttgacctttttcccttactgcttttaatatcctttctttgttttgtgcatttggtattttgattattatgtgaaaggaggaatttcttttctggtccaatctatttgtagttctgtaagcttcttgtatgttcctgggcatctttctttaggttagggaagttttcttctataattttgttgaagatatatactggccctttaagatggctctcttctatcgctattatccttaggtttcatcttctcattgtgtcctggatttcctagatgttttgagttaggagcttttagccttttgcattttctttgactgttgtgccaatgttttctatggtatcttctgcacctgagattcgctcttctatctcttgtattctgttggtgatgcttgcatctaggagtcctgatatctttcctatgctttctatctccagggctatctatctctctttgtattttctttattgtttctatttccatttttagatcttggatggttttgttcatttcctttgcctgtttgattgtgttttcctgtaattctttaacggatttttgtgtttgctctttaagtgcttctacctgtttacctgtgttctcctgtatttctttaagggaattatttatgtccttcttaaagtcctctatcaccatcatgagaagagatttttagatctgaatcttgcttttctggtgtgatggtgtattcaggatttgctatgatgggagaattgggttctgatgaagccaagtaaccttggtttctgttgcttatgttcttatgcttgcctcctgccatctgattatctcaagtactacctgccctcactatatctgactggagcctgtcctccctgtgatcctggttgtataagaactcctcatagtccagctgtctctgtgatcctgggattctgggtgtgtcagagctactgagagtcaagctgcttctgggatcctgagattcttgtgtgaccacgcccctaggatcctgggatcctgggtgtgttaaagagccttggagtggagcttcctctgggtgttatgggacttgctacagagctctggcccaaggtctgctcagggctccagcacagatcagaaggaactgtgcctctgctcatgtggggttcctgcttccctggatcccgctagccctagttactcccagtggtgttgggaccagaaatgagcatttatgacaaaacaaatcctggtagagataccacctctatataatccccagcattttaggcattgatgtctttatttatttttcttgtttgtttgttttttttttttttcagacagggtttctttctttgtagaccaggctgtccttgaacgcacagagatccacctgcctctgcctcccaaatgctggaattaaggtgtgtgccagccaccacgtccagcttgctttgttgtttttatattactttaaagttttcaagcaaaattaccaggaaggtacagagcccccacatatcccttgtgttccaccctatagccaccctcgctttcagcatctctgaaaaatgttttatgtgttacaattgatgggcctgcattggcacatcatcatcacctgcttggaagtcactcctggtgcacaatattctatgtgtgtgaaaaataagtgtgtgtggacgtgcattcactgtgagagtgctgtacacagtggtttcactctcttagtatgtatgctccagttcctagtccctccatagtccctcccaaggcaatgccttgaaacaactgtctccataggctttccttgcttgatgttggaataacatcacatacgtagtctttgcagagaggcatttttcctgtagtaacgtgtgtttcgatttctcccatctgatttaagcctttgggctctcactttagcactcaaacactatcagcatataaatcctgggatgggagctagatctggggttctaaactattctgggtgcttctataatagagctgtaagtaaaaactattgactaagaagagagtctgaggtgcttgcctgagcactattcaaagaagggactgtaggaaacacctcactcagaatagaaaccataagaatactctaggacatgagggctccaccttggtaaggagtgggagggggagggcaggtcagtgcaacagctcaactctacactgtgtgtgtgtgtgtgtgtgtgtgtgtgtgtgtgtgtgtgtgtgtgagtgtgtgtgtgtgtgtcgtgtgtgtgtgtgtgtgtgtgtgtgtgagtgtgcatgagactgtgtgtgcatatgtgcataagtatatgtatgcatgtgtgtacaaatgtgtgtctggatgtgtgtgtaaatgtgtttgagaaagtgtatgtatatgtgtatatgagtgtgagtatacatgtgtgagtatgtgtatgtatgagtgtatgtgagtaggtgtgcatatgaacatgtgtgtgtatatatgaacatgtgaatgtgtatatgtgagtatgtgtgtgtatttgatcatgtgtatgtaggtgagcatgtgtgtgtatatatgagtatgtaagtgtgtatatgtgtgtgtatatgtgaacatgtgtatgtgagcacatgagtgtgtatatgtatgtatatatggatatgtatgtgcatattccttctcctcctcccctccatgtgcttggcctcactgtgtttctgtggaccatagaagacagcttttggaagcaattcttccctccactatagattccagggatcagattcaggttgttaggctttcatggcaagcacctttacctgctgaaacagcttgttcatgctgaacttcttttcttggatggtcccacagggaactcaaagagactcacagagaggagctcgagaggttagagaacaactacaaggaggccctgaaggcagaaaaggccttggccgaagagaaactaggtactgtcgggccctggggggatgctgggaggaaggtggacagccttccctggcatccctatagccatggcttggcacagccagatgtccaacatttcccttctgaggcttaaggcatgagaatgactgagaacggaactgcttcatcactgaagcaagaacgtgaaatttttttaagtgcattctaaagttctaaaactacaatattactatgatgccttcaggttttcttgcatggagaatggcagtgatctcttgaatgctcactgggctactgtgattgcaaggctctgtagtgcatagtgctatgctgacagaatctcactgtttacactgctcttggggaaagcagagtgtgcacccttcagatttggggtttatagactaatgtccacagagagaacgagacactctacaaccttcttcctctgtttgaagttagtgtcttatttacactttgcttgttttctagtttcctgaagagaatgtgtggttttcataaccactgtaaaggaggaaatgatacaaaaaggagaagcagatgcattgtgggaggttctgttcctccttcccatagatacagatgaccctcgggggtggggggaggttgtcttactaaaacagctgaacagagtgtgggaactctgagatcttggagaagcatgtttagaaagtacctggcctctctcccagaagctcttcatccatcggttcaggtgggatacaataactgataagatttttgataagcttccagagcgacttgggaatcccaagacggtttcatcacctcagggagagcttgggtgtggagctgaagagttcatgtgagttttggaaagtgtgcccaccgaaggaataatgacatccttgttttcttttcctccagataagatgagcaaggaatataagtatctgaagagtatgttccatgtgtttcaggtgagattccaaactgtatggtaggctctgagagcaagagaggtgaggctccttcctggctgagaacttgaggatgactgtagacctggagagattctaatacttccatccacagtgtcactgctgtgcccagcaggaatgagtccagtggcttccatgtttgctaaaccagccattcaactctgaagaggcctgttgagaagatggtgtaacagctgttcactgtcttctaaaaatgaagactgggaggggggttaggggctggagagagggcttgacagttaagagaactggctgctcttccagaggccccaggttgagttcccagcacccaaatgatggctcaaaaccacatgtaactacagtgccagcagaccgaacgccctcttctggcctcctcaggcaccagtcccacaaacagtgcacagacctacacaccgacaaaaatacttacacacataaaacaagacttttttttttaagtggagctaaccaccaacagttacatggaaaagaagaaattgtcactcaccagaggcacccatgcaaactgcagtactttgttgaaccattcactgagcgaatctacacttgtatcctcttttctcttgggcactttaggtctttccctcctttgttgtgactgcctctgtggctttgggatatcactgtccctttcccactgaccacgtgctattagagtcactcccggtgacagaacacagaacttcaaacagtggagtactggtcaaacagtggacatatttaaggcctttcaaagatttgatcaaattgccatccaaaaattttatctcattccacattctacaagctgagacctgaagccatttcctttcatccctgtaccagttgggtttgttgtcaacttgacacaaaatggagtcatctggggggagggagcttcgtttgagaacttgcctccattgcctgtggacaagtcggtggggcattttcttgattaataattgacatgggagtgcgcagcccaccacagatggggccgcctctgggcagagagatacaaaaacaggccaagcaagccacgggagccaaccagtagccaggactcccctggcaccagttcctgcctgagttccagcccaattccctcagtgatgggttgtaatatggaaatataagtgaaataaaccttttcccaccaaagctgcttttaatcagactattttatcacagaagtagaaagtaaaagtggacaattccccaaacttgatgaagacccagagcaggctgccttacagggagatgcagagtcagatgattctcagactcagagagccgatctgtcttccaaagaagtcaagattcacagggtaaatgctgttactagagggcctttgaccttccagcttatcccagctctcctctgagctttgctggaatgggcttttttatgtgtaacccatggaagggtccctcagcaaggcccaagttaggggagagcaacgccccatgtgaccctgtgagtaactcagcagtgttcccctgtcatagcgttcccctgcagtagagttcccctgtcgttgtggatcttctcaccggtgccttcgtgctccacaggatagcatttacgaggaaatggaagacaagtggctgagacgaaaggccgaatgggagaaagatgagaagatggagcgggaaaagatcctgctacaacaaagtgagtcatgcagaagctgctggctttttcaatactagagactaaaaaaacaaacaaaacccgctatagatcttgaccttgacttgagggaaggggccttgggtttgtcaagggtcaaaggccagaacttctgaatgaaaggtgcctcaggttacaggaaacaggacagtgagggcaaggcttgccttttttttccctcctcctcctcttcttctttttttgaacttcagacacattaattaagggatctaaaacttacatgtttgcccatcatgatctggaacaaatatgggtattggcatctataatgaaatatagaacctaaaattctaggaggaattcatgaatttgaatttaaattattcagggctctgctgctgggtcttccaacactgagaacaggtgaatttacctttgccctaaggctaagtatgactttttattatgaacaatctgactaaccaagagctttaaagagaaaaaaatgctagagaaagcacagctattacttcagcagagaagacagaaagacaaacaggagacagaaactaaaccacacaccaaagaaagagcagatgctgccgactgatcccacatggctactgtcacagcacacaggagacccacctcaccccatgcatctccccagcagaggtcagagcgcccagcccaggctgaaaggttctcaggttcagtccagtctggaaccagtactgttttcagttattctaggtttctctttggcctgctttcccagattttacacacaaacctgtcgtttctttctctcctccacagaatgtagaataataaaaaagtttgagttacagtcggaagaaaaaaagaagaaaatgaatgagtccatcagtgctgtttctgataacttcgctcgagagaaagaggtaactggaagtagttgagagtagtctaggtggagcagctgagcccactgggcctatgtacttgggtgacttgttggtcccaatggacctactctcctctttgttcaactttcctggaaatatatgcaaaaagaatgactattatagtttgcacttgattgcttccataaaccatgaccaaaagcaagtggaaggaaaaggatttatttcatcttaaaaggggcagttcatcctcaacttccaatgcaggaaaccaaggcagggacttgaaacagaaaccacagaggaacactgctttctggcttgctcattcttattcagctgccattcttatacaggccaggaccacctgcctagtgatggtaccacccacagtaggctggaccatcccacatcctttggctgtcaagaaaatgcccccataggcatgcctacaagcaatgagatgggtacagtccccaaattgaaaccccctgaagtaactatgggctgagtcaagttgacagctgaagccaagttggaggaggattgtcttggggtcctttttagctaggccgtcttacatcaggatttttggaatgaaagtcgtaattagggaatagcagtacgttaaacgtgcaaaaactataaagtcctgtggtttgtcaacatggcctctctgaatgccacccctaccagcagtcctttctataaaggaaggaaaagacattggcgtcaactagtcaaggtggtttggtcatggaccactcctactaaatcagagtggctatctaaaagctaaagtaaggcaagctccatgcacctcctagccaataagagcatcatagacaaggttttcccaaacagatagacactgactaaacaaaatgtgttagcattccagctccctccagttcacacagccaatctctgagttcttggatgcagctgacatggtcaccttagagaggcagaactctgtaacactctcacaattgggccatcagccacacaccttcctatcataagagagtgtcattctgggatcaggtctttggcatcaccctaagtaaacaagctataagctgtcttagattcctccatccttttcttgcaaatggagaattgtgcaatattgtcaatattttgaatatttcacttatgtgtacatttctaaccatggtgctaattcctcttccattaaacccatctcctctcatctgccccaggccaccattcttctggtttctaccaccacagactcaatttatcagtttttgtctggtttaaaaaaaaaaagttggttctgttgttctgatagcataacttatgaaataaacacaaatacagttcctagttatccttgcaacatgcccaaatcaacctttaaaagtttataaaaaccaaatgtagaaagcatcttcctcagcaaacttctaaaggcaatgcagacatgaagacaaaagttggtgcttgttaatcatcacacggttgagcagggttttttttttttaattctgattttttattagatattttctttctttacatttcaaatgttatccctttaaaacaaaaacaaacaaacaaacaaataaaggccggacatggtggtgcatgcctttaatcccagctctcgggaggcagaggcaggcagatttctgactttgaggcaaatctggtctacaaagtgagttccaggacagccggggctatacagagaaaccctgtctcgaaaaaaaaaaaagaaaaaaaaaaacaaaacaaaacaaaacaaaaaaaaaaaaacaaccaaaaccaaaaccaaaaccaaaaccaaaaccaaaaacaaaaacaaaaacaaacaaaaaaacaaaaacaaaaacaatgttatccccttgtctagtttcccctttgaatatcccctcacccccttccctttgctccccaattcacccactctgattctggtcctggtattcccctatactgggtcctagagccttcacaggactaatcgactctcctcccattgatgaccgtctaggccatcctctgctacatatatagctagagccactgctccaggtaaaacactgcctgccatctctcccccccccccccccccacacacacacacatactctctgaactctgcccaccaaggcaaaggtggctttgtccttcagagccacagagatggtgacttgtttattcatcttcctgacagacccttggcttctttgggaaggaccataaagaggggcttctatggaacagagttgtgacagggtaaagaaactccattttgtgctaggcatccatcttgctacccacaggcatttgtgtgagactccagttccttggggtgactcagtgcctctctccacctagaaatgtgcagctgtgactctaactgcttgtcagcatcagtaacctctttatgcagacattcaaggaccacctactcttagcacagtagaaccacgcttggcttgcttatgcagatactaggtcatctcctggttttcatctttaaaaatccttccctctgtcctctttgtgtagcaatctcaaatttggctcagagagtgttgtcctgccatcaggatcaatacatttaaccaattataatctagatggagtctgtggtctgtttacaggggcctcagactccttaacaacaggctagctggggaccagggttccaccatggatacctgggacccttcgatgggttttccgtgtcagtctctgaggctaggtttagtttttgcattttccagccataccttcagtcccccactttggctttcctcctcaacttggtttgcactattcattttcctctcctttctgctccctcacctcggctgactttctcacacttgatatttccctcttgcccttccatgcagacactctcctccagtctctgctgatttttctattagttaaatttatttttatatttattaacagtaagcctggtatggtatggtggtgcacacctttctttaatcccagcactggagaggcagaggcaggcagatccctctgagtttgaggccagcctcctctacagactgagttctaagatagccagggatatggagagagactttgtctcaaaaccacaaatacgtatatcctttcctgatcactctttctgctggcctgttccttatgctcctcttcagtaatgatcttttacatgtctctgtacttccagccctatcacagttgatgagattctgctcagaactttctcttggcagcagtcttgttccttttctcaacaaccctcccttcctgatgtgtcagggtgctttgtggaactcccctgcatctgtccagatcattttatgactcatcatgtcggctggaactgtaagcgatgttctcttcagattccctgtctggacccagactgaatcacctgcttctttgccccaccccaccccacccccaccccactccattctaccccacactgctgcttcttcatccttctcaatccttccaccatcatctccatccaacagaaagctctggtgaccacaaggagatcatgggagcatggtgggattcctgcatctcagagatggactagtgagtgctcagataacacccccatctccaacctcagaccctgcccaacctgggaagggcatgaggagagccaggatagagcagggcccacatctgctcagaaccagttgagggggaggagaaacaatggacacactccactgccacctctggcccacctaggtcaaactagccaaaaatgttccgattttaaaacttaacgcggacatagaatgcctaatgtctaatgtattgttttcccctaaaaataactgataaaatatatttatttgtttttcacattcatacattctttttataaaagtagcttgaggcagatcttcctctgtagcccaggttgaaaccagctgatgtgcaacccaggatgagcctgcccttctggccttggcctgcgggcactgaccttccaagcccgagcccatacccactgtgttccttctcactgctcagcagaatcgcttagtggaaaggtcatacaatgtgcttcttggtttcctggcttgtaattttttggattgttttcatttgttggattttaaacaaagcttctatgaatatttttgtacaagtgactcatagatatattctcttccttctcttagagtgtatcactgaaactccagggtacacagaggaaatctatggtttccacagtagaaatgttttactttgagatctgaaatatgtgaattctgactgcaccgaatcctgcacacttaggccacccagtcattaactatggccattatagtggggatgaatatgaagtgacagtcactttttataagtctctctgatgactaaacaaggccagtttttctaaagtgttgggggaggacagcattgatagatttctatcttcttttgttcctgttcatcccttctattatttaaaagatatggatattggacttgcaaactttatatgccccagtacaggggaatgccagggccaaaatgtgggagtgggtgggtaggggattgggggaggagggtatgggggacttttggtatagcattggaaatgtaaatgaggaaaatacctaataaataatataaaaaagatatggataatacaaatattttgtatatatagttgcaataagaacttctactgggaggggttgctttctcattttgcaaacattatttttcaatgtacagaaatttctaattttgatgaaaggcagattatcaatcttttctttttagaattaaaagctctttctgccttccccataacactactgtctatcataatgccatgggtattctctttttagaaacgtgttgattttagcatttctgagtctatggtccatattgaataattttttgtgtgtagagtgaagtagaggtcataggaaatttttctgtatgaatagacaattattccatcatcctttctgaaaaaagaaaatgtcctccctcctgagtcgtcttgatgtcctctgagtgaagggcaagattctcttcccattctgcttaaccgtttctttacactcaaggaggcgctgcacagccttggtgccatgtaaagccagtgagatcgggcagacagcctgactgggctactggtccttgctttgattttcctcttgttaatttatttgttagctttggttttgtttcccagcatggtctatacattttccattgccttacacttctatgtaagttctagagctcatcacacccaacagttgataatgctgcagttcagtaagtgttaaactcctgagtcctccggtggcttcttaattctctaacctttccaaattcaattgttttcaggagctcctaagacaacatgatgaagacatcctgcaaatacaggagctgagaaaatccaaagaggtaagggttcccattcagctctatgaaagtagtgtcttccaagccctacacacttggggaaataaatgaattttacccagatcagtatagttactggagcacccaaacctaagtgttgaactctgtaggtcaaaatgaatctcaaactccatgtcaagcaaaagcagcctttctcagagccagctgtgaacaaggagaaagcaaaggctgcatggtcattagtgttgaataacagctatgtctagtgacgcttaaaacacaggactttgaattacagaacatcattatcttagttggcattttattgctgtgaagagacaccataaccaaggcagctcttataaaggacatcacttaattggggctggcttacaggttcagaggtctagtccattatcatggtgggggcatggcagcatccaggcccagattgtgctgaaggagttgagagttttacatcttaatccccaggaggctgtgtatctcagttgtcatatgacctcaaagcctgccctgacagtggcacacttccttctacaaggtcacacctcctaatattgccattccctatggccaagcattcaaacacatgaatctacagggctatactattcaaactacaacaaatcagtaacggcaatttgatcaaaaagaagcctcaaggttcaaccaattggcttgagtccatggaagcagcaagaaacctctggaacatcaccagaagttctttggtgtgtttctctctatgaagtcacagcagtgaagtcacagcagtgaagaaggcaaggcgaaccaatgctgcattgttttgcacaaagaccatcgccagcaaagcccaaatgaagatcagcaaagagtggcaaggcgaactaatacctcacaccgcatcatccactgtctgttgggttatatttataccccttccaaatatcacatgttctctcaagtgtccagtctagcaaaacatcacaggcccttttaccaagcagcttccagaaaaacaccatgtgtctgcctcagcaaaacatcctctcatgagacagttttcagaaaccagaaacttccagtgcagtcatccatcttgaaagttcccatataatctcccatggtacccttcatgttcccctgctagctgcttgcactacatgacatgttagttaccgagcagtcagtatcagcacgctgttgttaactgagatccctattttatatcagggatcactcttatggtatacatgctatgggttttggttaatatataatgtcaggtatccatcatgactgggtcaaacaaaacagtttcttgcactaaaaatactctttcccagcatcctcccttccatcccccagccactgaacccacaaacctatttacagtctctagtgtttcgtctttttcagaatatcacagagttggagtcaatagaaagaggtattgtaataaagaatatgcagaatggggttggagagatgccctagcagctcacagcatttgcttgtcttccagaggaacagagcttaggacctagcatccaaatcaggtgactcacagctgcctattaactccagttccagaagagctgatgcgttcttccggtttctacaaacacctacactcacatgtgtacctgcttgtgtgaacacacacacacacactaaaaattaaatataaaaattttttaaggagaacacaaagtttggaagaattagagggtggatctagctagggaaaagtgggaggtaaatatgatcaaatgcattgtattctcaaaaagtcataaaaatattatatcttaaaaacaaatctttaaaaaaaagaccatgcagtggctgagtggctgatgaccacattgcctgatgaaggctgctttggctgtagtggcagtgaacctgaagagcaggacacaggagggagagaaagagaaggtagaaatggcagtaagtggtacaagagagtgtgcctgaagttggcgtggtgtatgtgttccaaatgccctggagaagggagtattcccgggttccctcttgtcttggggacattaattacatcagcatgatgtcctgaggctgcttcctcttgtgcagatcttggaggctgagttgcgggcacaagctactgttctggagaccctgaacacaaaccttttccaatgccagaaagaactcgagagacaggcaagtcctggttagactgagaaccgggctggagaggaacctggagaactgctgttctgcccaggagctatgtcccaagggctctggggaagacagctattcaaatttatcttctagaaaactattgcggcaaatctagagaaattgttccagacaaagcttgctgaagctgaagaaaagcataagtacaacataaagaccccgacagaagaaaataactgcctcaggtatgggatcttccctcaggggtccttggctgggttgcttttgagagcagaaggttgttcaagtgactgataggtcaggtcaccgtcttgatctctgggaggaggtaaacttctggacctggacacacattgtggaggtagacttttcatatctagccttttctcctgtgtgtctgtttttgtgtaaaacacaggtaaattgtcagtgggttctgagctgctttgtcccacgactgaggattgtttttcagagttcagtgggttttagcactctgattctggcttctgttgagactagttgccagtcaccatcaccattccctgaagggccttcctaaaccaccaacttagaagataagttacctatttcatcaatttccattggaaatatgatctcccaaacaccacgtttcaccaaatgtaagccaattactgtgatgagagaagatgcttcctcaagctggaagaaagccaaattctcttacctacctgccagcaaatacccccatcgcctttacccgtcgaggtttcatgatatagtgaccatcattccttttataggcagatgttaaccacaaccacatatgaggaaacttcagaagtttctgagaagtcctcatctgccagtcccaacatgtatgagtctgacgttcctgaacacaacagcaacaaaaagcaagcatcgtaggtaactaactgctcctggggctgagcgacactgccctgggaggaagctacggactcttctggagagacgcacgggaaggctgagctcttgagttgttctgtacttttgtcatttttcacaatttgctttcttccaatggatagaaatatttgaattcttatcctaattatatcttggctctccattgagaactggtgtcctctgtactggagtcggacttctgtgggctgtgtgctatgctcttttttacttttcacatgagactaatttgaagggtcttctttttgggtgatccttgcattttggggtgtgacttttgtccccctgagggtaaacagcaattcattgatttaattccaaaatctttattccctcccatatcagactttttagcccagtgacttgggaagagtaactgaatatttacactgtctctgaccatcaggagaactcaaatgcccacagagcaggcaacaaatccatggaaccggagtgggcacagagtaaccagtcacagaggcaggatgctagaggaggtcggtaaactcagagccacacccttttctgaccatggcacttcttagactcattggactgcctgccacttgggtgcatggggtcattatgattaaaaaaaaattctggtttttatgtggaagtgcttttaagtgttggcaaggaatgtcaaatgttcaccacgtgtgaacatgccaattgtaaaacaaaacaacaacaacaaaaaaacaaacaaagcaaaaacaaacaaaaggatcccctagaaacagtaaggtaaatctatttttcttaaaacaaaacaaaacaatacagcttttgtctcactgacagtttacttaggagggaacagggaatataaaagtttataggtacagattcaataaaatatatactaaagagtaatgcgtagaacaactcagtttcttttaaaaagctatatgaaaacataaaaataaccctatacattaatatggaatttgaaaaacaaacaaaattcaagatagagatcctgctagatcctgattcaaacagactgtaagaatgcaagaagatcgggagatttttaacactgactggtatttaatgttcaaaattgctttggctatctaaaacgtacctcatccttagagacacttgggtctctaaactattcatatgtaagaatattccacctccatggacccaagtcagagcctccaagtgagggagtaaggcaggcaggtgaggatacagtcagggaggacagagcacagcacagatgttgatgttggaggctgtaagcatgtggcttcaccatgctgccattgcttttagtttttgtatatttatgaaatttttcacaataaaatacttgttttagaaaataagttttgttttaatgttattatcctacaaaacataaataaaaccgtcttttataaatacttctagaaaataaacaaaaacagaatttcctgatggactattagctagaagtacattaagtaaaaacctgtaagttacctaaaaactaacaaaaataatttttactcctttttttaagggaaaaaaccaaacaaaccagggtcaaatgtagctcaggctggcctcaaactggttatatagctgaagatgaccttacactccagaccctcctgcctctacatcccaagtgctcagtgtggtccaccacaactggcctcattttccttaaatttatctacatctacttatccagtcacacgttgcatgtatggagagagtgtgctttggaggtcagaggaaaacttatgggagccaattctttcatcattttggtcccagggatcaaaccttgttaccagtctgtgcagcaagcccccttacccgatgagccacctcaccagccccccattcattgaagatataacagaaatgttaacattggcgagtttaacttttgctcatgtgtaggcatgtaaggagagctgacatgcatgctcacatgtgcataagtacatgtgtgagcacacacatgctttggcaggcacatgcatgcagtcttcctcaatctccaccataatcagggaggcaggggctctcgattgaacctatagctgtcctccgataccactggtctggctacacagcttgcaccaggaatcttatccccaccctcccagtgcagtagcaattataggagggacaacatgcccatcgcccatcgctatttacattggttcctgggagctgaactcaggcccttgagtttgcttggcaagttctttaaccactgagctatctcctcatcctggtccaggctaacccttaaccacacttagcctcagaagtgtttttacagttaatgctctccacaaacaaggggaccctttcctttccattatcccccatgctccctaatagctctcactctgaaggactacatgaaatacccagagactaatgaaaaactaacctggaagaattagatactgcacagaaaaaagtttaatattttttattacctctgagaatttcatgcagcaaaatgctgatgatattcacccctttctcaccccaggtccccgctcccatcattcaccccctttgttaacttgtctcaggtccatgttctttcacccactctgttaacttgccccaggtccctgctcccgtcattcacccattctgttaaacaggtttatgttccagtcttgctttcttactcatgcatcttcaagtttgtttttttcaagacaagctttctctgtgtagtcctggctatctcagaacttgctatgtagagcaggttggctttgaactcagagatcctcctgcctctgcctccagagtgctgggattaaaggtgaacccatggaattcagtttgtgttgcccagctattcttgggagagggacctgccttggagtgtgattagcctaccaaaggttgctccaatttaaaaaagcaaaacaaaacatacatctaagtgacagtatacaaactgggtaggttatatttagaaatgtgtgtgtgtgtgtgtgtgtgtgtgtgtgtgtgtgtgtgtgtacaacagttaatgagaaaggaggtcatgtatttgaaattggaacattacatagaaggatttgaagggaggaaaaggggaaatgatgtaagtgtaacctaaaaaacaaaagaaatcctaaaaaataaattagactcatccacacaaaagtgcacagataagccatgtgaactgtggagagcacacatcattagggagggaagaagagcttcttccgtagtgtgaaggtgggctgtgtcatctgctttcccttgttcctcctgtcgtctttattgctcacgtcatagttcacgccagtcaggatgctaagaatgtcatctcctctgaaaaagaaagcagcataaagcatatggggcaaggaagtgcccaccgtctcactggcagtgcccaccgtctcactggctgtgcccaccgtctcactggctatatccactgtctcactggtagtgcccaccatctcactggctgtgcccaccatctcactggctgtgcccaccatctcactggctgtgcccactgtctcattgactatgcccactgtctcactggctgtgccaccttctcactgctgtgcccactgtcatactggctgtgcccagcatctcactggttgtgccacccactgtctcactggctttgccacccaccatctcactggctttgccacccactgtctcacttgctgtgtccaccctccctctggctgtgcccaccacctcactggctgtgcctgaggtaggttctctagttctgtctctctctctgtctctagttctgacatttgcagttgaaagtcactgaatcaagacttctcaccactgttctggcaactcagttttctcagagcacacagagttacttttgtgtacttggaatctctgctggttacaagaaaccagagttccaatggaggagctagagaaagtacccaaggagctaaagggatctgcaaccctataggtggagcaacattatgaactaaccagtaccccggagctcttgactctagctgcatatgtatcaaaagatggcctagtcggccatcactggaaagagaggccattggacgcgcaaactttatatgccccagtacaggggaacgccagggccaaaaagggggagtgggtgggtaggggagtgggggtgggtggctataggggacttttggtatagcattggaaatgtaaatgagctaaatacctaataaaaaatggaaaaaaaaaaaaaaagaaaccagagttcctatcagatttgctttccttctctgttaacctatgtgttcctccatgtttcccatgttgccatttggacctcacaaatgcctccctttcttcccccagtactctctgcctaaatcagcattgctcctacaggaacatccacagatttctaccaaaatgtaggcaagtaaaggctaaacatttcccatagctacttccccacctctgacaccagctgtctgagcaatcttgtggagcaacctcttcatcaatctgcatagctgacatggatcctgtaggactcagggtctgtgttacaaaatgaaagcactgcaatggtgttcctgtctactctccacatgccatgggaaattctcactcttcagacaccagacgataagacagagatgtaaaaggagcccgtagaagggctcctcattgttcagctatcagccgggtgtaagtgggagggaacctgaagtatggagccctaatttaactggagatgaaccatatgccatagggctatcatcccacacttgtggcttcttaagcaggtcaaattagtagagacatacagatcccctgctcttcagtatggtcacagtttgcaaagaagattcaaggctagatagcaattagaggatttctttcctaatttttaaaaattatatttacttatgcacacaggcacatgacatggttcacatgtggtggtcataggacaatttaaaggagttggtcttctccaccatataggtccctgggtatttaactcatgttataagacttggaaccaagtgcctttacccagtgagccatcttgacagctctaaaacatgccttctgacaaagctggtaatggacagttcaactccaggaaatgagtaattctctagatgttttgtgcttgactaattgtggctcggccagcaaagttaatctttagttttccgacaggaacacaggaatgctcccccttgggggtttatgggtgctccctccagtcctcaatgcagtcacgacagctccggggtgccttagggtcattaagggttacttccccgaagatcccatcgcctgaacacaccaggcccccatgggctggggagttgatgccacctgtggtcgccctgagccctggttcttacccagccagcaaagccagtaaagaaaggagctacagtcctccgcgccctcccgggctccgcccgccatcccctgtgtgccttcgcggcactcacagcgacctccggggccgggcaagtatgcgcacggcacagtggccggggacttagggtcccgggctcgcgcagcgtcgcgagtagcgctccggttacaccccgcaggtcacctacctgtctgcccctaagtggccgcttgagaggctcaggtctcagagacttcgctgcgtgccttaggctccccaaaatggagacgcccagaaaccgaaagcagacgtggcagcaggcgcagcatctctgagccctggctggcatcctgggccaggctttagcaaagacaaaggtcctctgagcagtcagcatggcagcagaaaagcgttctctccagacccttacttgacttcataaagccaaaaaaaaaaaaaaaaaaaaagtctttggctagatatgtatcccacttttaaatacagaaaaacacaagtaaaatagcaaatatctttatttctactgaaaaaatataaaagcaaaattctaggcctttaggccaaggcttgggaatgtgatctctgtgactcaatgctccaaggtatgctaatcataaaacagcgacattcctctacccacccgcttcctgggttcaaagagtgttcattcaaagaatgtgctattgttaggggctcctagaaattgtcttgagagataaccggaacaattaccaggtattccttgtgactcttgtggctttgcacttccttgtgattcttaactggtatctttggtattttccaacaacgccctccccacttccttgagttgtggtttcttcctttaaatgcccccttacccagctactcggggcaccatggtcctctacccctgtgtggtgtatgaccgtgggcctgagagcgctcttgaattaaaagtcctcttgcagtttgcagtaagaccgtttctcgtgagtgatttggggtgtcacctctcctgagtcagaacgtgtgggagtcctcacgttgtgggtctttcactaccactctgaacatgtgggcttcctttcttatccggtggagtcgccccagtgggaggagacaaagtgtcaatacattttctgtgttactctcttgcatgggcctgtcctggagagtggttaatatacatagcgacactcccctggagaaaactgattttcccttacccagcagctatcagttgcacctagcttttcggttaggggcagggctctgtccacttccttgcctcagtgctgggattttgtccggtgtgagcctgtgcgagtcttgtgtgtattagcaaagcctccgtggattcatatgtgcattaacattagttcagttgtgtcaagaagaatttccttggggttatccactctctctgtctcttccaggcttcccaccttctcttgtgcatagatccctgagccttgagtggagggtgtgataaacacattccatctagatctgagtgctccaaagtctcttcctcactacactgtctagttgtgggtctctggtaattcccgtctactacaagaacttctctgaccaggggtgagtgaggcactgaactatggttatgggaatccatcattagaggtctgcttattactttgttcttttagtagaataacaggaggcggttttccccctggtttcaggttcttggccactttaacagtgtcatatatgagatgcatctcctggagtgggccttaaacctgattttttaaaaagtggtcgttccttccataacatttatgtcactattgcacagggtataccttgcaggcaagtcacagttgtatgtcacagggtattaaggtcaaaattatttaggatcttgagttttgtctcattccgtctcattcttaaatctaaataccactcaaaaaattaccatttgatttactttttaacaaagcaagtgaaagaactcagtggggaaacccccactcagttcccaattcggcgtgcacccaagaatcacgaatagaacacaacaccttgatgtaacaacaagaggttttttaatggcggagctccgggtcgaaacgtatctcacacaacaggagacagtggattcgaccacgaggcttggaagctaggggtttttatagaaaaggagtggggctgggggaggaattggcgcggtttcacatgattggcccatttaaacatcagcagcctgtaacatttaacttaggtcaaaggggtgggagctagggaggcgatgggcctgcccgggcatgtcctggtctgttctgctatgttctcagccccaggtttcaaagctcacaaacaactctttgggctatttaacatacattacatgaattacagttttatttcctttcattcccctcttcttctgtttagactaattctaatcatagaattttagagattggtgtcccctaactcttcatctacctgaactataagttgatattgcctttgaagaaccatgagttttactgtatcaattttactctggatgaaagccattcctctatttattatacaagggccgaaaactaaagctaagcatatcataaggattggtccggctacagcggaaattaaagaagttatccaagatggtcgcgattcaaaccacgactcaaaccacccccgttgagcatcccgttcctgtttccttcgctctaatctttctctcagtttctgcatagagtctctaactatttctgtatgatctgcatagaagcagcactcttctttaagggcagcacacagtcctctttcctttaggaacaacaaatcaagacctctcctgttctgtaaaactacctcagacagggaggtcaaagatttttttaaagcgtcaatggacttctctattgtcgctaggtcttcattgacagcatctctcaaagactgaattccctgtcttccttctatcaaagctgacactcccgtccccactcctactgccatacctatttccatgaatgcagccagggttaaagtaattggttctctttttgaccgccgcccagcatagctttcttctaaactggatgcagggtgataatatatgcggggtaacagctggatcatgacacaaaaatcatgagatgaattaaaaaccttagttgatacacagggagtaagtcctgtattgcaagcccaccatccaactggggaaggtacaagatagtaattagcttccgttctggacacagactgaatttgtccgcataggtgtttgtgagtggaaggtggggtacctatacagagacctggattcctcgcggatacttcagtcagggtcagtttttgtcctgtaccccaagagcaggaagtatggctgctggttctgttgaaatctccattgaaggcgattccttcataataaggcggacccgaggacaggcatagccagcagtcctcagtagcgcttggatcagttctgttaagggcataaaaggctcctctcactaggttaaacatcctctgtcttgaaggaatcgcgggggtaatagttagaggtacctgaggagtgggaggttgggtgatagcggccatattaagggggtccgcaatcactggagtaggctgagtaattgtatgggtaaggggtgtgaacttggttggggggcctaaaggattgtagggggtctctatttttaatctgatagtgaacaataatnnnnnnnnnnnnnnnnnnnnaatcctaagaccccaggtatacccttttgtccatcccagagctctcttccctggttcagtgaaggtgacacggagcggatggcaccagtcagtacactcgtctaggtcaaatcctccaggcacataagacactagggaatagttggctgttactctaatatagtcccagctcgaggagggcttccagcgggctgtacctgaagtctcgcaaccccagctcttacaaaagaagtcagccttacctccacacgttggattgagggactgactttggtggggcccggggcagacatagaagggatgggttcgaagcatacttttatccctttggttagagcaaccaccccatgggtctctcgaatgtttttctacgtatggagggggtgttaaaggtgccctctgaatgtcagagtacccctccaagtctcatctaggaggggctcctatagccaacttacagatgtcagggaaaagatcaggccaccaagtccacagagggtgtacctcggcgattgtccatacagccctacccccctcattgagtaccttccacgtttgttgaacaggactgtgggggttgaagtcttttgggatcgctcctacgaagcaggcgcaacttaaaaggattagtagtcttctccaaagtccactcatcatggctgactccagggggtgctctcttgacgtgggatgcgtggacccaagtggggattccttccactttgaccgcggtgggcgttgtcagtagcactaagtagggtcccttccacctcggttctaggtttcccgctcggtgtctcctcaccaggactgcgtctcctacttttttttttttttttaaggaatataaaactatttattgaccactgttcaccattatttacaataaagtaaatatacagttggatgacattctgatactacaaagttacttttctggctcattgaaccataacccaaatactgaaaagactgatcctaccagtaaggaatgagtcagggtaaagaaaaagcatgcaggtcattaattgatattagcaaatt

SEQ ID NO: 2 - DNA, 1388 bp, Mus musculus
tcaggctcagtcaaaggactagctagagggtgaattcctcctcaagggactttcaggagcccctggcctagcaagactgccttgtaccatggaccccaatcctttcatctactgtacctgctgtgactgctgcaaattgggacaaccaaagctaatcaagaccccttatccacttccaaagcaccccacggggaagtttaagccagttttacctccaccaatttcaaaagaacacaactcactcctgtcccaaccaggaaaatctactgtttccccaagggacaaggtccagtcaggaaacacagagagcagcaaagcaccttctgaagtgattcaagtgtcacctggctatacactcattcgaaatcgagaacagatatcagtcaccttgggagatgagatgttcaacaggaaaaagcacttggaatcagatgtcttgagcaaagtcaaattttccaggactgatatcatttctgaccttcaggagcaaattgctgagttgatggcaataatagaacagatgaacagagaccagcagtctgccctgaaactgctctccaaagatctggatctccgctgttccaacatgaagcagaagtttgaaaccgagagcagataagatgagcaaggaatataagtatctgaagagtatgttccatgtgtttcaggatagcatttacgaggaaatggaagacaagtggctgagacgaaaggccgaatgggagaaagatgagaagatggagcgggaaaagatcctgctacaacaaaaatgtagaataataaaaaagtttgagttacagtcggaagaaaaaaagaagaaaatgaatgagtccatcagtgctgtttctgataacttcgctcgagagaaagaggatcttggaggctgagttgcgggcacaagctactgttctggagaccctgaacacaaaccttttccaatgccagaaagaactcgagagacagaaaactattgcggcaaatctagagaaattgttccagacaaagcttgctgaagctgaagaaaagcataagtacaacataaagaccccgacagaagaaaataactgcctcagatgttaaccacaaccacatatgaggaaacttcagaagtttctgagaagtcctcatctgccagtcccaacatgtatgagtctgacgttcctgaacacaacagcaacaaaaagcaagcatcgtaggtaactaactgctcctggggctgagcgacactgccctgggaggaagctacggactcttctggagagacgcacgggaaggctgagctcttgagttgttctgtacttttgtcatttttcacaatttgctttcttccaatggatagaaatatttgaattcttatcctaattatatcttggctctccattgagaac

SEQ ID NO: 3 - protein, 176 aa, Mus musculus
MDPNPFIYCTCCDCCKLGQPKLIKTPYPLPKHPTGKFKPVLPPPISKEHNSLLSQPGKSTVSPRDKVQSGNTESSKAPSEVIQVSPGYTLIRNREQISVTLGDEMFNRKKHLESDVLSKVKFSRTDIISDLQEQIAELMAIIEQMNRDQQSALKLLSKDLDLRCSNMKQKFETESR

SEQ ID NO: 4 - DNA, 1981 bp, Mus musculus
acaagtcaggctcagtcaaaggactagctagagggtgaattcctcctcaagggactttcaggtaataactggggacaactgaactgtcttctaagggaagctcctggggtggatggccgcggaacccttctaaacaccactggctgggtttgcaagtcttcaaggcagtctggagatttctgccttggcatctcaaccacttgggaataaacacagcaaccatgagttctgaaacaccttgattgggagcccctggcctagcaagactgccttgtaccatggaccccaatcctttcatctactgtacctgctgtgactgctgcaaattgggacaaccaaagctaatcaagaccccttatccacttccaaagcaccccacggggaagtttaagccagttttacctccaccaatttcaaaagaacacaactcactcctgtcccaaccaggaaaatctactgtttccccaagggacaaggtccagtcaggaaacacagagagcagcaaagcaccttctgaagtgattcaagtgtcacctggctatacactcattcgaaatcgagaacagatatcagtcaccttgggagatgagatgttcaacaggaaaaagcacttggaatcagatgtcttgagcaaagtcaaattttccaggactgatatcatttctgaccttcaggagcaaattgctgagttgatggcaataatagaacagatgaacagagaccagcagtctgccctgaaactgctctccaaagatctggatctccgctgttccaacatgaagcagaagtttgaaaccgagagcagggaactcaaagagactcacagagaggagctcgagaggttagagaacaactacaaggaggccctgaaggcagaaaaggccttggccgaagagaaactaggtactgtcgggccctggggggatgctgggaggaaggtggacagccttccctggcatccctatagccatggcttggcacagccagatgtccaacatttcccttctgaggcttaaggcatgagaatgactgagaacggaactgcttcatcactgaagcaagaacgtgaaatttttttaagtgcattctaaagttctaaaactacaatattactatgatgccttcaggttttcttgcatggagaatggcagtgatctcttgaatgctcactgggctactgtgattgcaaggctctgtagtgcatagtgctatgctgacagaatctcactgtttacactgctcttggggaaagcagagtgtgcacccttcagatttggggtttatagactaatgtccacagagagaacgagacactctacaaccttcttcctctgtttgaagttagtgtcttatttacactttgcttgttttctagtttcctgaagagaatgtgtggttttcataaccactgtaaaggaggaaatgatacaaaaaggagaagcagatgcattgtgggaggttctgttcctccttcccatagatacagatgaccctcgggggtggggggaggttgtcttactaaaacagctgaacagagtgtgggaactctgagatcttggagaagcatgtttagaaagtacctggcctctctcccagaagctcttcatccatcggttcaggtgggatacaataactgataagatttttgataagcttccagagcgacttgggaatcccaagacggtttcatcacctcagggagagcttgggtgtggagctgaagagttcatgtgagttttggaaagtgtgcccaccgaaggaataatgacatccttgttttcttttcctccagataagatgagcaaggaatataagtatctgaagagtatgttccatgtgtttcaggatagcatttacgaggaaatggaagacaagtggctgagacgaaaggccgaatgggagaaagatgagaagatggagcgggaaaagatcctgctacaacaaaaatgtagaataataaaaaagtttgagttacagtcgg

SEQ ID NO: 5 - protein, 241 aa, Mus musculus
MDPNPFIYCTCCDCCKLGQPKLIKTPYPLPKHPTGKFKPVLPPPISKEHNSLLSQPGKSTVSPRDKVQSGNTESSKAPSEVIQVSPGYTLIRNREQISVTLGDEMFNRKKHLESDVLSKVKFSRTDIISDLQEQIAELMAIIEQMNRDQQSALKLLSKDLDLRCSNMKQKFETESRELKETEELERLENNYKEALKAEKAEEKLGTVGPWGDAGRKVDSLPWHPYSHGLAQPDVQHFPSEA

SEQ ID NO: 6 - DNA, 88864 bp, Homo sapiens
gtgctgttggattcagtttattagtattttgttcaggatttttgtgtctatgttcatagggattactggcctttagttttcttttttcattgtgtctttgcccagttttgggattagaatgataccaaaactggcttcatacaatgagttagggagaagtccttccttagttttttttaatagtttcagtagagttggtatcaactcttctttgtatatctggtagaatttggctgtgaattcttctggtctgggcctttttttggtggttaaattttttattactgattcaattttggaacttaatgttagtctattcaggctttcgatttcttcttgatttaatcttgggaagttgtgtgtttccgggaatttatccatttcctctaggtttctagtttttgtgcatagaggtgttcataataatctctgaggatcttttgtatttctctcagttataatgtcacctctgtcctttctgactaggcttacttggatcttcttttctttgttaatttagctagcagtctatcagtcttgtttatttttttcaaagaaccaacttttggtttcattgattctttgtatggattttggggtctcaatttcattcagtgctgctctgacttatttcttttctttgctggctttgggattagtttgttcttttcctgtttcctctatgtgtgatgttagatcattaatttaagatctttctaactttttgaggtaggtgtttactgctataaactttcctcttaaatattgcttttgctgtatcccagagattttgatatattgtttctgttttcattaatttcaaagaatttttttatttctaccttaattccattgtttacccaaaagtgattcaggagcaagttgtttattttccatgtacttatgtggttttgaacagtcttcttgatactgatttctatttttattccactgtggtctgagagtatggttgttatgattttgattttttttttaaatttcttaaaacttactttatgaccaagcatgtggtcaatcttggagtctgttctgtgtgcagatgagaggaatgtatattctgtggttgatgggtggaatattcagtagatgtctattaggcccaattggtcaagtgttgaagttaagtctagaatttctttgttgttttctgcctcagtgatctctctaatgctgtcaatgtggtgttgaagtcccccactactattgtgtggctaagtctttttgtaggtctagaagtacctgttttatgaatctggttgctctattgttggctgtatatatatttagggtagttaagtcttcttgttgaattaactctttatcgtttgtccttttctttactgttgttggttaaaagtgtgttttatctgatatatgaatagcaacccctacccattttttgttttctgtttgcatggtaaatctttttccaaccctttactttgagcctatggatgttattaatgtgtgacaatggtcagtcgaaggtagcaaatggatggcttttgtttttttatccaacttgccaccctgtgccttttaagtgaggtgtttaaaccatttacattcaaggttaatattgatatgcaaggttttgattctatcatgagattgttagctggttgttttgcaatttctgtggtgtggttgctttataggatctgtgggctatgttcttaaaagtgtgtttctgtgatagcacatatcattctatcgtctccgtgttttgaactcctttaagaatcttttgtacagctgatctggtggtaacatattcccttagctcttgcttatctagaaaatattttctttctcctttgcttatgaagcttaatttggagggatatgacattcttggctggaatttcttgtctttaaaaatgccgaaaaaagacttccaatctcccctggcacgtaaggtttctgctgagaagtccattgttagcctgatgcattatctttgtacacaatccgacctttttctctagctgcctttaaaatgttttctcctgggcgcggtggctcacacctgtaatcccagcactttgggaggccaaggtcagcagatcacttgaggtcaggagttcaagaccaacctgaccaacatggcaaaacccggtctctactaaaaatataaaaattagctggccgtggtggtatgcacctgtagtcgcagctactcaggaagctgaggctaaagaatcgtttgagcccaggaggaggaggctgcagtgagccaagataatgccactgcactccagcctgagtgacagagtgagactccatcttgaaaaatatatatatatatattttctttagcattgaccttggacagtctggtggctatataccttggtgatgctcatgttgtatggtatcttgcaggtgttctctggatttcttgtatctggatgtctacctctagcaagattaaggaaacttttttgaattattccctcaaatatgttttccaggttgttcacttttttccttctcaggaatgccagtaattcacaggtttggttgttttacataatcccatatttctcaaagcctttgttcacctttaaaaattattttttccttatttttgtgtaactgagttagctcaaaagatcagtcttcaagctctgaaattctttcttctgctaggtccagactattgataaagctttcaattgtattttgaaattccctgagtgagtttttcaacttcagaagctctgattgatttctttataagatgtttatctcttgcttcatttcctggattgctttagaagttttgtgttgttgatttttaaccttgacttggatctcattgatcttccttgtaatccatgctttgaattatttatccgttctttctgagtttctattttggctatagaccattgctggagagcaagtttgatcctttggtggtgtcactatattgagatttttcatggtgccagaattctcgcactgattccttctcatctggagatgctggcattttaattttatagtattttcatataggttaggattatttatttttccttctgtccctataatattattggggttttttttctttccctttcccttttcccccctctctagggagtgtgactataaagaatgctgggtagggtcttttggctttgcttctataaccctattcacttctgtcagcaggttttatactgggctgtgcagttcaacctacaaaccagtagatggtgctaataggtaagagcctgctatggccaatgtgactgagtatatacttgatccttgtttatggggaaaagctctgttacctcaggcaatgagctgattcatggggtgcatagtggtctgagctccctgctcagacacagggagggaggggccaaaatgagcagagctggactaggcaggtccaactacaggtcccctgatggcaggtacaagtaccagcactgagggagaatgcagtgggtagccactaccaagcacccagagatgcttgggaaatttcctcgaccccaagttccctgcaaagggatgggggcggcttaaactaatccagtagagtgactgctccagatgcctggagctctatctaggcatggagccccactgcaccaggatctatgcacaggaagggtgaggtgctcaggctgctgttccaggcgagtgagtgctctaaatgcctagagatctgcctgagcatggaggagagagggccccccataccaagacctctgcgtaggagggtttgggtgactcagactgctgatcgaggaaaatgggtgctccgaatgcctgatgatctgcctggtcatggagcagagagggccttgctgcaccatgatctatgtcttggaatggggaggggcagcggctcaggctgctgaaccagatgagcaagtgcacctaatgcctagagatctgccggggtgcaaaatggagagggctttcccacacccagatctctgcacaggaaaggtagggcactcaggctgctagtccatgtgagcaggtgctccaaatgcctggagatctgcctagagttggagtggagagggcacccttgcaccacaatctatacacaggaaaggtaggacaactcaggctgctgatccaaggaagggggtgctccagatacctggagatctgcctgggtgtggagcagagagagccacgctgtaccacaatctatgtccatgaagggtgaggcagctcaggctgctggtccagacaagcaagtgctccaaatgcctggatttctgcctgagggtggagcagagggctctgctgcaccacaatctcaggggagcaggctgggtcaccctgcaatgacatatgcagactagttccaggttaccaagctagccctggctgcaagtctcatcacacaggagaaactgcagctgtagcagctctcctcccacctcaggcctgcaaagcgggagagcacaatccctgcacctactactgaggctctttgcacagttctggctatggagactcctaccctaagccagagcaggtgctccaattgctgacccaagactaaaatgcctgtgtggccacactgctaggtcaccaaagaatgcctggattaaaaatggcaccctgctttcagtcctgagtctgggaaaatgtttgcagcttttctctatgtcttttcctcacagtgtttccaagccgcttccccaagttagctccagagcttgcgagaaacaaagtgctctccctcagcctgggttgcctggatcccaagtggaaaggtgagtcatagagggaggctgtctgcctctcccatgtactagggcttcactcatttttatcagctgcatgccatcactggggctgtttgtccacattctcctccctggcatctggggtgtccttcacaattctagtggattcccattttcctttttggataaaaacccacagagatgatctttacacactatcttgctatttccaaggagccaaggcacactgaaagactctaatctgccatcttggaaaaaaaaaagaaactgtttttttaaaaaaactcagtatccatttagaattatgaccatcttgtgagaaatgaagcttgagactctactttgatatcaaatttagtgctattctcatcatctttaattgtgttttctttcacaaatgactactagtggatgtgtttaagtccaaaaaaccttctgatgaggtttaagatttggggctttaagcatcctgttgacttctattgttagtttcactatattaaatttgagttaggctaatagtaagttttatttttctgtttttcattagtttttatgagttaagggccaaaataccacaaaattttcaaatgagcaaatgttactgtgcaaattcagaaaagatgctgaaatacaactgttggctggcaggtcatggtgccagcaatagcatgaagtgttttgttctttagtttaagaagttatgaagaaagcaccccgaaggtgttatgagatgatgaaaaatacagaaaacccaaatatataaaaatcaaagtattgtttcacaaaatttgatcgtcttgccttctcagaaaaatcactaagttgttcaaaagcaagattttcacatcacattcaaacattatgataggccagaaaatgctatggagtattttaatttcatataattcactaccacttctatggctgtttttaccatctctcaaacaatctttagatctatccagtaatatgaagagttggtaccaggcttcatgttccatctagatctacatatatataaatgtaagggtactcaggatgcatattgcacaatgttcttcagccaccatatgtagctcttgcaaataccattcctgtatgcgaatacctgtggaattgcaaattaaggcattaaaagaagcaaaaaatgggtgctcagcaccactggaaaatatatttcattatgcacaaatcttgcattcatgctatctgagaggttttgacaggttacctttcctcttaccttactgctgctgccccagtctttcctgcactccaaagcagtgtctgtgtctgatctcagcagcagcatcacccacaaacctttacagtatttgggcacagtcatcttttgttttgaaggtaaagggtaaaagatgtggtgaagcattccctgagacctgaatgtggttaatgatgagagtgaatctttagggttatggttcctgctgtttcagagctgagctccagatcaagggcccgtgtgtttttgtttttgtttttgttttcttcctcttctgagatggagtcttgctctatcatccaggcttgaatgcagtggcacgatcttggctcactgcaacctccgcctcctgggtttgtacaattcttccacctcaacctcccgagtagctgggactacaagcatgcaccaccacacccagctaatttttttatttttagtagagacggggtttcaccatgttgaccaggctgttcttaaactcctgacctcagttgatccacccaccttggcctctcaaagtgctggaattacaggcatgagccactgcacccagcccgggcccacgtattcttgaacaaatgtaggtttctgtgtgtgcctgtcctatgcagagccctctaaagcccagggctcagaacagtggcccctctttctaggtgcaagggtagcactacaggctttcacgggattcctgtggctacctggtcgggtctattcaggatgatccatgggagttagcatagcaccactctaaagtcagatgttgaaagccaaagatcaaagagagttgagcaagtgagcaagttggagataattacaagcttcttaagagaacactgtcttttccacactgggagtgttctcatagagccacaaatagcgctccacagatggaaagcctccgaatgctcccagctgaccatgtttgccacttcgtgaatgctgcagcatcacacaagaggatatctatttccccaagccctgtgcagaccaattttgataatattgctgtcagaattaagttgcagtttctctcattcatttttcaacttatactttgttttactattggtggcctcctccacctctgttccaaatagtaagacactttgctttaggcgaagttactgagaatgccagcacttccccaatttcatccaagagaagagcacttaacacttagcccctaaacaccttcatttccttctcctcagctgttttggaactggcgaagctttactcatgtccaaaaagatgaaaggagaatggggatacccaagtagtagtaattagtgctgagcctttgccaagtcgagtggctggggtattccttcagcccttacttcctctgtatctctgtttttagccatgcttcactcaagacccaaatcctgctgcttttttttttttaatcataagaaaggatttaaatataaaattttacacattaaacacactcaaagtaaatattcaatctctggatggagacagattgtctagatgactaatagagtctatcaattcttctctaagttatttccctccttttaatctttgaaagtctctcttcatctagcctgttcatggtgctcagagttgaagcagccatagtgcaaccaagacgcttccctccatcaacacaccgaggctggcataacagagagatggaaagagcccagttctccaaggacattgctgaatctttgcaccaactctgatagcactgcctccagactctatttcatgaggttaataaacctctttgatgtaagccacttgcaatcaagcaacaggtctatgcattttaactacacatggcccacactgagaaatcttgtcgtaaatactggtgtcctcagagctctgttctagaccctcttctctccttacacaatactctctctatatgtgatctcactcgctcccttggcttggaatagtatccactctgaagactcctaaatctgcttctaggccagaatcttcctctgaacttctaaaatatgtaagaaactctaacagacgtcaccacttgtctattagtctccctgcacctcaacatatccaaaactgaactaataatctgctccctagaacctgtttatccctccacactttcctatctcaataaatggcaccacggtcaactcaattgctcgagctggaaagccaggaatcatcaccttctccttttcgctcatcccagcatccagtcaatcaccaagttctatcatgtcttctctccatccccactgctgctcctcagtcagggccatcgtcaggtcccatgacgaccactgccacagacttttacctggttttcctggcccttccaattgcttccctatattgcagtcagaatgatctttctgatatgtagatctagtcagatctcttctctgtttaacactgctgcctgactcactggactagaagagtaactcctgctatgaactcccactgcttctggcaagtctcaatatgagtcattgtggctgcatggtgacttacacctgtaatcccagcactttgggaggccgaagcaggaggatcacttgaattcaggagtacaagaccagcctggacaacatagcaaggcctcatgtatactaaaagtcaaaaaaattagctgggcggccgggcgcagtggctcacgcctgtaatcccagcactttgggaggccgaggcgggcggatcacgaggtcaggagatcgagaccatcccggctaaaacggtgaaaccccgtctctactaaaaatacaaaaaaattagccgggcgtagtggcgggcgcctgtagtcccagctacttgggaggctgaggcaggagaatggcgtgaacccgggaggcggagcttgcagtgagccgagatcccgccactgcactccagcctgggtgacagagcgagactccgtctcaaaaaaaaaaaaaaaaaaaaaaattagctgggcatggtgctgtgcacctgtgtagtcccatctacttgggagtctgaggcagaaggatcgcttgagtccaggaggtcaaggctgcagtgagctatgcatgcagcctgcactgccactgccactgcaccgcagcctgggtaacagagtgagctactgtctcaaaggaaaaaaaaattaattatgcttttattgagcttttttattgtctgttttctcattggtctctaagttgtattgagtataagaactgaggtatatccccacacctagcaatagtgcctggcacacagtagacaacaaatgtgaagttgagtgaatagatgaatttataacaatattttgtaagctaggggttgtgacccaccaggatcatgaaatcaatctagtggattataatcagctttaatttaaagaagaaaaagaaatagaagagaatagcaaataataagagtattatttcatgaaatttttttattacaaaatttgtaaaatgtatttcttataatgagtggcagtaaaactaaaatgaaagccactgggttgtaataagcaagtacttttttctatagtaagaaaaagcagctttatttaaaaaaaaaaatcggaaaaccttgtgactgcaaaagattcctgccttgggggatttttactttcacagatttcaaagccttaaactcgagggaaaaaagtgtctagagttttaggtttctgtgagtagatcacagaggaattaaaaatccatcacagatcctgcctggtaactattgccatagaccaatgaagcctaaaagtgctgttgaattctatttcctctgaagatatatcttaaacttttttgtcccatgactgatgacgaaagtggaaatccagtgttaaaagtatgaattctttgctgttgagggtggtcactgatttgtgtcttggagaatttaattggctgtttctcccaaccttctctcttgaagaaaagagccctgagccaatgaggagctactgttctgtgtccatagcaacaaaataaacaaactttggcctgccatctcccaagggcaaacctcacaactcaggcccaagtcacaggaatctgaatggtggggtgaccttctcctctagtttaatttcattgcaatactgagaaacttcaactgttttgtctttagaagggaaattcatgtttgtgccaggccagcctttgtaaaagcctttgattggattcactagaagtctgtcttcccgcagtacatatactgtgaattttctccttcggcatttcaaccacttggaatggccactaaagtggcttttgatctaaagtaaactctgattctgtgttgatggggaaccatttctctctaacatggtggtttctttaagatgtttgacttgggccacatgagaataacagatctttgggcagtccaaggtaagctctttggaaaagatgttttatattattttttctactgattattaatactaaccagtaacttctctgaagcctctgccggctcactggtgactattgttagggcaagcctcaggtaaaatcatcaggtagaagtgcaggaaagggaaaaaagggggagaaaaaatccttacacacactcacacacccctctataattagagctatatgatgtcaagccactgtaaatgcagatctatctgtgatgacatggaaatatcaactagatatcctgttacacaaaaagaacaagatgcaacattgtgtgcaaagtatgctctcacttatgcaaataatttaaaaaatctattatgcttctctacaggttaagttctatatgcaaaacatttaaggttatatgcactcacaacatttctggaaggatgccccaaaaatctgttagaagtagttcccacttaagaagctatgagaagtcaagggctgattttagctactgaaatattaaaatactgccatataggcagggcacggtagctcacacctgtaatcccagcactttgggaggctgagatgggtggatcacctgaagtcaggagtttgagaccagcctggccaatatggtgaaaccccatcgttataaaaatacaaaaattagccaggcatggtggcgggtgcctgtaattccagctactggggaagctgaggcaggagaatcgcttgaacctcggaggtagaggttgcagtgagccaagaccacaccattgcactccagcctaggcaacaagagcaaaactccgtctcaaaacaataataataataaataaaatactgtcatattgattggtagatgaccattgtccaagccccttgcatgtcctccttgccaccttggttgtcccaactcctcccctggcacccccagaccacctcatgattcagcaactaaggggttaatgcctggcatggaggtgggagtgagatctcccaggaccctgttccaaccctggttgattattcaatagccttgtcttactggttgttaaatattttgagtatcactcccatgggtgttcaaagaaaaaggcctttatttttattttatttatttatttattttttagagacagggtcttgtgctgtcacccaggctgaaatgcagtggtgtggtcctagctcactgcaacttcaaactcctggcctcaagtgatcctcccgcaccacctgccaagtggctgggactacaggcacactccaccatactaggctatttttaaaattttttgtagatacagagtctcgatatgtttcccaggctggtctcaaactcctagcctcaagcgactctcccacctcagtctctcaaagtgttgggattacagacatgtgccaccacacctgtgaggccttcttttttttttttcttaagagcaaaagaatatataccaagacattgtttatcatgggaaagaggaaaaggaaacaactacacattcatcaaagatcattgaaaatctatgtaaaactccactgagtgattgtatcacccatacaatttacctctgctttctggcttttgaatgcaaatgtttaatgttatttataatatggtaatgacgattacaacattttggcagtttcatctgtgaatctcttttctctttgtttttgttttttgttttattcatttatttattgagacagagtcttgttctgtcatccaggctggagtgcagtggtgagatctcggctcactgcaacctccacctcccaggttcaagtgattctcctgccttagcctcccgagtagctgggattacaggcatgtgccaccatgcctggctaatttttgtgtttttagtagagacggggtttcgccctgttggctaggctggtctcgaactcctggcgtcaagtgatcctctcgccttggcctcccaaagtgctggaattacaggcatcagccaccataccatctttttctctttgttgagctagccccaaccaccatgatgagctgattacaaccactaagtttactagtcaggtaagaaatattcatcaaatgcccgttgtggacaagccactttgcaaggcttagtggaggtgttgaggcacagagagcactccatagtggagtcctggccttcaagaagagagaaggcagttgctagaagtgggcctgccttagcctctcacttcttgccccatggactcctgctaaatctcccaagttcagggttggctcctttcgtacaggaagcagatacaaggttctaagcagaagcagtttcttttttgctactgttgtagccttctttcagactctcacctgaattccagccccttgtagcatcatcttcccacctgggcactcgatcccatctgcttctctgacctcatctccttgacttggccctaacaggcccccaaacccagtggagtatggacagttataaatggcggccctgtcacctgctcttcaggcctttgctgtttagccagtctcctggactcctttctagccctggactcctttctagccctgacctctattgcagaagactccctagtcccaggcctctggcccagccaacccctgcacacgctgcctttcttccaaggccaggtctcttgcctttgctccactgctcacttagctctctttctgccgactcctctgctgactgcaagctccctgagggcaaggtccaaccagcatctagcacaggactcacagcacgagcctctaaagatttgtactgttaaagcagcagttacaagtgagtgagttttagtatcctcatatgtaaaacagattcaaccttaaggtcctctgtagctcttaaggtcattagacaccatcagtgggtttctcaagcatcagtcgtgttggagacaaaggttgatttcattttttcagcaggttcttaagcaaatgtattccagtgtaatattgaaaactaatcatagacttagacatttgagttaaatctgctatcactttaatgcttctgttaggccattgattcttataacatttttggcatttgtttttattactaatgaaatatccactgacatggctgggcacagtggctcatgcctgtaatcccagcactttgggaggccgaggcaggagaatcccttgagaccaggagtgcaagatcagcctgatcaacatggcgaaacccagtctctactaaaaatacaaaacttagccaggcatagtggtgggcacttgtaggaggctggaggcctacacctacaggaggctgaggcgggagaatcgcttgaacccaggaagcagacgttgtagtgagccaagattgtgccactgcactccagcctgggtgacagagtgagactctgaaaagaaaaaagaaaagaaaagaagaaaagagaaaagaaatatccactgacatcatttaaaaatcaactaatgttaaaaattcattaaggaaaagtctcaatttctgccccatcccctgacctgtcagttctacttctcaatgtgctcctagaggcaattattttcaactctgctatctatttctttggaattttatttacctcatacttccaagtaatttgtctgtgctccgtatgttaatttttctttctggtacagcagatgaggatttggctcttatacatccccattccactcattcttcccatgtagtcacagttcactttttggctaagtcactattaagtatttacatttgatacatatgagtgtgtgccatactatgattatgtttactttctcattcaatattttttaacctggagtaattgcacattttattttcttaggtttctatgtttctattgccaatctctcacccacactcccaaatgctctggttctggttgctctgtaacaaagttaccacaaatgtagtggctcaagcaacaatcttacaattctgaaagtcaaagtccaaaatgagcctcactgagctaaaatcaagaggtcggcagagctgcattccttccggaggctccagggggaattcgtttccttgccttttccagcttctagatgctgccccgattccttggctcctggaccttttcctcaatcactcctacttcttcctccattatcacatcttctctgactgataattcaggttaatctttctatctcaagatctttcatttaatcacagctgcttttgccatgtaaggtaacatagtcacactttccagggattaggacatgcggtatagggaaagggacagtattcatcctaccatgtgctcctacacatctaccagctgcctgtcaatatcatcaggtaatctaccagttccaagtcctgcaccctctgggacctctgatgtgtgaattggctccatcttgttcataccctgtctttgcaggcacataggctatagtgagctatggagagagccctagttactatgccaaacatgtacggacatcccttgtgcaatcttgtctcctctcccattttcttgctcttgtggaactaaatctcttttaatgctgtactctaattttagttggattctggaaaagaaagaagataagccagtgtggtcaagccaccatgtttatctgatagttttctttcatcaagattctcataataggggttttgttttttgggagccagggaaggagtttccactctgtaattcaagaaggtgaccaggaatgagaaacgaggagattcatttgcactgtagctcaagcagcagaactaattttccaggaagttctgtgcagaacttgctgtgggaatttctctttccttcagtgagaactggtgtggcctgctggaaaggaaggagcttgggagtcaaagagatttgtgtttgtttccagctctgcaacttgctgccgccgtgacttctctgagtctcagtagcttcatctatagtatcagcataacaataattgagcagttttacctggctcacagcaaggactcggctatggcaaattttattttattttaattattttgttttatttttatttgtatcttattttattttttgagaggaagtctcactcttcacccaggctggagtgcagtggcacaatctcagctcactgcaacctctgcctcccaggttcaagcaatcctcccacctcagcctcctgagtagctgggactataggtgtgtgccaccatgcccagctaatttttgtattttcagtagagacggggtttcaccatgttggccaggctggtctcaaactcctgacctcaagtgatccatccacctcggcctcccaaagtgctgggattacaggcgtgagccaccatgcccagccagttatggcaaagtttaaattgctttcaagtcaagtctactgagtagaaagggatgagctgttaacctatagtcaagaccctgcaccagatcaacagcttctggaatctaccattgttctttgggtcctccctgggttcttcccaattcttctgtatttttgctttgattctaaatggtttaaccttctgctgttgtttttcaatttcagcaagagcctcctgatctagcagccaagactccccctgacctttggccatgtaccccaaccctctcatctactgcacctgctgggacccctggaacttgggaccacggaagctaatcaagacccctcaactaccacgcaagaactccacagggagttccaagtaagaattatctgggatggggtaggcacagggaccttgggatccatttgtagcctcatttctctcacaagatttctaaaacagcaagtgtggcaggaaaatcccaggtgggccagaaagcctcgctttccccagcttccctgccagctggttggctgcaccctcatcttgccagccctgcctggggtttgtgccattttaaatgaggaagtctcagtgttggtgcaacggcaaagtgcagcttccaaccaaagggccctgatggcagctgccgccttcatgtgggataaagagctttgggaatcgggggacaaactcttcctgggacagtgaacaagtgccagggccttgggcctgagttttaaaggcctcagattttaaagattccagctatcagatcatgcattccaattttgggtcactatagggatgtacttaatctgggagtgttaaaaagggtttccgaatttccaatgttcttgttttagttatttgtttttcactttcaggctaactcctcttgtaccagctccaaaaaatcacaattacctccaaccaacaaaacctgttgtttccccaaagtaagtatgtttgtttgtttttgttttgttttgtttttgagatggagtctcactctgttgcccaggctagagtgcagtggtgtaaccttggctcactgcaacctctgcctcccagtctcaagcgattctcctgcctcagcctctcgagtagctgggaatacaggtgtgcgcgccaccatgcctggctacttttttgtattttagtagagacggggtttcaccacattgcccagggtggtcttgaactcctgaactcaggcaatccacccgcctcagcctcccaaagtgttgggattacaggtgtgagccactgcaccaagcagtttgtttgtttgagatggagtcttgctctgtcacccaggctggagcgcagtggtgccatcttggctcattccaacctccacctccctggttcaaacgattctcctgccttagcctcctgagtagctgggattacaggcacccattaccatgcccacgtaatttttgtatttgtagtaacgacggggtttcaccatgttggccaggctggtctggaactcctgaccttaagtgaccagccctcctcagccttcaaagtgctgggattacagtcgtgagccactgtgcctggccctaagtatttttatgtccatgaggcagaaatggtttcaggcatgtgaataaaataatctccctctcacctggcctgacttgaactaattgatgccagggatgttagagaattgccagaatcgaccttgatttcttgcaaacctcagatcctacatgtagattttggggtcctctgcatccacagcttccaaagtcattgcattgtttgattcaaagtcactgtatccactgctctccacaggggtgcccccagtaactgtcttctgccctggagcccaaagcttgatgtgtgctattgtcacagagccttggcgaccctcccgtgcatttagggtggtgactcactctttagctgattactgtcctgtgtctaagattttctatgggttgcatcttggttttaatcacaaattaaaatttttactcgcattttacaagcttagaaatgtaccttagttttaggtctttgtatgaatctttgtattccattaatttttttggaaaatatttattgaccacctattatttattaggcactgtttcaggtgctgggaaaagagccagaaacacaataaagtctccactctcctggcacttatattctagtggggaaggaaggggaagaggaccataaactagttattacatccgaggttggcaagtgctacatagaaaaaagatgcaggcaaagcaggtaggggctgtgacggtggggatactttacgtagagaggtcagggcaagtgcctgtgtaaagggggcaaaaggagcctcaatgatgcctggggcaagcactcttggcagagggaccagcaagtccaaaggccctggggtgggaacttgcttggcatgtctgacctcttccaggaaggcagaagccagtgtggcatgagcggagcgagtgagcagggagtggtgggagatgagctcaaagaaggtaacaaggtgatgggtgtggtgggcaggacagtgaccccctcccaaggacgtctacaccctaatacccagagactgtgaatatgttacttgccaaagaggaattaaggctgcagatggaattaaggttgctaatcagctgaccttcagttggagagattatcctggattatcccagatcccatgtaatcacaaaggtccttctttgtatgtgaaagaggaggtcacagtgtcagagtcagagaaggagctgtgacaacagaagcagaggttggagtgatgcaattgctgctggctttggagctggagggaaaggccactgtgaacatatacacatatgtggtattcattttatatatagcatatataaagatttgaatgaaaaacaagtttaacttcaacatttgtatcttaatgggatacatttcattttctggaacatttgtttatatagaatgtttcattctccaataaagagagttccacacagttccctgaactgagtgtgtgtgtgcccgtttgtgtgtaagggggtggtggggggtgtcacctgactcacagagccttgactcagggagaatatgtaggggtccctctagctggtttatgctcctccaaaacagaagttgccccaacatcataagacaagtcttttgcctccttgggcaggaccttttcatgagcacccctactttggggccctcaggagcccggcttcagtgagttccccaactatcctagggatcccctaagaaggtcaggtcagagagcagaagtcagatggtggcggcctcagggttcagctcctaagctttgaacttctctttgctgtctggttgctttctgagcatgtctttctcttgcagaatgaaaatccattcagcaaggcaagaagagactaataaatcattttatgtgagtaaaggcaggagagggcggtgggactaaaatttattgagtgcctactatgtgcaagcatgggccctttacatttttatacttaccttgtcgaatcttcacaaagatcctgggaggaggtgctgttaatattgcacattatgcacggcaggtaagtggaagaaccacgacttgaactcagctcagctagattccagagtgggcatttaattgccactctctcctgccttgcacaagacaaacagagtgtctcagagaaactggacatgacagctagtccaggccagtgaacagctcatgcctagatgcaggaagtgctctgctgacctagggaactaacgaaagctggggagaggctgccgggacccctcaggggagcaggggcgggagggcactggagaaggtgatgagaaccaaactcgaaggctcttgacgcctgcctgggagtgtgggcccgacccttctggtgtctgggagcctttactggtctgacgcaggcacaggaccaagtaagagttacatttcagaaaaagcaccctttggtgggatgtaatcggtacattttactgttttctgtgtttatctagtttcttttcttttttttttttgttttgttttttagttttaggtctttgtatgaatctttgtattccattaatttttttggaaaatatttattgaccacctattatttattaggcactgtttcaggtgctgggaaaagagccagggaaaagagccatgcagtcctttaatggttagggaaaaaaatatacaagcaaaaatataattgccctctaggtagagaggaggatgaactgtggggggagcaagactgaaggcagagaggccagagcccaagagaaagatgatggtggcctggggccgtcaggcaggggtgtggagagaggagggtgactcacagagacatgaaggaggtgacaacagcagggatcaaggggctgcagcatgtgctgcgcagctctcagagccccagccttgccctggtccaggccagcagaggccctgcccaggtttctgacttggcgtctaatgggaaaaggaggaggaaatgacattttgtttgcaaccgtcctgtcattttctcatatgttgttttgtttttccctcacaaaagccctttgagaaagagttattaaccccactttctgataaggaaactgaggcacagagatgctggatggctactgtctggtggcagagccaagatttactcaggcctctgtgattccaaaacccgagcagttgccgcatgctcacctcctctgggctctggccacgagggtgaacacaagtcgggggcaggggcatcagtggcttggtttggcgcagagcttgagaggcccctagggacacccaggagcctgctaagcatcagatttgagtcggagagatgtgagaatgagctataatgggtgaagggcccagaagggcttgggctgtggagtcccaggtccctgtttttaagatgtgagtgaggcaataagagaagatttggaaaaatctcagcactccaagtctgccattttatcttactttcccttgatgcctaggaagtgatcaacgtgtcacctggctatcaacttgttcggaatcgggaacagatttctgtcaccttaggggatgagatgtttgataggaaaaagcggtgggaatcggagatcccggacaaaggcagattttccaggtaatgctgttgcagcaacatgcagctgcttggggctactcccacccagctcagcccggcctcagggacaagccaaagccgctatgcccacacccaggccactggtccctgctctggaggggccgcaagggcacctccctcctcgcccctgcttcctgatgatgcatctctccacatctgcctctctgctctgatcccatccgtgagcagatccaaggggcaggatgaagattgggagttatgtgattgatcccaaaggatagcaattgttcgtggggtgaggaatagatagaatagccataaattagtctgaatttgaggcatgcaaattaagtaaagtgagggtttctgggtggctggagtgcacttttttttttgagacagagtctctctctgccacccaggctggagtttagtggcacgatctcagctcactgcaacttctgcctcccaggtttaagctattctcacgcctcaacctcttgagtagctaggattacaggcttgcaccatgacgcccggctaatatttatagctttagtagagatgggattttgccatattagccaggctgttctcaaactcctgacctcaggtaatcctctggcctcagcctcccaaagtgctgggattataggcgtgagccactgcgcccagcctctttttcattatgtccaaaaatactactcagctcatgcccccgggagatgcagtgtggaaggttctggcctgactctaacccattagcacagctgtcctgtctgtcttcaggctccacccactctctgtcctccaatgccatatcaagtatatctccatgtctttcttttttcattaacagatgcagattcatctctacatcttttcattctaccctttaatctcttattcatatcttcttctctgatatcctgcccatgttcaggcatcttacttcttaactgcactactgaatggctctccaagtgcctcttccctcaggctgattttgctgtaagaattattttttcaacacacaagtctaaaagaccaacaatagaaaacacacacacacatacacacacacacacacacacacacacacacacacaatcatctacctatctgctagtgtattggcagaattcaaccaaaccgttagcagtggttacatctggggaagggattcaggttgagggtgagtctgaaggcccctcaagtagaatgaggccatgccatggagtctccctgatctgacctggcccagagggccacccaggggccaggggcattcaccctgcttatcttgtcttcccacccaggggcattcagcctctgctttcttttccctgcttatccacagccctctgcaggaagagaatgggtcatgcacctatagtcaagctagcaccgacagccacctcttggcctcacaaggaagttgtcaccagttgtgcacaataaaatatgataacctgtgcttgttgtattccctggtaaagttgtgggtgttgtttgtattgaagattgtgttcaaaagataggggctccctattattcaactttctcaagccttttctttctcttacccttgaactgtctcctcctgtatctcctctcttgttttatcagcccacattctctctgtgctcagttagacatgcaaagtggttggccaaagaggtcaaagcatcttgcattgaggacttcctctcagctccactgcacatggcaccacctgctgccttgtcactctagcccaaccagacagagctaaataatttacagataccatggcagccttagacccagaaacacagaaaaccatgacctgtgctgaaagccactctcttaaataccctcttagtcccatctctggcccaatccttgtctgtggttcacagccagcatcaatcctattgcacatcttctaatttcctaatcctctgaacttcgtcctctgtttcaactatcattaccaaatcaaggtcaaactctaataaatttctgacatattcttattttccttctattcggtagggcaccaaaccatcctgttcaagtctagtgagcttacccacaagagccagatctgagcctcaactgccctatagccaaatgccttctgtaagaccacccctatccctccacccccaccccataatgatagagcaggtgcagaacatggccagctctcaccaggccagctctcaccatgccagagtcagtcatgctcaggggcctgaatggcatggaatggtaagctttgtggatgatagaagaattacttctcctacaggaccaacatcatttctgacctagaagagcaaatctcagagctgacagcaataattgaacaaatgaacagagaccaccagtctgcccagaaattggtgagtgaccttacattagctaacatcttcatggacaaaataaaattaatatttttgaatcacctatgtgccaggcaaaatgccaagcactttactcatatgagccatgttgtccaggtgacaggaccctaaagattggactgtgtcactcagtagtatttctctgacatctttatctgtaattccaagaactcaagttcttccacaaagcttaactcatttatttccaggagctctccaagtacctctgtgtgtgtgcagtgacactgtcctcctcacactagggtgcacttgttgttttctgtctggcctttgtggtgcaattaagtttcagagcttgtgaggctctcactaacgacaccagcgcacttaatgtgcagggcttactctctgactgttaaagctgcccacacatcagaatctgcagatgtcatttgacactctttgtgattcctgaggatttcagtgacacctttttagcttttaccatctgtttcatctggtgacttcttcctcacctcaaacaggtgtgcctgttggcctggcctggagtgacagccagtgctgtgttcagaaatatcctccccagggttgttgaaccccaccccatctgtgaagttttacttcccagaaggcagcctctcaccctctgatatgccccagatgtgtctgaatcctacagtgacccagcttatgactcaggctgggtcctatcctgagaccaccctcctccgcctgccaactattgattcattaccttatttatctgaaaacactgccaggtttatggtctccttctatagaaaggaaaatgagactcagggaagttaaacaatttgcatacaatctctcaactgaacagtggtagatcattggacaaaatgaacattttaagtcataggcacagatcctgctgaagacatatttagagactatttccatgaagggatcctagactgtgttactgaaaatactgccacttgtgaagatgctatttgttgtgtggccctgtggaagggagtagtgttggctgacgctgggctgttctctgtctgtcagagtggctctgctgaccacttgttgtgtgacacagtccctggcttctccccagtagtcagagaggtacaaggacaagccctaaacccttgtcctagctgacagtggtcaccgactgatttgaagtattgatttatcctgagacactggccagaggatctgacatgttagaatgaagtatcacctgaaagtgagcaaatcctgcctgctagaatggaactatactgtcaacaaggattaacactagattttaagttcctcgaaggcaagatctgagtcttagtcctccttggctcttccaagccaagccttttgttcaataaatgattgctcaattggattacatatccaaaaatctgaaggccatgatgtaacagaaatgacgatctagcacaggagaccagacctacccaaaaaaaatagtcagtgaaagagatgcaccaacattatgaactgaataagtacaaaacaacatagagcaaggcacaaattgttctgttcccttattaataatgtgctctctggcactgcagagcacagtggaagaggggtgggaagggggctgtgccccatgaattggaaggcggctgtgccccataaattggaaggcttttcagaaggtgcagatcagaatgggacagggtcctcagtcctgtgttgtagatgctgattttgtttccagctctccagtgaaatggatctccgctgtgctgagatgaaacagaactttgaaaacaagaacaggtacactttctggcatggacccttgtgtgtgttgatggctctaagggtcccgcatcctttgcaggattttagttcactgggacttcaaatagttctaaatggagttgggggatgaagggtgggggagatgaacaagacacgtgtctttgaagagcagaatggcttgattcaaagccactaaaataaaccacaaagaaagttattactgcttttacattttatcatccaatcctttcatttcaattataatctccctttttgttggttactgagaagagtcatttttgttctctatgagatttctgtgataaataactgttgttctcagccaaggctcctcctccaccatctcctcgttcttctcttcctcctcctctttttctttgtctcacctctactctccctggctgctaggtcagggcctcagcaaaataggaagaaagtataagagaatcaggagcaaagtcaaatcaagagaaaattgaaaggagtccaaatacagaaagacagagaatagaacatggttaccatggtccggtaggaggaagaaaatggggagatattgatcaaatcatacaatgttgcaaatatgtagggtgaacaagtttatattgtttacaaagatataatgtaaaaaatgagagctatagttaataataatgtatgatattaagaactgttgctaaatgagtttatagctgttctcaccacagagggaaaatggttaactaagtgaaatgatggatatgttaatttgttccactctagtaaactttttactatatgtatatagtaatctccactattataaccatttgtgtatatatatatatacatacatataaactctacctatatatatatgcttgtgtagtgtgagtgtatatatatagtaaaaattatgtgtaatatatatagtataatggttactatagtagagatgcatatatatatgatttatatatatatatatatgaatcttatgacatcatgttgtatacctcaaatatacacaataaaatttatttttaaaggagttttcttatgtgtatgggtgaagataatcctacatcccctttcaggctacttgctgcacaccagagcagccttagaaatcctggtggagagatagcactcttagttgagtcatagccatttacacatttatttatctatagactttatctgttagagcagttttaggtttacagcaaaaatgaggagaaagtacagagagttcctgtgcacctgctcctaatcaaattcaatcaaattaaactcaaagatgagtacaccaagacacataataatcaaactatcaaaaatcaaagacaaagcaaaaattctgagagcatcagaaggtaagaaacacgtcacatacaaaggagtgccaatacaattgtaatttcttaacagaaaccctgcaggccaggagtcagtgtgatgatgtattaaaagtgctgaaggaaaaaactgcctaccaagaataccttagcaaagctgtcttccccagttgagggagaaatagaaactttcccaaacaaaaattaagggagttcattaccactatgcctgccttacagaaattgcaaaaggaagttttaaaaacggaaacagaaagctgctaataacatgaaacatatgaatgcacaacactcaatggtataagcaaaatagagccatactcagaatactttaggactgtgatgatgggatgtaagacaattttatcccaatatgagagtaaaaacacaaaactattaataacaactatagctaaaataaattttcaatgataaatcatattataaaatgatatcaattctgacatcaaaaacaaaatgttagggagggagtaaaactgttgagttattgcttgcaactaaacttgttgtcagcttgaaatagcttattacaagaacaagatattctaactaagtgtcatggtaaccacaaagataaaaatctttagcagtagcacaacacaaaaatagaaatgattcaaagcatacactacaaaaaacatcaaaccacaaaagaagagaccaagagaggaagaaagaatctacaaaacaacaaaacaaaaattaacaaaatggcagtagtaagttcttacctattaataattaccttgaatgtaaatggattaaattctctgattaaaaaaaatagaatgcgtgaatggattttttaaaaacaagaaccaactatacgctgcctacaagagactcatgtcacctgtaaggcacatgagcactcctcccagggtctgagattaagcccactcaacctgccgctaccaccattgctggcacctatctgcatgcaccacctatgggcctgaggacaagaccacccaacttctcatagccattgccaataccagtgagtaccacttgggtgctagagggttgtcccactattgctactgccatcagccacaacacacccactgccaatgggtccgtgaacctacctacctgcccagcccatagctgccattcctgacacctgaaaaaaacactaaaaggcccaagaattggcctgcctgaacccactaatacttaatgccagcatatgccaccctggggcccaaagataggcacacttataagattagaataaaactagaaatcaataacaagaaaaactttggaaactatacaaacgcatggaaattaaacagcattctcctgaatgaccaatagaacaatgaagaaattaagatggaaataaaaaaaatttcttgaaacaaaaaaaaattgaaatacaatataccaaagcctgtgggatacagcaaaagcagtgctaagagggaagtttatagcaataaacacctacatcaaaaaagtagaaagatttcaaataaacaatctaataatgcacctgaaggaattggaaaaccaagcccaaaattagtagaagaaaagaagtaataaaaatcagaccagaactaaacgaaatagaaactaaaaaaacaatacaaagggtcagcaaaaaaacagattcttcaaaaaaataaaccaaattgataaaccagtagctagactaaccaaaaaaagacaagagaagacccaaataaaatcagaaatgaaaaaagagacattacaactgttgccacagaaatacaagaaatcatcagagactattatgaacaactataactaacactaacaaactaaaaaatctagcaaaaatagataaattcctgaaaagataaaatctaacaagatgaatcaggaagaaattgaaaattattcaagaccaataatgagtagcaaggttgaatcagtaataaaaagtctcccaacaaagaaaagcccaggaccaaatggattcactatcaaattctaccaaacatataaaggagaactaatagtaatcctccttaaactattcaaaaaaatttgaagaggaggaaattctcccttacttattctgtgaggccagcattaccttaataccaaagtcagatgacaatacaacaacaggaaaaagaaaaccacggatcaatatctctgatgaacacagatgcaaaaatcttcaatgaaatactagcaaaccaaatccaacaatacatcaaaaatataatacaccatgaccgagtgggacttatatcagaaatgcaaggatggttcagcttatgaaaatcaataaacatgatatataacatcaacagaatgaaggacaaaaatcatgtgatcatcccaatagatgcagaaaaagcatttcataatagtcaacattgcttcatgattaaaaaataaaacctttcaacaagctagatatagaagaaacatacctcaacataacaaaggctgtatatgacagatctgcagctatcatcatactgaacagggaaaagttgaaaacttttcctctaagaattggaacaagataaggatggctacttttaccgctcctattcaatatagtactggaagtcctagccagagcaatcccgcaaaagaaaaaaataaaaggcatccaaattggaaaagaggaagccaaatgatctctctttgccgaaaaacataatcttatatatgaaaatcacaaaaaaactccatccaaaaactcttagaactaataaattcagtaaagttgcagaatataaaatcaacatacaaatatcagttgcatttctgtacaccaacagtgaaatagccaaaagagaaatcaataaggcaataacatttacactggctacaaagcataaaataaaatatctaggaataaatttaaccaaaaaggtgaaagacctttagaaggaaaactgcaaaacacagatgtaataaattgaagaggacacaaacaaatggaaagacatttcacccatgcttatggactggaagaattaagatcgccaaaatggccatgctgcccaatgcaatccctaaattaccaatgtcacttttcacagaaatagaaaaaataattctaaagttcatatggaacaaaagatgagccagaatagccaaagcaatcctgtggggaaaaaaaatctggagttatcacattacctgacttcaaaatatattacaagaccaggcatggtgactcacacctgtaatcccagcactttgggaggccaaggcgagaggatggcttgtgtccaggagtttcagactagcctgcacaacatagcgagacaccgtctacacaaaagattaaaaattagccaggtattatggagtgtgcctggagtcctagctacttgggaggctgaggtgggaggatcacttgagcccagatggtcaaggctgcagtgagctatgatcatgctactgcactccaactgcactccttgatatagatcaaggctatcataaccaaaatggcaaggtattagtataaaaatagacatataaacataaagcatggaacagaatagagaatccagaaataaattcatgtaattacagccaactgatctttgacaatgctgtcaagaacatacactgggaacagggcaccctcttcaataaatgatgctgggaaaactgaataaccatatgcagaagggtgaaactagacccctatctctcatcatgtacaaaaatgaactcaagatggattaaagtcttaaatgtaagatccaaagctataaaaatactagaagaaaacctagggaaaagtcttcaggacatcggtctaggcaaagattttatgaccaagactttgaaagcacaggcaacaaaaacaaaaaaagacaaatgagactatattaaactaaaaagcttctacacgcaaaagaaaccatcaacagagtgaagagacattctcttaaatgggagaaaatatttgcaaactactcatttgacagaggactcaaacaattcaacagtaaaacaaacacaaattcattaaaaatgggtaaaggacatctttcttaaaagacatttcttaaaagaagacatttcttaaaagaagacatacgaatagccaacaagtatgtgttcaacatcactaatcatcagggaaatatagagcaaaaacacaataagatatcatcttacaccagttagaatggctattataaaaagacaaaaaataacatatattgacaaagatgtggagaaaagggaactcttatatactgttggtggaaatgtaaattagtacagccattatggaaaacactacagagatttctcaaaaaattaaaaatatgaaccagcaattcaactactggatatttcttcaaaggatgtggagaataggaaatgctatacactattggtggggatgttaattagttcagccactgtggaaagcagtttggagatttctcaaagaacttgagacagaactaccatttgacccagcaatcccattattgggtgtattgtactcaaaggaatgtaaatcattctaccaaaaagacacatgcatacgtttgttcatcacatcactattcacaataacaaagatatggatcaacttagatgcccatcagtggtggactggataaagaaaatgtggtatatatacaccatacaatactacacagccataaaaaagaacaaaatcatgtcctttgcagcaacatggatgcagctgaaggccattatcctaagtgaattaacacaggaacagaaaaccaaatactgcatattttcacttataagtgggagctaaacattgtgtacacatagatacaaagaagagagcaatagacggtggggcctacttgaaggtggaggttgggaggagagtgagggttcaagaacaacctatcaggtactatgctcactacctgagcaatgaaatcatttgtacaccaaaccccagtgatgtacaatttacctatgcaacaaatatatacatgtacatgtacccctaaacctaaaataaaaacggaaaaagaaaaaaattagtagtatttctatatactatctaaaaaagaaattaagaagacaattctatttatgacagcttaaaaaataagatagctaggaataaatttaaccaaggaagtggaagatttctacactgaaaattatggagcatcgataaaagaaattgaagaagcagcaaataaatggaaagatattccatgttcatggattggaagaattaatattgtttaaatgatcatgctacccaaagcattacacagatttaatgcaatccctatcaaaataccaaaaatgttcttcacaaaaatagaacaaataatcttaaaattcatatggacccacaaagtccccaaatagccaaaatgatcctgagcaaaaataacaaagctaaaggcacctgattttaaatgatactacaaagctatagtaacccaaacagcatgatactggcataaaaaaacagacacatagaccaatggaacagaatagaggcctataaataaatttatacacccatagccaactgatttttgacaaaggtgccaagaacacacactgggaaaaaagatagccttttcaataaatggcttttagtcaaattaaaagaagtagataaaacagagatctcaaagaagctaatattacacctcacaaaactaggaaagaagaacgaaataagcccaaagtatgctgaagaaagaaaataataaagatcaaagcagaaataaatgaaatagagtctagaaaaacaatataaaaatcaatgaagctaagagttgttttttgaaaagataaaagcaacaaacctttagctaaactaagaataaaatagagaagactcaaataaataagatcagaaatgaaagaggagacattacaactgatatgacaaatacaaaggatcataagagactactgtgaacatttatatggcaatgaattggataatctagaagaaactgataaatttctagacacataaaacctgccaagacttaatcataaaaacaatagaaaatctgaacagaccaataaagatgatattgaataagtaataaaaagcctaccatccaaaaaaaacccagacctggtgcctttactgcttaattctacctgacatttaaaataagaactaacatcaattcttctcagattcttctaaaaaagtgaagaggtggaaggactttcacatgattttttttttagcttttttttttttttttaggcagagtttcactcttgttgcccaggctggagtgcaatggtgcgatctcggctcaccacaaccaccacctcctgagttcaagcgattctcctgcctcagcctcctgagtagctgggattacaggcatgcaccaccacgcctggctaattttgtatttttagtagagatggggtttctccatgttgctcaggctggtcttgagctcccaacctcaagtgatctgcctgcctcggcctcccaaagtgctgagattacaggcatgagccaacgcacccagcctgttcacactatttttatgaggccaggattactctgataccaagtcagacaagaacattataagaaaataaaattacaggccaaaatccttaaatgaacttagatacaaaaatccttaattaaatattagcaaacagaattcagcaacatattgaaaggatcatccaccatgatccagtgagactgatcccctgggatgcaagaacggttggacacacacaaatcaataaatgtgatacctcacattaatagaatgaaggacaaaaccgtatgaacagacacttctcaaaagaagacatttatgcagccaaaagacacatgaaaaaatgctcatcttcactggccatcagagaaatgcaaatcaaaaccacaatgagataccatctcacaccagttagaatggcgatcattaaaaagtcaggaaacaacaggtgctggagaggctgtggagaaataggaagagttttacactgttggtaggactgtaaattagttcaaccattgtggaagtcagtgagtcagtgtggtgattcctcagggatctagaactagaaataccatttgatccagccatcccattactgggtatatacccaaaggattataaatcatgctgctataaagacacatgcacacgtatgtttattgtggcactattcacaatagcaaagacttggaaccaacccaaatgtccaactatgatagactggattaagaaaatgtggcacatatacaccatggaatactatgcagccataaaaaatgatgagtttgtgtcctttgtagggacatgggtgaagctggaaaccatcattctcagcaaactatcgcaaggacaaaaaaccaaacactgcatgttctcactcataggtgggaattgaacaatgagaacacatggacacaggaaggggaacatcacactctggggactgttatggggtggggggaggggggaggtatagcatttggagatatacctaatgctaaatgacgagttactgggtgcagcacaccaacatggcacatgtatacatatgtaactaacctgcacattatgtacatgtaccctaaaaaagtataataaaaagtaaataaataaataaatccaattaaaaaatgggtaagggacctgaatagacatttctcaaaagaagacatacaaatggccaacagacatatgaaaaaatgctcaatattgctaatcattagggaaatgcaaattaaaaccatagtgagttattatctcacatggatcagaatagctattatcaagaaggcgaaagataacaagtgttgaagatgtggagaaaagggaacacttacaaagtgttagtgggattgtaaattagtatggccattatggaaaactgtatagaggttgctcaaaaaactaaaaatagtaataccatatgatccagcaatcccacttccgagtgcttacccaaaatatttgaaatcagtttgttgagatgtctgtattcccatgttcaattcagtactattaacaacatccaagttatggaatcaacttaagtgtccatcagttgatcaatggataaagaaaatgtggtatatacataaaatggaatactattcagcctttaaaaagaaggaaattctggcatttgtgacaacatggatggaactggagagcattatgctaaataaaataaaccgggcacaggaagacaaataccacatattctcacttatatgtgggatctgaaacaatcaaactcatagaaacagcgagtaaaatggtggttaaagagactagggggtggggggaatagggagatgatggtcaaagggtacaaaatctcaattaggcaggagaaatatgggattttcttagatctattgcacagagtagtaaatatagttaataatagagtattggacatttcaaaattgctaagaataaatttcaaatgttctcactgaaaaaacttttaggctgggcgcagtggctcacgcctgtaatctcagcactttgggaggctgaggtgggtggatcacctgaggtcacgagttcaagaccagcctggccaacatggtgaaaacccatctctgcaaaaatacaaaaattggttggacataatggcaggtgcttgtaatcccagctactcaggaagctgaggtgagagaatcgcttgagcccaggaggcgaaggttgcagtgagccgagattgcgccattgcactccagcctgggggacagagccagagactacgtctgaaaaaaaaaaagaaaaaactttaaagtatttcaggtgatgactatgttaactagtttggtttcattattccacattgtattcataaatcataacatcactttttaccccataaatatatataattataagttatcaatttataattaaaaaaagaaatcctggtggagagacagcactcttagctgaggcataaacttttatgtacttattcatttatttataaactttattttttagagtagttttagagttttaggtttacagcaacattgaggggaaagtataaaagatttcccatatacttactgccccctcacacacatagcttcccccattatcaatatccccaaaagtggtaacatttgttataatcaatgaacctatattgacacatcattatcacccagagttcatagttgacattagagttcactcttggtactgtacattcaatgagtttggacaaatgtgtaatgacatgtatccactattctagtgtcataacaatagtttcactgccctaaaaatctgcttcgctctgcctattcatcctacctcccatccctaaccttgggcaaacactgatctctttactgtctccatagtttgacctttttcagaatgtcatatagttggaatcataccctatgtagcctttttaaattggcttccttcacttagtaatatgctttaaaggttcctccatgtcttttcatgcttgatagctcatatggactcattttaatactcatcataaacactgccaacattgcttcctggaatggaggctggagagaacttgggttctaaaattatcctgggtggcaatgcagcccatagtttcccgagcaagctatagacaagactgtgctgactattagaggggaatctgtggtcatgctggctccattcaaaacaatgattgtagaaaagggtcccctcaccctttctggatagatgccaggataatgcttcaggaagtgaaggccccaggctgagtatggtagctcacgcctgtaatcccagcacttcgggaggtcaacgcaggaggattgcttgagtccaggagtattttgaaaccagcctggacaccatagcaagaccccgtctctacaaaaaattaaaaaattagatgagcatggtggcacatgcctgtgttcccaactacttgggaggttaaggtgggaagatcacttgagcctgggaggttgaggctgcagtgagctgtgaccatgccaccacactcactctgggcaacagagggagactctgactcaaaaaaaaaaaaaaaagatttaaaaattttaaaaataaaaaagtgagaacctcacttcctgtgggagggtggagggtaggatcagatcagggtaacagctcagctctggacttctttttactaatgattgtggccttctcctggggtcccacagggagctcaaagaggcccatgaagcagaactcagtgagttggagaacaactacaaagcagccttgaaggcagagaagttggctgcccaagagaagctaggtactgctgggacctgggagaatgaccctggatgaaggtccaggcaatggcatttctaataagcttctagggtgatttccaaggcacacaaaggttttactaccttggtgatgagtttggggtggggaaggtgtgcagaagaactcacatttgaatttgaaaatgtgcatatcagaagactaatgatgatcctgttgttttccttttatccagaggagatgggaaaagaatacaagtatttgaagaatatgtttcgtacgtatcaggtgagatacacagctccctgttggattacaagagaaggaaggctcattcctggctaacattgggataaatctagagcttttgtccagaaaataatgtcctgagattcccagcatccttagacctaagtggcactagctgcacccagggggaggatgaacccaatggcttccatgcatgacaagtcaggcacccaaatcctgaagagcactactgaaaaatatgtttgtgattacaaaagtaatagcttctcattttttgtaatggagcaaaaagaaatatcaccacccaaagacaacccctgttaatatttgtactttgttagaactgcagttgagatcatactgtatattgtataacatctatatattttttatatgttctttatcaagcatataagaaacttttccctcctttataatgacttgatattatcctaatgaaattgccattgggttctaaaattttactgttcccctattattgggcatttgagttgtttccaattgcttgctgtaacagataataccactttgaatatctttgattctagaagtagagtgcttggtcaaaaggaatgaactttaaaaaaagtcaactttcattttagattcaggggatacatgtacaagttattgtgtgatgctgaggtttgggatatgaatgatctcattacccagctggtgagcatagtacccaatagttattccacccttccccctcttcctctctcccaatagcccccagtgtctacaagaacacgtggcacttggttttctgttcctgtgttaattggctttaggataatagcctctagagccatccatgtttctatgaaggacatgattttgttcttttttatggctgcatagtattccatggtatatgtaccacattttgtttatccagtccactgtcagtgggtacttaggttgattccatgtctttgctattgtgaattgtctgtgattaacatacaagagaaggtgtctttttggtagaaaaatttattttcttttggatatatacccagtaatgggattgctgagtcaaatggtagttctgttttaagttctttgagaatttccaagctgctttccaccggcaatgaactaatttacattcctaccaacggtgtataagcattccctttttcctccaacctcaccagcatctgttgttttttggctttttaataataaccattctaatgtgtgtgggctggtatctcattatggtttttgatttgcatttctctgatgattagtgacatgaagcattttttatgttttctgaccactgtatgtcttcttgttttttacacactattacattctatttatgacaagaaatatttacatgattggaaaaagtaaaaattggaggacaaaaagcagattagtatttaccatgggctggactgggactggggaaggggcttactacaaagggacaggagagaattactggagatgtagtggtggttccgtaactatccgtttgtcaaacacattaaaagtatactgaacaagggcacattttactcaattaaactgacattaaaaaaagaagtgaaaaagaagaaattccatttagaatgttgaaaaactgtagatttagttctagaattctggggctctataacttatttcaaaatataggttttcagcccatttttaacttatcaaatctttattcagaaatccaaagtttatatttaaaaatagctcatttaaatttgaccataggccggtgctgtggctgatgcctgtaatcccagcactttgggaggccgaggcaggcagatcacctgaggtcaggattttgagaccagcctggccaacatggcaaaaccctgtctctactgaaaatacgaaaattagtcggacatggtggcacacacctgtaatcccagctactcaggaaactgaggcgggagaatcgcttgaacctgggaggcagaggttgcagtgagccgagatcgtgccactgcactctagcctgggcaacagagcaagactctgtctcaaaaaatatatataaataaataaaataaaaaagaaataaatttgaccctaaagctaacacatgtaaaaattatataaaagaaaagaaaattgttccaacttttttactttggggtttttaaaaaagttttatttcaatagctttggggatacaaatggtttttttgttacctggatgaattatatagtggtgaattctgagactttagtgcacccatcatctaagtagtgtatattgtacctaatgtgtagttttgttttttttttatcacaagccactctcccacctcccccttctgagtctctaaagttcattaatgaatatgcctttgcatattcatgacttagctcccacttttaagtgacatcatacagtttttggttttccactcctgtgttactttgtttagaataatggcctccagctccatccaagttgctgcaaaagacatttcattccttttaatgactgagtagcagtctatggtgtatatatgccacattttatttatccactcattagtcaacgggcacttaggttggttccacatctttgcaactgtgaattgtgctgctataaacatacgtgtacaagtgtctttttctgtaatgactcattttcctttcggtagagatcaagtagtgggattgctagattgaatggtaaatctacttttagctctttaagaaatctccatactcttttccaaaaggttgtactaatttacattcccaccagcagtatataagcactcccttttccccacatccacaccaaaatatattgtttttttactttttaataatgaccattcttgcaggagtaaggtggtatctcattgtggttttaatttgcatttccctgatgattagtgatattgagcactttttcatgtttgttggccatttgtatatcttcttttgagaaatatctattcatgtcatttgcccactttttaatgggattatttgtttttttcttgctgatttgtttgaattccttgtagattttgattactagtcctttgtcagatgcatagtttgcaaatattttctcccattctgtgggttgtctgtttattatttcttttgctgtacagaagctttttagtttaattaggttctatttatttatttttggttttgttgcatttgcttttggggtcttagtcatgaattatttgcctaagccaatgactggaagagtttttctaatgtcttctagaatttttatagtttcgggtctcatatttaagtctttgatccatcttgagttgatttttgtataaggtgagaaatatggatccagtttcatttttctacatgtggcttgcccattctcccagcaccacttattaaataaagtatcattccccaatttatgtttttgtttgctttgtcaaagataagttggctatacatatttggcttcatttctgggttttctgttctgtttccttggcctatgtgcctacttttataccagtaccatgctgttttggtaactatagccttgtagtataatctgaagtctagtaatgtgatacctccagatttgttctttttgcttagtattgctttggctattctggctcttttttggttccatatgaattttagaactttttttctaattctgtgaaaaataatgttgatattttgatgggaattgcactggatctgtaatgcaagattactttgggcagtatggtcattttcacaacgttgattcttccaatccatgagcatagaatgcatttccatttgtttgtataacctattacttctttcagctgtgttttatagttctccttgtagagatctttcacctccttggttaagtacattcctaagtattttatttttttgtagctgttgtaaaagggtatcagttctttttttgattctcagcttggtcgttgttagcgtatagcagtgctactgatatgtgtacactgattttgtaaactgagacttcactgaattcgtttatcaaatcttagagtctttggaggagtctttaggattttctaggtatacaattatataatcttcaaacagcaatagtttgacttcttcttttccaatttggacgccctttatttctttctcctgtctaattgctctagctaggacttccagaactatgttgaatgagagtggtgaaagtgaaggtggccatcttgtcttgttccggttctcaaggggaatgctttcaacttttttccattcagtatgatgttggctgtgggtttgtcacatatggcttttattattgaggtaggtcccttctatgcctagtttgttaggagttttaattatgaaggatgctggattttattaaatgctttttctgaatctattgagatgatcatgtgttttttgttttcaattctgtttatgtgatgtatcacatttattgacttgtgtgtgttaaaccatccctgcctccctgggacaaaatccacttgaattatctttttgatgtgctattggggttggttagctagtattttgttgaggatttttgcatctatgttcaacatcagtgaaattggtctgtagttttttttatttgttgtgttctttcctgatttggatatcagggcgatactggctgcatagaatgatttagagaggattccctctttctcaatctttcggaattgtttcagtaggattgtaccaattcttcattgaacatctggtggaattcagctgtgaatccatctagtcctgggctttttttgttgttcttggcaattttgaaattactgattcaatcttgctgcttgttattcacctgttcagggtttctgtttcttcctgatttaatacaggagagttgtacgtttccaggaatttgtctatttcctctaggttttccagtttgtatgcaaaaaggcgttcatagtagcctcaagtgatcttttgtatctctgtggttctgtgggttgtaatgtctccaatttcatttctaattgagcttatttagatcttctcttctttacttgtttaatcttttcttcttttcttggctaatctagtctattttattttttcaaagaaccagctttttgtttcattgatctttttatattttttgtttgaatttcagttagttctgctctgatgttcattatttcttttcttctatctttggacttcgttttttttgtttctccagttccttgcagtgtgacattgtcaatttgtgctctttcagactttttgatgcaggcgtttagcactataaactttcctagcactgcttttgctgtatcccagaggtttttttagtttttagttttttgagacagtctcactctgtcaaccaggctggagtgcggtggcactatcttggctcactgcaagctctgcctcccaagttcaagcaattctcgcacctcagcctcccaagtagctgagactgagactacaggcgcctgttaccacacccagctaatttttgtatttttagtaaagatggggtttcaccatgttggccagcctggtctcaaactcctggcctcaagtgatccacctgtttggcctcccaaagtgctagaattacaggcatgagccaccgaaccccacctatcccagaggttttgataacttgtgtcattatgattcaattcaaaaattttttaaatttccatcttgatttcactgtttaccccagatatcattcaggaatggattattttatttccgtgtatctgtatagttttgaggattccctttgaaattgatttttagttttattctgctatggcctgagaagatacttcataggatttcaatttttaaaaattaattgagacttgttttgtgacctatcatatggcctatcttagagactgttctatgtaccaatgagaagaacatacattctacagttcttgggtagaatgttctgtaaatagctgttatgttcatttgttttagcatgtcatttaagtccattttttctctgttggccttctgtctcaaagacttgtctagtgctgtcagtggtatattaaagtatcccaccattactgtgttgctgtctatctcatttcttaggtctagtagtaattgttttatgaatctgcaagctccagtgttagatgcatgtaaatttaggattgtaatatcttcttgttggattgatccttttatcattatattgaccatctttgtcttgttttactgttgttgctttgaagtttgtttcgtctgatataagaatagctactcctgcttgcttttggtgtccatttgcatggaatatctttttccacccttttcccttgagtttatttgaatcctttcatgttaggtgagtctcttgaagacagcagatatttggattgtgatttttgttatccattctgtcattctgtattttttaagtggagcgtttaggccatttacattcaacattaatattgagatgtgaagtactcttctcttcatcatgttaattgttatgtatatagcttttcttttttcattctgttattgctttatagacttcatgagttttaagctttcaagagattctattttggtgcgtatttggcttttgtttcaatgtttaaaactccttttagcccacctttctttcttttctttccttccttccttccttactttttttttttttttttttttttttgatagagtctggctctgttgcccaggctggagtgcaatgttgcaatcttggctcactgcaaactctgtctcctgggttcaagagattctcatgcctcagcctcccaagtagctgagattacaagcatgcacaatcacacctggctaatttttgtattttttagtaaagacagggttttgccatgtggccaggctggtagcatttcttgtagtttggtttgctagtgacaaattccctcagcatttgtttatctgaaaatgacttttatttctccttcaattacaaaacctagctttacaggatacagaattcttggctgacagtttttttctgtttaaggagattgaagataagaccccaataccttctggcttgtaaggtttctgctgagaagtctgctgttattcagataggttttcctttatagcttacctgatgcttttgtcttactgctcttagaattatttccttcatgttgagtttagatagcctgatgactatatgccttggtgaagatctttttgcaattaatttcccaggagttctttgagcttcttggatttggatatctagatctctagccacgccagaaaggttttcctcaattattccctgaaataagttttccagacttgttattttctcttcttcctctggaacaccagttattcttaggtttggctgtttaacataatcccatatttcttgaagactttgttcatttctttttattcttttttctttatttttgtctgattgggttagtttaaaaaccttgtcttcaagctctgaaattctttcttctacttgttctagtctattgttaaagctttctgctgcattttgtattccctaagtgtgtctttcatttctagaaattcttattgttttttcttgataatatctatatctctagaaaatttttcattcatatcctgaaatgctttttaaatttataatagttttcatctttctctgaaatctccttgagtagcttaataattgaccttctgaattccttatctggtattttaaagagttcgtcctactttggatccattgctggagagctagtgttatcttttgagggtgttatagaaccctgttttttcatattaccagagttccttttctggttcctcctcatttgggtagattatttcttctaattatccttgaattgatgtttgatttgactgtgtttctttttgtgtttgttttttaatttcttttttccacttaaggatgtgactttaatgcttatcatattatggcctaatttggtttttggtgctttcaggggtgaagactctgtaatagttccttggttatagagagtttttttatgtggctttcttagatgctggttgtagtagcaatgtgcttggtatattagcaagatcactgtctcctatggggctgtaatgataagaggtctcttaaagcttatctcattcccctgtggcatgcccttttttatttacgcattttcgtccagttttttttttctttttttttttttaggctgaatctcactctgttgcccaggctggagtgcagtgtcatgatctcactgcaatctccgcctcctgggttcaagtgattcttgtgcctcagcctcccaagtagctgggattacaggtgcctgccaccacacccaactaatttttgtatttttagtagagacagggtttcaccatattggccgggctggtctcgaacccctgacctcaagtgatccacccgcctcagcctcccaaagttttgggattacaggcatgagccactgcacccggccttttctccagtgttttatttactagtttgatggttccagcttcaggccagtaggggaggtgtccctgggtaggaatcagctgtggctaaagcaggtgggtaaatgcaatacccagtgatgggcagaggtctcagccttgacagaggtggctggaggagtgagttgcaatgaggtcttacctggggtaagggttggagccacctcagctcccctgccaggttagcaggaaagttatccctctcaaacacactcctgtttcagtgctccagcttttcatctccagacaggcacctcttttcatctgcaggaattttgatgttccaaatagagaaaaattgtgaacgtctctcatacaagcttgaacctagagggtgcccctcctatggggatgcagtcaccctgatgtcttccagaaagactgtctatagttgcactcacaccaagctccaatgggagaagctccaactgtgcctgcagtggtagacaatgggtgggggggttgtctgtctgttgggttagagctgaagacttttcctgctgagcccagcactgcaactgtgcctctgctgaaagaaacttcccactagcagaaagatctggttcttaagtcctgctgtctggattattttctcccacagggtgttctcttgatgtggtgcactccctgttcccctaggatcagggggatcccactcctaagggaacagggtctctgggtctagctgtccagtgaaggtaccacaccccaggctggtgctagggaatatctgcaagggatccagtgatgtgacctctcttcaagtctcccaacagtgggtagcagcaccagttctaatgggcgtggcagggtaatagactctgtgagagtccttggttattgatagccttagtgtgttggctttctcgaacactggttttagtagtaatgaactggtcatgtggacaaactcaggacctcctggttagccagaatggtgcaggcagtggtgatagctgagattacacagccatcttcttcctaggtgcgttgttattctaccaggagatgctgtaatggactgtgttggttggcctccagccaagaggtgatgcttacaaaagggaaccagctgcaatagtagcaataggacttttgcttgctttatgttgtccagaggggttactctggtttctcaggcaatgagtggggctatatagcccccaagagtttctgtcctttgtgttaaactaccagggcaggtgacggggcaaagcagggtgagggttggttcaggtggacttgcgctctgagtctccctgtgcagggcaagcagcagcccctgtggaagccaggggatgggagtggttctcaggccactgggttgatgttccaaaaggcagtgttgctggctttgccacacagaagggtttgtgcagagtggggagaagcaggtggctgtgagccccacacagatcccatgcacttggcaagacagatgcactcccacagtgttccactggcagcagcaagctaagttccagttagcctgcactcagaacttgcaactatcccgagtcatatacgttccctgcagagacagcaatcacggctttcaggccaagcccctccctgtccactgcaaagccaggcacccagttcctgcactggcagctcctgcactcatggctgcagcccacttttcactctcctccaccctggccctggccaagggagttcatccgcacctaaggttatatcatgaaacccagttggaggcttctttcaacctgcgaccactgcctgaactttttggctgtcctccacagggttccccgtgaggaacagtaagaaatggcttccctctctccatgctgaaatctgggagtgtgtgcaagaatcttcctgccactgctcccacttttatattccacatccctccccaagtcagttcctgtgctgcatagggttagggctttctcccatggtctggactttcagggtccacagtgggggtgtgtattccaggagtaatgtagggtgagtcccccttctcacactctgggaactcacagccctttgcctgattcacagtgtaacctgcagcctcctgcttccttcaaagggtctgtagattcctttggttttcctgttcagtttctgcattgctccttgaaaaaagttcagtgtgaatctctacaactattttgtttttccaagtgggagaagtatgctagcaatgcctctaatctgccattttggaaaaacacaaacaaacttctgtcttcttttgagaagtgtctgttcatgtcttttgcccactttttaatggggttgttttttgcttgttcaattgtttaagttacttatagattctggatattagatatttgtcagatgcatagtttgtgaatattttctctttttttgtaggttgcctgtttactttgttgacgggtttttttgctgtgcagaagctctttagtttaattaggtcccacttgtcaatttttgtttttgttgcagttgcttttgaggacttagtcataaattctttcccaaggccaatgttcagaatggtgtttcctaggttttcttctaggattcttagagtttgagttcttatgtttaaatctttaaggcatcttgggttgatttttgtatatggtgaaaggtaggggcccagttttatttttctgcatatggctagccagctatcccagcatcatttattgaatagggaactccttccccaccacttgtttttgtctactttgttgaagatcagatggatgtaggtgtgcagctttatttctgagtttgctattctgttccattgatctatgtgtctgtttttgtatcagtaccaagctgttttggttactgtagccttatatttttttaaatttttttatttctatgggttattaggaaacaggaggtgtttggttacatgagtaagtactttagtggtgatttgtgagattttggtgtgcccatcacccgagcagtatacactgcactcaatttgtagtcttttatccctcacccccttcccactctttccccgagtccccaaaatccattgtgttattcttatgcctttgcatcctcatagcttagcttccacttatgagtgagaacatacgatgtttggttttccattcctgagttacttcacttagaataagtctccaatctcatccaagttgtgttgatgccattaattcattactttttatgactgagtagtattctatcatatatatatggaatttctgaatcaaatggtagttctacttttagttctttaaagaatctctatgctgttttccatagcagttgtactagtttacattcccaccagcagtgtagaagtgttctctgttcaccacatccatgccaacatgtattttttttttattttttgattatggccattcttgtaggagtaaggtggtatctcattgtggttttgatttgcatttccctgatcattagtgatgttgagcactttttcatatgtttgttggccatttgtatatcttcttttgagaattgtctattcatgtccttagcccactttttgatgggttatttgttttttcttgctaatttgttttagtttgttgtagattctggatattagtcctttgtcagatgtatagattgtgaagattttctcccactctgtgggttgtctgtttgctctgatgactgttctttttgccatgcaaaagctctttagtttaattaagtcccagccatttatctttgtttttattacatttgcttttgtgttcttggtaatgaaatccttgcctaagccaatgtctagaagggtttttctgatgttatcttctagaatttttatattttcaggtcttagatttaagtccttgatccatcttgagtttatttttgtgtaagatgagagatgaggatccagtttcattctcctacatgtggctagccaattatcccagcaccatttgttgaataagatgtgctttccccactttatatttgtgtttgcttagtcaaagatcagttggctgtaagtatttgggtttatttctgagttcactgttctgttccattggtctatgtgcctatatttataccagtaccatggtgttttggtgactatggccatataatatagtttgaaatcaggtaatgtgatgcctccagatttgttaggttttttgctttttgattttttgtttgcttgttttgctttgttttgttttgcttagtcttgctttggctatgtgggttcttttttggttccatatggatttaaggagttttttttctagttctgtgaaaaacgatggtggtattttgatgggaattgcattaaatttgtagattgcttttggcagtatgatctttttcacaatattgattctacccatcagtgagcatgggatgtgtttccatttgtttgtgtcatctatgatttctttagcagtgttttatagttttccttgtacaggtcttacaactccttggttaggtatagtccaaacattttatttttcttttgcagctattgtaaaaggggttgagttcttgatttgattttcaccttagtcgctgtcagtgtatagcagagctactgatttgtgcacattaattttgtatctggaaactttactgaattcttttatcagttctaggagctttttggaggaatctttagggttttgtaggtatacaattatatcatcagcaaacagcaatagtttgacttcctctttactgatttgggtgccctttatttctctctcttgtctgattgctctggctaggacttccagtactatgttgaagaggagtggtgagagtgggcatccttgtcatgttccagtcctcagtgggaatgcttccaacttttccccattcagtatgattttggctgtgggtttgtcatagatggcttttattacattgaggtatggcccttgtatgctagttttgctgagagttttaatcataaagcatgctggattttgtcaaatgctttttccgcatctattgaaatgatcatgtgatttttatttttaattctttttatgttgtgtatcacatttattgacttgagtatgttaagcctatatccctggtatgaaacccacttgattatggtggattatctttttgatatgttgttggattcagttagccagtattttgttaaggatttttgcatctatgttcatcaaggatattggtctgtagttttcttttttggttatgtcttttcctgtttttagtattagggtgatactggcttcatacaatgatttagggaggattccctctttatcttgtggaatagtgttaataggattggtaccaatccttctttgaatgtctggtagagttctgctgtgaatccatctagtcctggacttttttgtgtaggtaattttttaattatcattccaatctcactgcttgttattggtctgttcagggtatctaattcttcctgatttaagctaggagggttgtatctttccaggaatttatctgtctcctctaggttttctagtttatgcacgtaaaggtgttcacagtagccttgaatgatctcttgtatttctgtggtgtcagttgtaatatctcccttttcatttctaattaagcttatttggattttctctcttcttggttaatcttgctaatgatctatcaattttatttatcttttcaaagaaccagctttttgtttcatttatcttttgtattttttgtttgtttgtttgtttgatttcattcagttctgctctgatcttggttatttcctttcttctgctgggtttgtgtttggtttgttcttgtttctctagttccttgaggtgtgaccttatattgtctgtttttgctctttcagacttttttatataagtgtttagggcttttagctttcctctttgcactgcctttgctgtatcccagaggttttgataggttttatgtcactgttgtcattcagtttgaagaatttttttaaatttccatcttgatttcattgttgactcaataatcattcaggaacaggttatttaatttccatgtatttgcatggttttgaacattccttttggagttgatttccagttttattccactgtggtctgagagaatgcttgatataatttcaattttaaatttattgaggcttgttttgtggcctatcatatggtctatctgggagaaagttccatgtgctgttgaataaatgtatattctggggttgttggatagaatgttctgtaaatatctcttaagtccatttgttccagggtatattttaaatctattgtttctttgttaactttctgtcttcttgacctgtctagtgctgtcagtggagtaatgaagtccgccactatcattgtgttgctgtctatctcattttttaggtctaggagtaattgttttataaatttgggagctccagtgttaggtgcatatatatttaggattgtgatattttcctgttggagaaggccttttaccattatataatgtccctctttgtcttttttaactgctgttgctttaaagtttgtcttgtctgatgtaagaatagctactcctgctagcttttggtgtccatttgcatggaatgtctttttccacccctttccttaagtttatgagttcttatgtggtaggtgagtcaactgaaggcagcagatagttgattggtgaattcttacccattcagcaattctgtatcttttaagtagagcatttaggccatttatattcaatgttagtattgagatgtgaggtaccattccattcattgtgctatttgtttcctgtatgccttgggtttttttgtttttgtttttgtttttgcttttttttgtattataggtcctgtgagatttatgctttaaagaggttctgttttgatgtgtttccaggatttgtttcaagatttagagctccttttagcagtttttgtagtgctgccttggtagtggcaagttcttttagcatttgtttgcctgaaaaagactgtatctttccttcatttatgaagcttggttttgcttggtacaaaattcttggctgataattgttttgtttaaggaggctgaagatagggccctaatcctttcttgcttgtaaggtttctgctgagaaatctgctgttagtctgataggttttcctttacaggttacctggtgcttttgcctcacagctcttaagattctttccttcatcttaactttagataacctgatgacaatgtgcctaggctatgatctttttgtgataaatttctcaagtgttctttgagcttcttgtatttggatatctaggtctctagcaagggtggggaagtttccctcaattattgcacaaatgtgtttccaaacttttagatttctcttcttcctcaggaacaccaattatttttacatttggttgtttaacatcccagactccttggaggctttgttcatattttcttattcttttttctttgtctttgttggattgggttaattcaaaaaccttgtcttcaggctctgagttctttcttgtgcttgctcaattctattgctgagacgtaccagagcattttgcatttctataagtgtgtccattgtttcctgaagttttgttttttatttatgttatttcattgaagatttctcccctcatttcttgtatcattttttttttaatttccttaaattgggctttgcctttctctgttgcttccttgatgagttctttgtcaggtagatcaggggtttcttcttggtttagatccacatctggtaagctagtgtgattttgtgggggatgttaaagaaccttgttttttcatattaccagagttggttttcttgttccttctcatttgggtaggttctgtcagagggaagatctagggctcaaggctgttgttcagattcttttgtcctatggcgtattctcttgatgtagtactctcccccttttcctagggatgtgccttcctgagagcccaagctgtagtgattgttatctctttttagaatctagacatccagcagtcctaccaggttccaggctggtattgggggttgtctgcacagagtcctgtgatgtgaaccatctgtgggtctctcagctgtggataccagtacctgctctggtagaggtagcaggggagtgagatggactctgtgagggtccttagttttggtcatttaatgcactatttttgtgctggttggcctcctgccaggagatgatgctttcaagacagcatcagctgtggtagtatggggaggatcaggcggtgggtgggtccctagaactcccaagagtatatgccctttgtcttcagctaccagggtgagtaggaaaggaccatcaggttggggcagggctaggcgtgtctgagctcagactcttcttgggcgagtcttgctgcagctgctgtggggatggaggtgtggttcccaggtaaatggaattatgttcccaggaggattatggctacttctgctgtgtcgtgcaggttgtcagggaagtaggggtaaactggcagtcacagacctcacccagctcccacgaaacccagaagatcaatctcactcccaccatgcccccaactcagtagtaccaagtctgtttccaggcagtgggcaaacaggactgagaacttgccccaggctaccagcctcccagctgcaaaagcaagtagtgcttttgtgcttccctgcctgtggagtctgcacaccagattcatgccttcccccaagttctggccaggagatttcctattcagttggaattgttagaaaattcagctggagttttccttctccctgtgatgttttctgagttcctctggcagtcctccccaggtagccctgtgagacaagtcagaaatggcatccctgggaacccagagagcccacagggcttttcctgctacttcctttacccctatatttcacttggttctctaaattgactcagctccaggtaaggtcagaatcttctcccatgatctagaccttcaggttccccagtgaggttgtgtgtttgaaggtggacaatccccctttcctacttccacagtttgggcactcacagtatttggggcatctcccgggtcctacgggagcaatccacttccttcagagggtctgtggattctcttggctttcctgaattattcctgcagtagttctggagcaaaagttcacgatgcaagactccacatgctgctctgtccatccgagtgggagctgcagtctagtcctgcttcccgtccaccatctctgtagccttatattagtagtatattttgaagtcaggtaatgagatgcctccagctttgttctttttgcttaggattgctttggctatttagactcttttttggttccatatgaattttacaataatttttttctaattctgtgaaaaatgatgttggtagtttgacaggaatagcatttaatctcttaattgctttaagtagtgtggccatcttaatgatattgactcttctaatccatgagcatggaatgtttttccatttgtttgtgttgtctctgatttctttcagcagcaatttatagttctccttttacctccttggttagctatatttttagggattttattctttttgtgtctatagtgaatgggattacgttattgatttggctctcaccttggacattattggtgtatagaaatgctacttattttttgtacattgattttgtatcctgaaactttactgaacttgtttatcagttccaggagccttttggcagattctttaaagttttctaggtatgcaattatgttatcagtgaacagaaaaatttgacttcttcttttcctatttggatgccttttatttctttctcttgcctaatggctctggctagtacttccagtgctatgttgaataagagaggtgagagtgggcatccttgtcttgtgctagttctcaagggtaatgcttccagcttttgcccattcagtaggattttggctgtgggtttgtcatagatggctcttattattttgaagtaagttcctttgataacctaatttgctgagagtttttatcatgaagggatgttggattttatcaaaggctttttccatgtctattgagatgatcatatgggttttctttctaattctgtttatgtggtgaatcacatttatggattcacgtatgttgaaccaaccttgcattgtgagaatgaagcctacttgatcatggtgaattaactttttttttttttttttttgagtcagtgtctcattctgtcacctgggttggagtgcagcagcacaatcacagctcattgaagcctcaacctcctgggctggagtgatcctcacacctcagcctcctaaatagctgggaccactacacccagctaattttttattttttctgtagatgtggggtctcatatcatgttgcttaaactcctgggctcaagcaattctcctgactcaacctcccatagtgctgggataacaggtatgagccaccgtgcctggccatgaattaactttttcatgtgtagctggattcaatttgcaagtattttgttgagcatttttttcagtctatgttcatagggatattggcctgtagtttcttttttgtctttgccaggttttggtataaggataatgccggcttcatagaataagttagggaggagtccctcctcctcatttttttggaatagtttcagtagaattggtaccagttcttctctgtacttttggtagaatttggctgtgaatctttctggtcccaggatttttttttttttttagtgttagattattttattactgaatcaatttcaaaactcaatattgtctatttggggtttcaattgcttcttgattcaatctttggaggttgtgtttccaggaatttatccatttcctctagattttcttgtttgtatgcatacagatgttcataatgatctctgaggttcttttatatttctgtgggattagttgtaatgtcacctttgtcctttctaaatgtgcttatttggatcgtcgtttttttctttgctaatgtagctagcactctatcggtcttgcatttcctttcaaagatccaactttttgtttcattgattctttgtatgggtttttgaattttgattccattcagttctgttctgattttagttatttcttttcttctcctagctttggggttagttcttgttttggaatgaacatttttaaggcctttaatatatatggccaaattgccatccaaaaagaatgtatcactctgcactgccacaagcaaagcatggagtgctcccgtcatctcagaataaaacccatccatttaatcagctcatttgatgaaggcccaggaaaacaaagttagggcatgattcttactaggtagatgaagagagttaagagatggctagtggggcgggaaaggactgaagcctcaagccttcatcctgtttaattgtgaagtatagtgaccaactagttctagttggcctgagactttccaggttttagcactgagagtccagagtcccaggaaacccctaagtgtcaggcagacaaggacacttggtcgctctatcaaaagttaaacaccagtaccacctctaaagttctatttaccacttacaatttcagttttgagcctgtgtctaaaactcatttttttaagatattccttggtatattcagggaaaacatcatagaacagagcctaagacgtgtgagtggtaaatagaataggtcgggtgtgaatccttctgctaacctgaaaaataaggcagtcagcgtccttggaccctactagtgtcatccaggtccagggccttccccctcctaggattccatgttcatgaaatctgagccaagcaacagtattggtattagattaggcttatttaacctcaaccacaaaagaaagttagatttgctgagaaaaagtggacattctctgaaaaacatccccttattttctaagtgttcaaattaactactaggtatttcctttcttcttcttctttttttttttttttttttttttttttttttttttttttgagacagagtctcactctgtcaccaggctggagtgcagtggcgtgatctcggctcactgcaacctctgccttctaggttcaagcgagtctcctgcctcagcctcccaagtagctgggactacaggtgtgtgccaccacgcccagctaatttttgtatttttagtagagatggggtttcaccatgttggccaggatggtcttgacctcttgaccttgtgatctgcctgcctccacctcccaaagtgctgggattacaggtgtgagccactgcgcccggcctcctttcttcttgtgctattgaagagggatttgtgatttagggggagctaacatatgatccttcaacatggagaactctacctttcttcaaaggaagctcagttctagtggggcaaacactgtgcatagtttgcccttgacctttgggttccataagctctctgttgggctgggctggaatttacttctcaccagtcacccatggaggacccactcagtgagggccccaggtaagggaagatgcacagaacatggtgatgggccctggccactgtgcaatgccaagaggagtcctccctgagttgagttttacagcctctccaggtcaccttcattttaggactcttttcttcatggtgcctttgtacctccccaggacagtatttatgatgaaatggaagagaagtggtcaaaacagaaggcgaaatggaagaaggatgagaagttcgagcgagaaaatatcctgctacagcaaagtgagtacagaaactctagcttttttgatgacaagtgcattaaaaaactgccatgaagtttggtcttgacttgaggaaggtggccttgggcttaccaagggtgatgggccacatgctagatacctgaatggaaggtgcccagagttttcatgaaagcaaaatgacaacaagggtagggtcttttttgaagttcaggcatctgatctaagagagtctaagcctgtaccttctgaaactcatttggtccaagtttgcccatgatggctggaacaaatgttagaatccctgtagggagtgcagacttattatctagaaacagatgaacccaaagttccaagagttctttagttagaatgtgaaatgttcacttgcatgtgggcagggggcagataggaacaacacaatccattatactgagagcttctatattcccacgtcttccagaaggaagtcacacttggtaaatatttttaatatttccaacaattaacacagagcttgcaccatacaaagtattctataggtgcacctcccacccccattggacttgttcataaaaggaaaaaagaagagaatttgtagagactactccaggcctagaagactagttgaggtaggagtgggacctctacagacctattccgcattccacgccaaccacatttatttcagatttagttgattttaacaaattactcatttaaatgcagatactccatgggaaaattaattcacattctggtgggcactctggactgccagaaggtaatatgaagaccccggagttaaggctggggaacgggagggggagctgctcctgtctggggctttacctagaattctagtgcaatagaacccaagtcatatcccagattctagctactcatacgactctcatcccatgttgctaaagtctaagtaaagatgtaaccgccagttttggaagaccagaattcagctgctcaccatccagctcagtcagaggcttacgctgtcagaccagagactccctgtccatccccagaattgcaacactgaaatctgtgtttccctccacccctccttcctcttgtttgataatggggctctactggcaggtttcctgcccaggaaaagagctgaagcctacctctaccccagcactaagtacaggatgaattttattgctggcaaagtaatgttagccaagagctttattttaagataaggatatccatgatagcatagtggttacatcagcagagggaatggacaaaataaaaagcaacagattcaaaataaactacacacaaaagaaccagagatgttggtggtaaatcccatatgactaatgtgattgaggacaaccaccgtgctcacctcaccctcaagcaccttcaggtgagtgtcagaggccaaacaccaggctgcaatgaccttgagtctgacacagtctggaattgcttttatctttagatattctgggtttctcattgcacctgcttttcccatctttacacatatatgtgctttcctgtcacttccacagaaaaaaagatgaccaaaaaattcgaaatggagtcaggagaagaagataagaaaataaatgaatcctgcagtgctgtctttgagaacttcattcaagagaaggaggtaactcagcccaaagcaccttggtgattgaatgggtagtccaggtggtacacccaagtccccaggtgtgcctccataattaggtgatctttttgtctttctgggcataatcctcctctcccagctttctggaaatgtatgcaaatagactgacagtcttgctgtcctttagctgggcaatcttcccacaggctagacagtcttatcaaagggttcttagaacaaaaattttaattaactggaaataacagaatgctaaacatgcagaaactgaaattccttattttgccaaaatcccatctctgaatatccttttcattcctcactgtagctgttatagctgtagtgctattactgggcgctagggcaggtacaggtttaactttatgggaacttgccaaaacttattttccaaagtagttgtaccatttttttcttgcatcttagatatattggaattctagttgctgtatatcctccacaacaattagttttgctagtcctttaattttggccattccagtgggcatgaagtggtacttcattatggttttagtttccctgatgactaattatgttgggcattttctcatatgcttattggtccattcatatatgttcttccataaagtgcctgttcaagtcttttcccatttgaaaaagtaggaggtgcttacatttttatttttgatatgtaggagtacttttatattgtggatacaagttttttttgccagatatacatgttgtaaatattgtctgtcagcctgtggtttgcctcttcattttattaatgatatatttcgatatacagaagctttaaattttgatgaaaggcaatgatcatttttttacttttatggttacagatttttgtgtcctctctataaaatcattgcctattccaaggtcatgaagatattctattttttagaagctttaaaattttagcttctatgattctctgatctattttgaataatttttgtgtatgaagtgaagtgtaagagtcatgggtcatttttgtcttatggatattcagttgtcccagcatcattctttaaaaatactttcctttccccattgagttgccttagtgtttgatacagtttagatttgtgtccctgcccaaatctcatgtcaaattgtaatctccaatgttggagaagggggtctggtgggaggtgattggatgatggggacagattctccccctttctgttctcgtgatagtgagtgagctctcaaaagatcaggttgtagcacctcccccttctctctctttcttttgttccagctatgtaagacaggcctccttcctctttaccttctgccatgattgtaagtttcctgaggcctccccagccatgcttgcagaaatgtgagccaattaaacctcttttctttcttttttttttattctttttttaatttattatactttaagttccagggtacatgtgcacaacgtgccagtgtgttaaatatgtatacatgtgccatgttggtgtgctgcacccattaactcatcatttacattaagtatatctcctaatgctatccttcccccctccccccaccccacgactggccctggtgtgtggtgttccccaacctgtgtccaagtgttctcattgttcatttcctacctacgaatgagaacacacggtgtttggttttctgtccttgcaatagtttgctcagaatgttggtttccaacttcatccatgtccctacaaaggacatgagctcatccattattatggctgcatagtattccatggtgtatatgtgccacattttcttaatccagtctatcattgatggacattttggttggttccaagtctttgctattgtgaatagtgccacaataaacatacgtgtgcatgtgtctttatagcagcatgatttataatcctttgggtatatacccagtaatgggatggctgtgtcaaatgggatttctagttctagacccttgaggaatcgccacactgtcttccacaatggttgaactagtttacagtcccaccaacagtgtaaaagtgttcctatttctccacatcctctccagcacctgttgtttcctgactttttaatgatcgccattctaactggtgtgagttggcatctcattgtcgttttgatttgcatttctctgatggccagtgatgatgaacattttttcgtgtgtctgttggctgcataaatgtcttcttttgagaagtgtctgttcatatccttcgcccacttgttgatggggttgtttgattttttcttgtaaatttgtttaagttcttagtagattgtggatattagccctttgtcagatgggtagattgcaaaaattttctcccattctgtaggttgcatgttcactctgatggtagtttctttcgctgtgcagaagctctttagattatttagatcccatttgtcaattttggcttttgttgccattgcttttggtgttttagacatgaagtccttgcccatgcctatgtcctgaatggtattgcctaggtttccctctagggtttttatggttttaggtctgacatttaagtctttaatccatcttgaattaatttttgtataagatgtaaggaagggatccagtttcagctttctacatatggctagccagttttccaagcaccatttattaaatagggagtactttccccatttcttgtttttgtcaggtttgtcaaagatcagattgttgtagatgcgtggtattatttttgagggctctgttctgttccattggtctatatctatgttttggtaccagtaccatgctgttttggttactgtagccttgtagtatagtttgaagtcaggtagtgtgatgcctccagctttgttcttttggcttaggattgtcttggcaatacaggctcttttatggttccaaatgaaccataaaagtagttttttccaattctatgaagaaagtcattggtagcttaatggggatggcattgaatctgtaaattaccttgggcagtatggccattttcacgatattgattcttcctatccatgagcatggaatgttcttccatttgtttgcatcctcttttatttcgttgagcagtggtttgtagttctccttgaagaggtccttcacatcccttgtaagttggattcctaggtattttattctctttgaagcaattgtgaatgggagttcactcatgatttggctctctgtttgtctgttattggtgtataggaatgcttgtgatttttgcacattgattttgtatcctgagactttgctgaagttgcttatcagcttaaggagattttgggcagagatgatggggttttctagatatacaattcatgtcatctgcaaacagggacaatttgacttcctcttttcctaattgaataccctttatttccttctcctgcctcattgccctggccagaacttccaacactatgttgaataggagtggcgagagaaggcatccatgtcttttgccagttttcaaagggaatgcttccagtttttgccaattcagtatgatattggctgtgggtttgtcataggtagctcttattattttgagatacgtcccatcaatacctaatttattgagagtttttagcatgaatggttttcgaattttgttgaaggccttttctgcatctattgagataatcatgtggtttttgtctttggtactgttgatatgatggattacgtttattgatttgcgtatgttgaaccagccttgcatcccagggatgaagcccacttgatcatggtggataagctctttgatgtgatcctggattcagtttgccagtattttattgaggatttttgcatcgatgttcatcagggatattggtctaaaattctctttttttgttgtgtctctgccaggctttggtatcaggatgatgctggcctcataaaatgagttagggaagattccctctttttctattgattgcaatagtttcaaaggaatggtaccagctcctccttgtacctctggtagaattcggctgtgaatccgtctggtgctggactttttttggttggtaggcttttaattattgcctcaatttcagagcctgttattggtctattcacggattcaacttcttcctggttaagtcttgggagggtgtatgtgtccaggaatttatccatttcttctagattttctagtttatttgcatagagttgtttatagtattctctgatggtagtttgtatctctgtgggatcggtggtgatatcccctttatcattttttattgcgtctatttgattcttctctcttttcttctttattagtcttgctagcggtctatcaattttgttgatcttttcaaaaaaccagctcctggattcattgattttttgaagggttttttgtgtctctatctccttcagttctgctctgatcttagttatttcttgccttctgctagcttttgaatgtgtttgcccttgcttgtctagttcttttaattgtgatgttagggtgtcaattttagatctttcctgctttcccttgtgggcatttagtgctataaatttccctctacacactgatttaaatgtgtcccagagagtctggtatgttgtgtctttgttctcattggtttcgaagaacatctttatttctgccttcattttgttatgtacccagtagtcattcaggagcaggtttttcagtttccatgtagttgtgctgttttgagtgagttcttaatcctgagttctagtttgattgcactgtggtctgagagacggtttgttgtgatttctgttcttttacatttgctgaggagtgctttacttccaactatgtggtcaattttggaatacgtgtgatgtggtgctgagaagaatgtatattctgttgatttggggtggagagttctgtagatgtctattaggtccacttggtgcagagctgagttcaattcctggatatccttgttaactttctgtctcgtggaactgtctaatgttgacagtggggtattaaagtctcccattattattgtgtgggaatctaagtttctttgtaggtctctaaggacttactttatgaatctggctgctcctgtattgggtgcatatgtatttaggatagttagctcttcttgttgaattgatccctttaccattatataatggccttctttgtctcttttgatctttgctggtttaaagtctgttttatcagagactaggattgcaacccctgcctttttttgttttccatttttttgttagatcttactccatccttttattttgagcctctgtgtgtctctgcacgtgagatgggtctcctgcatacagcacactggtgggtcttgactatccaatttgccagtctgtgtcttttaattggagcatttagcccatttacatttaaggttaatattgttatgtgtgaatttgatcctctcgatatgatgttacctggttatctgttcattagttgatgcagtttcttcctggcattgatggactttacaatttggcatgtttttgcagtggctggtaccggttgttcctttccatgtttagtgcttccttcaggagctcttgaaagacaggcctggtggtgacaaaatctctcagaatttgcttctctgtaaaggattttatgtctccttcacttatgaagcttagtttagctggatatgaaatcctgggttgaaaattcttttctttaagaatgttgaatattggcccccactctcttctggcttgtagatagagtttctgccgagagatccactgttagtctgatgggcttccctttgtgggtaacccaacctttctctctggctgcccttaacattttttccttcatttcaactttggtgaatctgacaattatgtgtcttggagttgctcttctcgaggagtatctttgtggcattctctgtatttcctgaatttgaatgttggcctgccttgctaggttggggaagttctcctggataatatcctgcagagtgttttccaacttggttccattctccctgtcactttcaggtacaccaatcagacgtagatttggtcttttcacatagtcccatatttcttggaggctttgttcatttctttttactcttttttctctaaacttctcttcttgcttcatttcattcatttgatcttcaatcactgataccctttcttccacttgatcgaatcagctactgaagcttgtgcgtgcatcacatagttcttgtgccatgattttcagctccatcaggtcatttaaggacttctctacactgttttttctagttagtcattcatccaatcttttttcaaggtttttagcttgtttgtgatgggttcgaacatcctcctttaacttggagaagcttgttattactgatcatctgaagccttcttctctcaactcgtcaattcattctctgtccagctttgttccattgctggtgaggagctgcattcctttggaggagaagagtcgctctgatttttaaaattttcagctattctgctctggtttccccccatctttgtggttttatctacctttggtgtttgatgatggtgatgtacagatgaggttttggtgtggatgtcctttctgtttgttagttttccttctaacagtcaggaccctcagctgcaggtctgttggagtttgctggaggtccactccagaccctgtttgcctgggtatcaccaggagaggctgtagaactgcagatactgcagaacagcaaatgttgctgcctgatcgtttctctgaaagcttcatctcagaggggcacccagctgtatgagttgtcagttggcccctactgggcggtgcctcccagttaggcttctcgggggtcagggacccacttgaggaggcagtctgtccattctcagatctcagactccatgctggcagaaccactactctcttcaaagctgtcagacagggatgtttaagtctgcagaagtttctgctgccttttgttgagctatgccctgcccccagaagtggagtctacagaggcaggcaggcctccttgagctgtggtgggctccacccaattcgagctttccagccgctttgtttacctactcaagcttcagcaatagcaggcgcccatcccccagcctcactgctaccttgccattcaatctcagactgctgtgctagcagtgagcaaagctccgtgggcgtgggaccctcccagccatgcatgggatataatctcctggtgtgccatttgctaagactgttggaaaagcacagtattagggtgggagtgacccgattttccaggtgccgtctgtcacggcttcccttggctaggaaagggaattatctgacccctcgcgcttcccaggtgaggcggtgccccaccctggttcggctcccggtccgtggcctgcacccactgtcctgcacccactgtctgacaagccccagtgagatgaacctggtacctcagttggaaatgcagaaatcacctgtcttctgcatcactcatgctgggagctatagactggaggtgttcctatttggccatcttggaaactccccctaaacctcttttctttataaattacccagtctctcaggtagttcttcatagaaatgtgagatcagactaatatagtgtctttgctgtatttggggtgttaggactctccgttctgtttgactatttttccatacttaggtcaacaacacattgtcttgactactgaagtttgaaatcgggtagcaaaggttatctagctttgctattgtttttcaagattattttgcctttccacatgctttgtatttttacataaatgttagaactagcttgtcaatttagaattagcttatcaaggaagtttgctgatattttgactgggatttcattgaatataaagatcaatctgtggcgagattaattcttaagagtattgaatctatccactgacttaagaaaagcttttgatgaaaatataatttcttttaatatttgtcagtgagataaggttgaacataattaagattttcattaacttcaacaagtcatgtcactagtttataatgtgtgcttcattatagcagtgtctaagctttggtgaatattatattcctgaatcctagtctggctttcttaactccctagaagatgtgccagaaccacagtgctaaccttttcccaataaaattgtttttaggagctcttgaaacaacatcaaagtgacaccttgcaattagaagagctgagaaaaaccaaagaggtaagctttttcatcctttcctgtggacttggtatattacaaatacaccaataaaataacaagctgtcagtataatggaatcaatgataatttccccaaagccaataagaaatggaagacctaaagctgagtttactggattcaataagttaaaaagaatttttgaaattatctgtaaaataaagccagtgggtctttttaaagtctgatttgaacaaatagatcagcaatatactatgtgatcttcaatgttgaatgactttcatttctagcaaggttcaaaccacaaatgatctttcagttataaaacaccaagttcttccctttgagctctgaaaagtataaaactgtctcctttgaaactctgtcaccaagcccctccttaagctctgaatgtacctcacacatgataacttcctcagggactctattctggggcaaattatggcagtctgtgggagacaactgaagaggagccgttcaaatccacaaggtgatgtgtgattcttccatcactgaaaatttgacttggatccagaatggacacgtttgagaaaacattagtcattataaaggcattgtaaatgaattctatcttagagcccaggcagggcttcagcattatggaaaggcaaacagactgtggtgtcctacaagttcaagaaatgggctttggaggaagatatacccagtgtattataataactattttcatgagcttgtctacgaattctgtcatttgtgtcatgtctgggcctgtttctcttcattgatttttctcctcatttatggtcatatttccttgtttgcatgcctggtaagtttggcttggatgtcagtcattttggtgtttaccttgttgggtgctgaatatttttatattcctttagatattcttaagctttgccctgggatgcagttaagttgcctggaaacagtttgatcctttcaagccttgctttttaagcttcgttgggcagaactaaagcagtctttagtgtggaactaattttccccactattgaggtaataccctctgagtacttgacaccacaccctctgtatgagaaggattttctactctgcctggtgggaccatgaactattcccagccttgtgttggccctggggattgttccacctgctcctcgctgatgtttccttcctctaaccttgtctctttctatttcttccctacatcactccaccccagaggcacttgcctccttgctgttcccttaacaggccaggatgttcctacctgggggtctttgatgttctctcttcctgaaaagctctttcccggatatccacatgactaacttcctttcctcctcctgttctttattcaaatgccaccttctcagaaggtgcccgatttaagggctccgctccctgcccaacacttgcttttctccaaatgggatgccactggaggtttttgaggagagagtatcatttgggaaaataactgtggcagcaatgtgaaggagaatctgaagaggcaaaatgatgggaggcagaacctattagaagggtcacctcccctttacacctcaacctgacttctgctccaatcccagccatggaaactgttcttgttaaaatcacaagtaaattccaagttgccaaatccaaggaatgcttcacctcactggacatgagcagtatcaggtgcgattgatcattctctccttgcaacattcacctgtcttagctttcatgggcttctggtgtttccttcacctcattggtcacaccttctcaatctcctttactagaactagaactctgcttaaaacccttcaatggcaccccactgttctcccacctactttctaagtcctggagtattttgaggcttgttcccaggccccacttatcttctttatctcccgtttctcctttggtgagctcatctgttcacacagatgtaaaagccatctctgtactgataacttggtttgatacctccagccttgcctctctcctgagctccaggcttgtacatccaactgcccatttgacatttcaacataggtgacatacagacacctcaaaattaacatgcccagttccacactctcaattttccaccagagatttagcccccaaattgtcaactccctcagctgttctaagcctagacctgaagtcatccttgatttcttctttcctttcactctcccaaattcaacccagcagcctcagccaatcctctataacataatccaaattcatccacgtccctccaactctgttgtcaccttaccctagtccattatttctcacctacacgactgtagtattctcctccttagttccgttgctttccctcttgcccttccaatccatccccatggagcataatgtaaacagtaagatacgtgcattcacttctctgcttaaaacccttcagtaggtccccattgttcttaggttaccttgtcctctcaggtgccaccagacttccctgtatttcctcaccatggccctctatccttactatctctattccagccatattggtgttcctttgggtcctcaaacagaatgagaattttgcattttttttattatactgtaagttttagggtacatgtgcataatgtacaggtttgttacatatgtatacatgtgccatgttggtgtgctgcacccagtaactcgtcatttaacattaggtatatctcctaatgctatccctcccccctccccccaccccacaacaggccccggtgtgtgatgttccccttcctgtgtccatgtgttctcattgttcaattcccacctctgagcaagaacatgtggtgtttggttttttgtccttgccatagtttgctcagaatgatggtttccagcttcatccatgtccctaccaaggacatgagctcatcattttttatggctgcatagtattccatggtatatatgtgccacattttcttaatccagtctatcattgttcgacatttgggttggttccaagtctttgctattgtgagtagtgccgcaataaacatacgtgtgcatgtgtctttatagcagcatgatttataatcctttgggtatatacccagtaatgggatggctgggccaaatgggatttctagttctagatccctgaggaatcgccacactgacttccacaatggttgaactagtttacagtcccaccaacagtgtaaaagtgttcctgtttctccacatcctctccagcacctgttgtttcctgactttttaatgatcgccattctaactggtgtgagatggtatctcattgtggtttgatttgcatttctctgatggccagtgatgatgaacattttttcatgtgtcttttggctgcataaatgtcttcttttgagaagtgtctgttcatatcctttgcccacttgttcatggggttgtttgtttttttcttgtaaatttgtttgagttcattgtagattctggaatattaaccctttgtcagatgagtaggttgcaaaaattttctctcattctgtaggttgcttgttcactctgatggtagtttcttttgctgtgcaaaagctctttagtttaattagatcccatttgccaatttaggcttttgttgccattgcttttggtgttttagacatgaagtccttgcccatgcctatgtcctgaatggtattgcctagattttcttctagggtttttatggttttaggtctaacatttaagtctttaatccatcttgaattaatttttgtataaggtgtaaggaagggatccagtttcagctttctacatatgactagccagttttccaagcaccatttattaaataaggaatcctttccccatttcttgtttttgtcagatttgtcaaagatcagatagtgtagatatatggcattatttctgagggctctgttctgttccattggtctatatctctgttttggtaccagtaccatgctgttttggttactgtagacttgtagtatagtttgaagtcaggtagcgagatgcctccagctttgttctttggcttaggattgacttggcaatgcgggctcttttttggttccagatgaactttaaagtagttttttccaattctgtgaagaaaatcattggtagcttgatggggatggcattgaatctataaattaccttgagcattatggccattttcacgatgttgattcttcctatccatgagcatggaatgttcttccatttgtttgtatcctcttttatttcgttgagcagtggtcaacgaagaggtccttcacatcccttgtgagttggattcctaggtattttattctctttgaagcaattgtgaatgggagttcactcatgatttggctctctgtttgtctgttattggtgtataggaatgcttgtgatttttgcacattgattttgtatcctgagactttgctgaagttgcttatcagcttaaggagattttgggcagagatgatggggttttctagatatacaatcatgtcatctgcaaacagggacaatttgacttcctcttttcctaattgaataccctttatttccttctcctgcctcattgccctggccagaacttccaacactatgttgaatgggagtggtgagagagggcatccctgtcttttgccagttttcaaagggaatgcttccagtttttgcccattcagtatgatattggctgtgggtttgtcatagatagctcttattattttgagattcgtcccaccaatacctaatttattgagagtttttagcatgaacggttttcgaattttgttgaaggccttttctgcatctattgagataatcatgtggtttttgtcattggttcggtttatatgctggattacatttattgatttgcgtatgttgaaccagccttgcatcccagggatgaagcccacttgatcatggtggataagctttttgatgtgctgctatatttggtttgccagtattttattgaggatttttgcatcgatgttcatcagggatattggtctaaaattctctttttttgttgtgtctctgccaggctttggtatcaggatgatgctggcctcataaaatgagttagggaggattccctctttttctattgattgcaatagtttcaaaggaatggtaccagctcctccttgtacctctggtagaattcggctgtgaatccatctggtcctggactttttttggttagtaagctattaattattgcctcaatttcagagcctgttattggtctattcagggattcaacttcttcctggtttagtcttgggagtgtgtatgtgtccaggaatttatccatttcttctagattttctagtttatttgcatagaggtgtttatagtactctctgatggtagtttgtagttctgtgggatcggtggtgatatcccctttatcattttttttttgcgtctatttgattcttctctcttttcttctttattagtcttgctagcattctattaattttgttgatcttttcaaaaaaccagctcctggattcattgattttttgaagggttttttgtgtctctatctccttcagttctgctctgatcttagttatttcttgccttctgctagcttttgaatgtgtttgctcttgcttctctagttcttttaattgtgatgttagggtgtcaattttagatctttcctgctttctcttgtgggcatttagtgccataaatttcccctacacactgctttaaatgtgtcccagagattctggtatgttgtgtctttgttctcattggttttgaagaacatctttatttctgccttcatttcattatgtacccagtagtcattcaggagcaggttgttcagtttccatgtagttgtgtggttttgagtgagtttcttaatcttgagttctagtttgattgcactgtggtctgagagatggtttgttgtgatttctgttcttttacatttgctgaggagtgctttacttccaactatgtggtcaattttggaatatgtgcgatgtggtgctgagaagaatgtatattctgttcatttggggtggagagttctgtagatgtctattaggtctgcttggtgcagagctgagttcaattcctggatatccttgttaactttctgtctcgtggagctgtctaatgttgacagtggggtgttaaagtctcccattattattgtgtgggagtctaagtctttttgtaggtctctaaggacttactttatgaatctggctgctcctgtattgggtgcatatatatttaggatagttagctcttcttgttgaattaatccctttaccattatataatggccttctttgtctcttttgatctttgttaattgaaagtctgttttatcagagactagtattgcaacccctgcctttttttgttttccatttgcttggtagatcttcctccatccctttattttgagcctctgtgtgtctctgcatgtaaggtgggtttcctgaatacagcacactgatgggtcttgactatccaatttgccagtctgtgtcttttaattggagcatttagcccatttacatttaaggttaatattgttatgtgtgaatttgatcctgtcattctgatgttagctggttattttgctcgttagttgatgcagtttcttcctagcctcgatggtctttacaatttgacatgtttttgcagtggctggtaccggttgttcctttccatgtttagtgtttccttcaggagctcttttaaggcaggcctggtgtgaccaaatctctcagcatttgcttgtctgtaaagtattttatttctccttcaatcatgaagcttagtttgactggatatgaaattctgggttgaaaattcttttctttaagaatgttgaatattggccctcactctcttctggcttgtagagtttctgctgacagatctgctgttagtctgatgggcttccctttgtgggtaacccgagctttctctctggctgcccttaacattttttccttcatttcaattttggtgaatctgacagttatgtgtcttggagttgctcttctcgaggagtatctttatgctgttctctgtatttcctgaatctgattgttggcctgccttgctcggttggggaagttctcctggataatatcctgcagagtgttttccaacttggttccattctccctgtcactttcaggtacaccaatcagacgtagatttggtcttttcacatagtcccatatttcttggaggctttgttcatttcttcttattcttttttttctaaacttctcttcttgcttcatttcattcatttgatcttccatcactgataccctttcttccagttgatcgaatcggctactgaggcttgtgcatttgtcacatacttcttgtgccatggttttcagctccatcaggtcctttaaggacttctctgcattggttattctagttagccattcgtctaatcttttttcaaggtttttaacttcttggccatgagttcgaactttctcctttagctcggagtagtttgatcatctgaagccttcttctctcaactcgtcaaagtcattctccatccagctttgttctgttgctggcgaggagctgcattcctttggaggaggagaggcactctgatttttagaattttcagtttttctgctctgttttttccccatctttgtggttttatctacctttggtctttgatgacagtgacgtacagatggggttttggtgtggatatcctttctgtttgttagttttccttctaacagtcaggaccctcagctgcaggtctgttggagtttgctggaggtccactctagaccctgtttgcctgggtatcagcagcggaggctgcagaacagcagatattggtgaacagcaaatgttgctgtctgattgttcctctgaaagttttgtctcagaggagtacccagccgtgtgatgtgtcagtctgcccctactggggggtgcctcccagttaggctactcaggggtcagggacccacttgaggaggcagtctgtccattctcagatctcaagctgcgtgctgggagaaccattactctcttcaagctgtcagacagggacatttaagtctgcagaggtttctgctgccttttgtttggttatgcctgcccccagaggtggagtctacagaggcaggcaggcctccttgagctgcggtgggctccacccagttcgagcttcctggccactttgtttacctactcaatcctcagcaatggtgggcgcccctccaccagcctcactgccacctcgcagtttgatctcagactgctgtgctagcaatgagcaaggctccgtgggcgtaggaccttatgagccaggcatgggatacaatcttctggtgtgccgtttgctaagactgttggaaaatgcagtattagggtgggagtgacctgattttccaggtgccatctgtcacccctttccttggctaggaaagggaattccctgaccccttgcacttcccggatgatgtgatgcctcgccctgcttcggctcatgctcagtgcactgcacccactgtactgcacccactgtctgacaatccccagtgagatgaacacgatacctcagttggaaatgcagaaatcatacgtcttctgcatcgctcacgctgggagctgtagactggagctgttcctattcggctgtcttggctccacccctgagcattttgcattctaaggacctttgcacaggcttctattcattctttagtggaagtttgtgtgtttgtttcaagaagctactttttagagcagttttaggtttacagaaaaattgagcagaaagtacagagagttcccatatactaccccaccccaccctaccccaccactagtttcctttattattagtatcttgcattgggatggcacattagttgcaattgatgagccaatgtggatgcattcttattaactaaagtccatagtttacatgagggttctctctttgtgttgtacattctgtgggttttgcctaatatgtcatgtcatgtatccaccattatagtgtcatacagaatagtttcactgctctaaaagtgccctctatcccacctattcatccctcccttcccctccaaatccctagaaaccactaatcttttttctctctctatagttttgccttttccagagtgtcatataattggaatcggtagtaggtatttaataaagacttgcttagtgaatgaataactgattgccattagaaccattcatatgagctctggtgaggctgaagagaaggatatagatgggtgagacagagaggaggcaggactgacagggtgtgagtggccatgagtgatgcaaaagtagctcaggttgctccctttcatcatagtccaggtgccctggagaagagaccaaataaatagacattggcatgatgtcctgcaacagcttcttcttatgcaggtcatgcaggaagaattgcatgcacaagcccttatcctagagtcactgaacacaaacctctactatacccagttggaactccagaaagaggtgagtccctactggagtggggatgggggttgggggaagaacccaggtctccatccagctctgccatatagctctgccctggatggctctgggttggggaagatggctattaaaatgtatgtctttcagaaagctatagtgggaaatctggagaaaatgcttcaaaccaagtttgctgaaactgaagaaaagtataagcacaccatacagatcctgacggaagagaacattcatctgaagtgcggctgctgctgaaaaagacatagctgagttctctttaggagtgggaaggagtttgagtgaggaatgggttaggaagatagaccaactgctccctagttatgtcaaggcacaggtgttttcgggagggaggtatgtcactctaggccagtgacacaaagccagatagttcacttgaggtggagtggagatgtgtctatacttctcccattcacctgtgtccttgtttctatgcaaaacaacacaggacatttgtctcccagtttctgagtttgctcagttctatgactgagggtgggtttttaaatccatctcccctgggagtctgatggttttgccattacatgcagctgcttctggttcctatggaaatcacctttggatcagaaggtgtactgttacctgaagctgcatcttaaatcattaaaataaattttggtcaatactttaatagaagaaagttatttattgcattgatttagtagaaaattcctcatataggactttagtcacctgaacaccatacctcactaaattcaaaaccactgcaagtaatgagtgagagactgctgtggtgaaggaacgaaggcacatttctctccctgcactccaaatatcctataccctttctagcttttgagttgacattgatacatctttcctttctttttacaggcaaaagataatttctaagaatgaagaaatttgtgaaggatgttctgggagattggcctctattactgtttctaaggatgattctgacactgtgcaagatggtagcaagaaaggacaagaatcataaacaaaaagttgctctgcattgttgaagatggttggcacaccatttctgtaggcccaggaaactcctgggagggttttcttgagaaaatgcatataatgagtttagttcttgggttgctctgactcgctgaatgtctgaaaatgtttgaattctcatctgaatttcacagcttatcacggactcttcactgaaaaatgatgctctccatactgggagctgagctttctctgagttttgtactatttttcttctaccttgacgtatttcgttagaaagaaactgatttgaaggccttcttcctattgaacttttactatatttgggaggtgtacctttgtcccctggggcatttaggtagcaaaaaaagatgatgtgttgattttactctaaaatatttttctctcacacccatgccccctacttccctacctctcaatcatgttccctaacctatgacttaggaagggtttctgatgattcttaccacctcctctggaccatcaccagaattcagacacccacagtgcaggcaacataaataagtgaagtgggctagacataaggaaaacaattgcccaagcacagtgataagtggcaaccaacagcagcctcagtagaggggcttgggcagggctggggcacagcggatggggaagagtgacccacagagcactgtcccatctgaagaaggtgcttctcagacctttgccatgcaaaagcatgaggtcaatattgtcagatagtatgattttttaaaagaagttattctggtttttatgtgatatctcctaatttttaaacattgacaacaaattttaaaaatacaactgtgtgtgccgatcatgggagactcaagtagaacatgtctgtagtccagatgttttcctcctgtgagatgtcattggcagaaaccaaaaccaaacacaaaaaatctccaaggagcaataagatcaaattatattttattctattaaaaaatgtttttgaaaaaagatacttaaattttaaagataacttaattcctaatgatttaaaataatccaagcagagatgaaagagcaaatgcaaatgcataaaaagaccccagagcattgttagcaaaaagcaaatatagttagccaagcatatatatatcataaaagcaataagaaggcataaagcaagtttggggagagcttatttaaaacttgtaaaaatcatttgaatttttaaaagttttcaaacaaattttgttttattaaaaaaaaaattttttttgagacggggtcttgttctgtcacccaagcttgagtgcagcggtgtgaacatggctcactgcagccttgacctcttgggttcaagcaatcctcccacctcaacctcccaaagtgctgggattatagacatgagccaccatacgtggctactttctaatttttttaatgtggtagtgtggaatttagctttgaaagagaattaaagttaatagaatattaacagtgggcttatagttgatagataacaatctgaatcataagccctctatattcatagctggattttgtacgtgtctggtatttattgccaccagctaaaaacattcccaaagccttaagcataagagaaaggagacagtgttattgttgttaatatcctatttaactttagctcttataaaaaagtgcaaaacaattaataaagtagaaaatctagaaaattagtaaataaacatagtgttatatctaaatagtaccatcggccaggcgcggtggctcacgcctgtaatcccagcactttgggaggccgaggtgggtggatcacgaggtcaggagatcaagaccaccctggctaacacagtgaaaccctgtctctactaaaaatatttttaaaaaattagccaggtgtggtggcgggcccctgtagtcccagctactcgggaggctgaggcaggagaatggcctgaacccgggaggcggagcttgcggtgagccgagatcacgccactgcactccagcctgggcgacagagcgagattctgtctcaaaaaaacaaaacaaaacaaaacaaacaaaatagcaccatcaatcagaagggaagacaagtttttttcttagtgtgaaagtaggctgaggcatctgtttccccatgtttttcttgtcatccttgttgcttacttcatagttcacttcagtcaggatggtgagaatatcatcgcctctgaaatacatcacataacattgtgactgtctgtgggggaaagcaactgatgaactgtctcctctgctgtgctcagagatagttctgtagttctttctctcaaaatatcagtcatttgaaacaataaggtgcgaaaccaagacctaccccagctttcctggtaaatgggttgtctcagagcttaataacttacttttggtttattcaggaactcttttgaccatcagaaacctcggtgtcagtattagagttggtttctttctctcctgacctgtgtgtctctcactcttctccacgttacttggctccccattgcttcaatgccccccaatactctctgcctcgaattgacatcgcatctgcggattcatctttgatgcaattaaacttaaggcaagtgaaagtataacgtctcctgcagctactcccaccttcttctcaccaggatctcttagcatttttgttaggcaacctcttcttctaccttggtagctagccgcggaaaccttgcaggattcatgatctaagttacgaaatctaagttagattcatgatctaagttacgggaaattctcactcttcatatactcaaaacatgaaatacagggctagaaggaacctgctatttatctcccataatgcaccaagaggttttgaggatggtttgctattatagaacttttgacagagttggaggatgtttaaacattgaattgggttactgccttcttggaagatttccaaaactagttgaattggctcagtcatgttttggcctaaagacagagagctggagtatatgactttcctatcctttcctgctctgtgataccctgattgtcctttgaggtgctgaataaaggaataaagcatctcagcttttccatctataaactaaggatgttaacacttgccactctcccactttgtaactgacctgggaaatgcagctatgtgatctacagctagacatttagagttgaacggaaaccactccccttggacagttctctgacctgttaatgtgatctaaatcacatagcactttctaataggctctgaatatgagtagatagtagtgtgatggagtagggggggaaggtagtgtaacagtgaggagggctgagtaggcaaaacttaccgaggacatcgctctctcaggctctggcaaagtgactggatgtaccaggttccctctgcagggtttcggtaggaaacacagttattcacagtggccatccccagcagaaagtcagcctcatccgggatatatctcgtttgaggtgatgataaatccatttctaaatagggttgctcctctgaatcagtctcaacaggtatacctttctggtagttatccccctgacaagcctgaataaaaaacactttgggttttccagcaagggaagggcacttcaaaccagtgaactgagatgtcagctcatagatgggggcctcctgtccatcagtgccatagatgatgcccttgtctccatgggagaggatacagcagatgaagcagtccatgttactgtggtccatgagttggtagattttcaaaatctcatagatttgctctactgtgcagtcatcgtggggcttgatctcaaaatgaagctcttcaaaggtcgtggtcaaagcccctgaaaagtgaaatttgaacagtcacgttataccacagtaattcacagaccacagctggagagcacagtgggcataacattgatagataagaatttgaaccagaaattcaagagcaaaaccctctatattcgtagctggattctgcaggcttctaatatttattgccaccagctaaaaacattctcaaaccctgaagcaaatgagaaaggagagagtgttattgttggtctgttttctctagtaaactagtttacaagatgggtaagctatcatttaggcttactactgaaccaattttaaaaatgattatattatttacataatcagaaaaaaacaaaacaatttttgaataaaagatccaacttattttatcctaaaccttctcaaaattatttatgtatagcaaaataaaagatatgaattaataagatagaactagaagaccttatacaaaaggttatcccctctctatccctccccattacctagtcacattccatgaaggcaaccactttcagtttttaaccacttttttccacattgagctccattttgtaatgaatttgggtacactgctaattactcatttataaattttagactttcgcattgagttcttattatggagaataagcatttgggctcttactcaattatttacaagttttggttgaatccatagtaatatttttatttttttaattttttttagaaaaggtctcactctgtcacccaggctacagtgcagtgtcacaatctcagctcactgcaacttctgccccccaagttcaagcaattctcctgcctcagcctcccaagcaggtgggactacaggcacgcaccaccacacccagctaatttttgtatttttagtagagacagggtttcgccatgttagccaggttggtcacaaactcccagcctcaagtgacccacccaccttggcctcccaaagtgctgggattgtaggcatgagccaccacctccggcccatagtaatatttctattattaagactatgtaaacataatgttctttcattatgtttcctttcttattaacctttttgcctttcctggaacttgtaattgtattattttttcatctgctttgtttcctatatgcttaacactatttttcctccaagtgctcaatggatctggccaaaatctttcaacattttcaggctacttgtctgactcatttttatttcttcctggaaaactttccatccagagcactgcatccttctgctgtaataccaactggctgttccataggccagatgaatttctcttctcctgggacatctctctgtctcttccatagtaggttccctgtttcctccatctatgacttcctctttcttatcagtttcctttgctggagcataaccatgagaagtacattttttgagcccctgtatgagtctttagtttatagagttctatttccaaagcatttttcctcagaattctgaaggcctttcttcacagtcttttagctttcagtgttgctagagagaagactttccatttctgatactttacatatttggcttacttttttctctttccagaagcttctagggtatgatatgtttggaagtgaatcttaatccattataccctttcaatctggagattgcgtcatttcgttcttggaaagttccatttcccctttctctgtcctttctttctggaactcttattgtcaaaaattggacatccttgatttagcttcaaattttcttatctttcactcctattttctatttttgtctttttatcctacttccttagactttatcttctactttattgaatttttcattttggtgctcaaatttttaattttcaaggagacttgcttgttctgtccctttttcataacatcttgttctttcatggacctttaactaactctctaagaatactaaataccaatattaagcattaaaaaaggttgcttttttctcaacattatctttttttcattcatattctgtttcatgtttttcttgttgtttgcattgcctctcatttatctagtaatttatttatttatttgagatggagtcttgctctgtcacccaggctggagtgcagtggtacgatctcagctcactgcaacttccacctcccaggttcaagtgattcttctgcctcagcctctgtagtagctggggttacaggcacctgccaccatgcctggctaatttttgtatttttagtagagatggggtttcaccatgttggtcaggctgggcttgaactcctgacctcaggcgattcgcctgcctcggcctcccaaagtgctggattttcacgccaccgtaccaagctacctctctttcgtattagagcctttcttcaaatgcctgctgacctttggttgtccattcataaattgactaattagtccattaaaaagtcgactgaaagctctgtgtttgtggatgtggcttgttctctgagggatttcatagcaagatgattggttggggacctgatcatttcattaggaaacctccagatgtcattatctgtatgtattttagctagagctttcagcttctccagaggtaagtctgtatctgctgccagtgtcttggaaccaagttggtttagagatctgactccatgccaccagcaggttttcttcagtctctctgtgttcagtaaaatgcttcattgcttcctttgctgggcctggcacaccgaagtgtagagcctctctggttcaattttatgagaaaacaaacttcctgttccttatgatggtagaataagaatagttgctggctctatgagagggaggtatgaatcagaggattgtataggcttatataggctttcaaagaatcttcctgttttctgctcattgcctcacctacactttgtacttccaattgctgaatttttccaggattctgtgggggtaaataggcttgcctcctttccgtgttcccctctgtaatcagtgaggttgtagctttctctgttaagtcaattacctcgactcttttttttcaactcccccaaattgttggaaacctttcattagctattgtctcctttcctgttctcttgatccttgttggattattccttttttattccttctccagcattttgtccctgtcagcacatcagagctaaacataagtcatcagtcaaaaggcagtctcagccaggtgcagtggctcacacctgtaatcccagcactttggtaggccgaggcgagtggatcacctgaggtcaggagttcaagaacagcctgaccaacatggtgaaaccccatctctactaaatacaattaactgggtatggtggcacatgcctgtaatcccagctacttgggaggctgaggcaggagaatcacttgaacctgggaggcagaggttgcggtgagccaagatcatgttattgcactgcagcctgggcaacagagtgagactctgcctcaaaaaaaaaaaaaagaaaaaatacagtctagcattaggaatagaaaaaaataactgaaatgcaataggcccttgttgatttggaagcactttggcaagactaatacagtgtgttggttctgtgaaaaaaattctgatcctttggaaatgtggaatgttgattaaaaaaatgactgtaaagcaagtctgaaggcactgaagcaggacagaagggagtctctcaggagaaatgacttctgcagctgggtctcctacttttactcattcagcataaaacataagaacaggaacagaaaaagcaggacacacagactcgaatgcctaccagagactagtcaatcatgggccagttataagaaaatgagctgccagaaatagaagcaaatgttattttaatagaaatgttttaattttaaaagaatacaaatcaagggtccaaaatatttttttcaataccaagcgcatagtgacgaatgatgtaatcaatggacttaatctctgtgcctttttaaaggcttagatttgcttaaataaacaaatcaaatgttagcagggaccaggtacaggtggctgacacctgtaattccagcactttgggaggccgaggcaggcggatcacttgaggtcaggagttcaagaccagcctggccaatatggcaaaaccccatctctactaaaaatacaaaaattagccatgtgtggtggtgtgtgcctgtagtcccagctacttgggaggctgaggcaggagaatcacttgaaccagggaggtggaggctgcagtgagctgagatcacaccactgcactccagcctgggcaacagagtgagactttgtctcaaaaaaaaaaaaaaaatgttaataggggccattacagactcctgatgattataatcagtctacattaattttctaaacttacctccatttgcaaaacaaatcaataattgatgttatgcctgataaacactatttccaaaagttctttgatcaaatcaaaattattaatctctcaatggtgatggatgatttttattttttgttgttgtagtcactttttatattcacatactacaaattgttttttcatttaacttgtaagttcttgatcttagcttaatttggctgagcaaaagaattgctaaccagtttaatatttaatacttgaaaatgctatttctgttaagaacccacaatttctgctgcacttaacagcccaacctgtaaaaatgcagcctctataagaactttgataccacagcaatttcatcgcctaatacattccacagaagcgctatgcatttagctgaattcaaaacaaagcttattactgcttttcattatgtcttttagtaagatttgatattttatatttatacatacattacttttatttaaaaaattaatttttaaaaaaagcaggaaactgataaatgtataagaatgttctttacctccacagggaaatatgtttaaatccattttcttgaaacatggcccttttggtatagcttttgttctctcccttttgatttaaaaaaaaataggcataagaaatattttacttttctcttttgggttctactgtacctgcatccaagtgtgttccattcctgtccctaatgctgtgaagtttgggcactttctcccgtgcttttgcaaaattgtgattgttgatgatcagacagtatccccgaggtttgcttttcatttggtaaactttgtccaaagtctggaaaacaaaaacccaacccaggagctgactctgtgggtcaaacactagagatgtaaacaaacaactccctagtaagaggacttgctttccattgcaccaccccaactcggggtcgtttcctcgaagaactagtttctacctatttccttcacacaggacctctcagacttctgccccatcgttgtaaagtcagtgtcccaatacctgggcctcctgagcactttgcacatatattaatattgttgtcatcacattgtattattgtttgttctcatttctgcttcccatactatacagaagactccttgaggttcataacatctgtgccagggactacggtgtattaacttgtgagagctcaatcaagagtcactgaatgaatgaatgtctttggctgcccccacgccatgacttgtgattctcttggctgtctactgaactcatctgtgcttcgtggctaacagctgagggtctcccattcatgcattgcacagtgtggtcccaggattttaaaggtgatggcttaacccagctctcaggaccacggtggctgctgggaagagatgggctggtcagggaggtcctggctacactgtaggttatggtatccaaactgtagtacctgatagtactggccagggatggcgctgtgtcctattcattctcctagggctgtttcagtaccgagaaactcagcatttagttggaggtctgcgtagccccttgaggtggagaaaaggactccaggctaggaagcccaattcctgcctctacttcaccttatgactttgggcaaataacctgttatcttaatatgttaactctaagatattaaatatttgattaagtttgtaccaagtatgttaagtttttattatttacagttgtgttctaagtatttattaagcatattaagtgtatttactgagatactaagacactaagatttggccaggcacggtggctagtacctataatcccagactttgggaggccaaggcaggaggattgcttgaggccaggagttcgagacctggcttggcaacgtagcaagacccctgtctcaata

SEQ ID NO: 7 - DNA, 1889 bp, Homo sapiens
ctttggcctgccatctcccaagggcaaacctcacaactcaggcccaagtcacaggaatctgaatggtggggtgaccttctcctctagtttaatttcattgcaatactgagaaacttcaactgttttgtctttagaagggaaattcatgtttgtgccaggccagcctttgtaaaagcctttgattggattcactagaagtctgtcttcccgcagtacatatactgtgaattttctccttcggcatttcaaccacttggaatggccactaaagtggcttttgatctaaagtaaactctgattctgtgttgatggggaaccatttctctctaacatggtggtttctttaagatgtttgacttgggccacatgagaataacagatctttgggcagtccaagcaagagcctcctgatctagcagccaagactccccctgacctttggccatgtaccccaaccctctcatctactgcacctgctgggacccctggaacttgggaccacggaagctaatcaagacccctcaactaccacgcaagaactccacagggagttccaagctaactcctcttgtaccagctccaaaaaatcacaattacctccaaccaacaaaacctgttgtttccccaaaaatgaaaatccattcagcaaggcaagaagagactaataaatcattttatgaagtgatcaacgtgtcacctggctatcaacttgttcggaatcgggaacagatttctgtcaccttaggggatgagatgtttgataggaaaaagcggtgggaatcggagatcccggacaaaggcagattttccaggaccaacatcatttctgacctagaagagcaaatctcagagctgacagcaataattgaacaaatgaacagagaccaccagtctgcccagaaattgctctccagtgaaatggatctccgctgtgctgagatgaaacagaactttgaaaacaagaacagggagctcaaagaggcccatgaagcagaactcagtgagttggagaacaactacaaagcagccttgaaggcagagaagttggctgcccaagagaagctagaggagatgggaaaagaatacaagtatttgaagaatatgtttcgtacgtatcaggacagtatttatgatgaaatggaagagaagtggtcaaaacagaaggcgaaatggaagaaggatgagaagttcgagcgagaaaatatcctgctacagcaaaaaaaaaagatgaccaaaaaattcgaaatggagtcaggagaagaagataagaaaataaatgaatcctgcagtgctgtctttgagaacttcattcaagagaaggaggagctcttgaaacaacatcaaagtgacaccttgcaattagaagagctgagaaaaaccaaagaggtgccctggagaagagaccaaataaatagacattggcatgatgtcctgcaacagcttcttcttatgcaggtcatgcaggaagaattgcatgcacaagcccttatcctagagtcactgaacacaaacctctactatacccagttggaactccagaaagagaaagctatagtgggaaatctggagaaaatgcttcaaaccaagtttgctgaaactgaagaaaagtataagcacaccatacagatcctgacggaagagaacattcatctgaagcaaaagataatttctaagaatgaagaaatttgtgaaggatgttctgggagattggcctctattactgtttctaaggatgattctgacactgtgcaagatggtagcaagaaaggacaagaatcataaacaaaaagttgctctgcattgttgaagatggttggcacaccatttctgtaggcccaggaaactcctgggagggttttcttgagaaaatgcatataatgagtttagtt

SEQ ID NO: 8 - protein, 443 aa, Homo sapiens
MYPNPLIYCTCWDPWNLGPRKLIKTPQLPRKNSTGSSKLTPLVPAPKNHNYLQPTKPVVSPKMKIHSARQEETNKSFYEVINVSPGYQLVRNREQISVTLGDEMFDRKKRWESEIPDKGRFSRTNIISDLEEQISELTAIIEQMNRDHQSAQKLLSSEMDLRCAEMKQNFENKNRELKEAHEAELSELENNYKAALKAEKLAAQEKLEEMGKEYKYLKNMFRTYQDSIYDEMEEKWSKQKAKWKKDEKFERENILLQQKKKMTKKFEMESGEEDKKINESCSAVFENFIQEKEELLKQHQSDTLQLEELRKTKEVPWRRDQINRHWHDVLQQLLLMQVMQEELHAQALISLNTNLYYTQLELQKEKAIVGNLEKMLQTKFAETEEKYKHTIQILTEENIHLKQKIISKNEEICEGCSGRLASITVSKDDSDTVQDGSKKGQES

SEQ ID NO: 9 - DNA, 60618 bp, Mus musculus
  misc_feature (1)...(60618): n = A,T,C or G
cagaacattttcacattatacagtacaatttgtcataactgaaagagaagttctttaagctggacagtggtgttgtacacctttaatcccagcactcaggaggcaggggcaggtgaatttctgagttcaaggccagcctggtctacaaagtgagttccaggacagccagggctacacagagaaaccctgtcttggggggggggggggagaaaagaaaagaaaagaactttaacgtagatgctactcagatcacagtgcagtgtgcatgaatgtgtttctctctgcggataaccagaaacgtattactttattactttactcttcccatacacattttgctttaaatccctggggtggtaaacagttgtttctaggaagacaaaaagaaagttttaagaaccgtcaattacaaaacgcattcagtccgttctgctttttatgtgctttcttttagtttggaaacattgtatgtcatcattttcatgtattctcttatttttttacttattttttaaatttacactctagattttattctccccccacccccggtccaccctccaactgttccacatctcatacctcctccccacccacttgtcttgactaggatgtcctcactgcccatccccccaccccaccagacctctaaaccccctggggcctccagtctcttgagggttaggtgcatcttctctgactaaacccagacccagcagtcctctgctgtatatgttttgggggcctcatatcagctggtgtgtgctgcctggttggtggtccagtgtttgagagatctcaggggtcctgatcctcctatagggttgcccttctcctcagcttcttccagcctttccctaattcaaccacaggggtcagcagcttctgcccataggtcgggtgctaatatttgcttctgactctttcaactgcctttgggtcttccagaggacctagaatcttatggcttgttttcgattttcacttaggttcttgtttcctgagcttcctgaggagggcagcacaattcctctttctgctcctctgcccactggaaggagatccttctgtactggaaaatcggattccagatccgagtcaccagaaccagggtgagttgagctgggtgaggtagtgaggatgtggtgtgaatgctgcacggactcccgaagaacctcaaagatggctgctttccccaggcccggtttcctcatgtcctcagtggctgtctagcttcctcgtggtactagctgctgtcagggagggagtagccacatgtggtcagtcaggaaggcagctgagcaaaggcaatttgtgccgagttaggtgaccctgcaagagcagcctcaagatggaatcaaagcgattctcagtttgctttctggtcatccaaaagaattggcagttggttcaagacagtcaactctacctgtatcaagcagcactcgcaaaaccatcctgtgaaccttgcagtccataaggaagcgccatctctgactagtgttcttgtgcctccttcccacttctgtttgtagttatgtagtaacaagttctggcttactgcttccggtgctgctgccacggctctacccacctctcttcatgctctatgccctggataatgaccgagaggaagacatttactgggaatgtgtgcttcgactaaacaagcagccagatattgctctcttgggcttccttggagtacagaagtaggtactgtggttgtgagcagaaccaaaagtttgaattgaaaattccttcagcactgccaagaatttattggcatctacttgtgtgtatgtgcgtgtggtttctcagcttgctcatctgccctgtcagcacagattaatgatcttcatttctgagagggtccaaaggtggttatgaagttcctttatatctgaacatgggtttttacataatcatataaaaactaaatggctcgtcttagctaataaagatgtgtaatttatactcccattccttagaaaaagttaattgctttaaatctttggtgttccttcccttttatccgtcccacgtcatttgcaattgaaagtgttagacttaaacattttcatattatctcaggcatgggttctccttccagggatggttatcatcctttctctagagtggtgatagagctgattccagtccacttaagagccatatattcacgctatcaaaaaagtgtatacatttttgttgggaagttattttttcaatggaataatttagtaataaaaatgtgataaatgtgtaaatgaaggacctactctggactgtagtgtgcagttattggatgtagattgaggttataggatgacaaaaccccctgggatatagtagctgctattgccaatataaaaaccacagctctcatcttcaagggaataagaaattgttcattctagagccattataagtgactatggatcaggaacacagatttaagttatcccaaattccgtgctctaacatggaagcagtttttatagttttacagaacaaagaaggtcatcaatcaaggaaagtttaaaatgcattgagtatgccagagagtcagatatggtgagacaggcaggcaaggtgtacggctattgtgtagctattttatagacccaagatgctatcttatgacattcttagctcttggattactggaaaagtgttctactaagttaatagcttctatgagatctttatttattatcatggggtgttttttcagattcagagccaggagtggctgtttcagaaggctaaagttagcccaagataaagtaattagcctttgaacctacaaattccagtctctcagagcactgagatcccagtcagttcattattctctgcagacacaggctctttccgggagttttcactcccagccagatatagtttcttctcaggagttttcacattattaagccatttccaggatgtttactaaattttaggaaaaaggtaaataaaaacatgaaacccagaaccaatttgtagaaaagttgttaaggggagcagggaagccaagataaccatcatctttataaagggtgtgtctgccatactgatgtcttagactaacaatttatgatttcattgtagaaaattctggccagccaccttgtcaatccttggagagagtaaaaaggtatagtggattttagttcctcatcaaacatgcttttctctgttctgaaggactccattttacatgagcagtgctcatgttaatgccagttatccccagcaggctgggtcctctgagatgttcatgttcttgttacagaagacgcctctcttctgacactcattctccttatgcaggtgttgtcaaccacaaaggatgcttgctttgcatctgcagtagaatgcctgcagcagatcaggtaatgcctcatgttgttgaacagtcagacaaatcaaagtagtggctcctgtcctgggagagtagaaagactacaatggtccccacccccttcctctccattttttttttcctcgatggtatcttgctattttattctccttcctactcctaaatgttgtcagtataaatggaaagatcagaaagtctctttgcaaacatctgggctcttttactctaatatgctcttgtgttttccaaggagtagacagcctgcctggagatttatctgtgtgctcctatcattagccaacttttcattcagaaacggaattccagtgggtcaaagaaaacattccgtgtgggtcctcccaccataatctcttttctgacttcttttcccaaacattgtaggattccaggccatccctccacattctggctgcctagtgtgtctaattgaggcatgtgacctggagggatttttttttttaaatgaataagagatggctttattaggaaaatcataggatatcttttacactttgttttcacaacagcacaacatttactccatcagacaagcttaaagtgatccagcagacctttgaagagatctcccagagtgtccttgcatcgctgcaggaggacttcctctggtccatggatgacttgttccccgtcttcttatacgtggtgctgcgggccaggtatccagtttttcctgacatcgttgggtttaccaagtctgcttgtcttgaattgatgctgctcctgtcagaatagaatgtcacttgggttaagctgttgtgtgtctgtgtcatcagttgattctaaaggagggccacttagagacagcatggacttcccgtccatctctttgtctgacacaggattcggaacttgggctctgaagttcacctcattgaggatctgatggacccctttctccagcatggggaacaaggcatcatgttcaccaccttgaaggtgagtgcctccctgaacagttctcagtaagtccgtccttctttccttccttccttccttccttccttccttccttccttccttccttccttccttcccacagtgtaaaccacgtggtaactgcttttctttctgtccgtgctgctttcgttctctttggtggagggatggtttatttccaagctggcctgcaattcttagtcaccttcctgccagtgcttcccaagggctgcagctgcaagtgtgagctgccatgtctcacctactttcttctttgaggaaaaattcagtgtagactttttttttcttttattaaaaagacctttcatacggtatattccgattatggtctcccctgccgccattctttccagtttccatccagatccacatgttttctgtctcttgctaaaaatcaagcaggcattgttgggttctgggtggaagccaagaaaactcactttggaagcttaaaaaagaaaggttcactttctgagcgagcgctcagggaggcggtcagttctggatctgaacctcgttcccgaagggagagtgtacaatgtttttaaaggatgggaacacaaagcaaaggggagctgcagggtcatccgattgtatttgggcagtatgggctaagcaagggagtacccattgaagatttggctgtatccagggtacctggcttcaaggttcctaattcattcttgtagactttaggtccagagctcacagtgataagggtacaaaggagtgggtcagctgtatgtagttacttagggcataacaggcaattggttatgtacttttataacttacacaccttgatttagataacagcaatttctgtattctgcactgggctttgttcccatctgctgcaggaggaagcttttctgatgatggctgagcaaggcacagatctatgaatatagcagcatgtcactgagagcattttattgctatgatccttcagccaaactgttgtattttgttttcctctaggtccttggcctgtctaggcgcagattctcagccacccaaacagcattgtatatggactccatttcatggagtggccttaattcagctcagatagtggctggtcactcccacaagccgtgtgccaccattgcaccagcatgtcttacagacagggtttgcagggttgctgtttgcctgtctcctttggtagtgtgcagagcaccttctagtacccagtcagtggggtgaaggctctaggcaggcacggctcaacctctccatgttcactgagttgtataggtgttgtcagcagtaggctcttaccatcaggttgtgaagagctctcaggagccttggcaataacctgaggtttgttttgttttgtttttgggggaggtgcttcccatggggcacctttggccaagagctcagttaaatgtaacccatttctgatattggaagcttcacttggtgacaagaaatgtccatttggggttctgtctcccctgttatttggagatttcatttaaattgccttcctgtatgtatgtatgtccatgggacaaatggcccttagttttagctgtccttcctgtacccctctttcagtcccttccacccctacctgtgtgatcctcccactccaacccccgctcccatctataaccatctgttctattctcccttccagggagatccatccctaccctcgtccctctgtgcttatctgtggataagtatcttgcttatcaatgacttaatagctaacatctacatagaagcaaatacatatcatattttttgggggggtctgagttgtctttcagtatagactgaatacctttagaatatatgttgttggttctaaaagcacgataatgtattaaattagaataaatcagacctatactgccaggcaataaaatcttataaaaacacaggttttaatatgaagtcgtgtgttatagtcacatgagtaggcagtccctaatggtaaggataatgctcatattagcaatacagtactgtaatttccatatcataaaaggaaactaaaattgggaatacaaattatttaataaatgtttaagaaaaggtactgtggttttagcagtttgggaggtaggctgaggtagagaagtgtaggtgctttggggtttgtagagcaaaggaagacgggtctgtgaaacccttaggactgaacatcaggttcctggcccaagttaactttttaacattaatgtttctgtgtataaactgagaaagagaaataaagagcaagctgtagtgacatgtctacagattcttcatagtcctgctgggaagccttcgttcccagggaacattagtgaatgtccataaggacatgctcaggctcacttaaagccatagaaggccagactgaagcgtgtgcctaaaacaccagcagaagtgttccggttctacccagtgctggtgggtttatagtgaggcccctttcccacattgctggtaacagggcagcgagcagttaggctgctctctaagaacagttactagagactgtcatggccaagcgctggtgtgtttgactcaggatcccactccctgggatttctcctaagaagtcaagagtggaaattgtgcaccactctggtgtgtgagtcctaagcacacaagcactttgggatcactgcttctcagaaattcagtcttggaaactctgacttgctgtgtggtgtgtggggctgctcagccttcgagtagtaaatgtggacgagctctgctcacattgtcccgtgtaccctcacacttcccagtcaccagtgaatagtctcatgttaatcagtaaagaccggtacacagaggaaatagagggcaagtgtttgttgttgttaattccgattaggctacagtagccattggctggagagagcttggtgaggtagacaatgtgccttcagtaagggattgttttttcccaagtcttaaagaaactgaatctgaatttgtttggattttcaggcctgttacttccagattcagcgggagaagcttaactagggcgcctgacagcttgaggaccggattatctgctgcggaggctacagctatggcacaggcaccgactggaggctgatggggcaaagaacagtgttgaatacagaatggacttttgtgctgttttggttgtaatttctgagccttactaataattagagcccagcatggaaaacatactgtatcattcaaatggagactggaaaaggagatagggatagagtagagtctttggcctgtgctgagatccacacacctacttagaaaaggaaactggttaccctttcctgtagtgaaagctctcagctccatgcagttccaggaaacctttccaggaaagctgcttagatgaaaagaagttgatgactgtgtttaagctcctggtttgtctaattccatttgcagttacccaataccctttggcaaggagcaggttttacttgaactgaagcagccatcccttgccttcctagacctctcccaggcacaagtgcagcatgctactttgctaggggtgggggtgggggagaagaagttttaaactgtagttttaaccttttgtaagcccctttaccaaggcatttgtggtcagagagctcccacggggtgactatgacatcctggtcccctcgtggaatgcatccacataggatcttctgcctgctgactgaaaagaacataggaatacactggagtgcaaacactgccgtgccaagctgctccaaacctcactgatccgaggcccactgcctacccaggaggcccgtaagcttcttagcacaagctttgtgtggagactgaagatctgcacatgtgaggaagcagggagctacagtggccctcagcccagtctgcgggtcttccctctacctcacactgaactcagaagggaaggaaggagagacgcacatgggattctcccacctcagaagtattgtgacagcaccgcataaccacggtttgctcttttacaagcagcctcacaagtgtgggttgtgggtgtgcgctggagcagtgccactcgtagctgtttggataccacaggtgctcttctgtctcatctgctgtactcggaggcgagcgcagtggcctgactcatgggaaatgactcagcaggcggcaactacttttgaaaaggatcatgatttccgagctactttataatcaagacaagcatttgttaacatactgttttggaatgttggctgtaatgtaacagcagttttcataataaatgacattcatctctacgaagctgttctatgactgtggaagaaatgacatggggcagactgtactttaaagagtgctcagtttacagtattctttctccacattgtaatccatgcctcagacctcaggaacccctggggtttttaattcacttaactactagccaatttctggcaaagagcaagttaattctgatcccgataacccagagacaaaggtctccaaggaaaactgctgctgtgagtaagacagttgtgggctttgtttttgtttagggaagggctagaggaacaggtttaggaggatagcactgtccgcatctctccgcctaccgtcttctgccaggccgagctgctccctgtggagagggaccaactctttctcatttcgcatatttttagtttgtgagccaagacacaaatgccagatttggctagtaaagccaaagtaattgaacacctacctccttcagagaaagatcaggaggggctaatagtgggaatggatggaaacttggacaataggaccagagaaattctcaaatggcagcatgccatctcacatctctgagaacccgttgcaattcaatcttctaatttcagttttaagagaagctgcctaaccactgtattttcctcattctacacagttcttgagttgcagcttaaaacaataaattttcatgtgtgtgtggaaaaccctaaatctccaggcactgtctgtgactagaaataccagcacctatgtaactcacagcagccctcagcagtgccagtctgggggctccctttccctatcggtgaatagctatagtttgctgtgtctgcgctgggactccaacccagagcttcccgactttcctctactctttcccactgcctatgccccgcagatgtgttctgcattaggccttgaaaagctgaagttaagaaaagtaaaagcctctggtgggtgtagtggcacacctttgtagtctgagcccttgagggtggaggaagttcagttatccttggttatacacacagtttgaggctaccggggctacataagactctgtctcaaaaaaaaaaaacaaactaaaagtaggaaagatttgaaggggggcgattggtgtttgttatctggaaacagtcaacagaaatattaagggcttgtatgggagtgtagtactcatgtgagagaaagctcactgtggtggaggataatgtaaatgagatgttcccttgcagggacagctagggctgctgcggaggcttagaagaggtccagggttagcctgcaagggcaggattatgccaaagaggatgcacagagcttttctctagagcatcaggtgactggcagctagcagcctcctggtgcttcctgcttgcttctctcttgccaggagcaacactgtgttttcatccttgcaggtaagagtctgctcgcaatgccgcatttccagaaggcaccagcagcagctacagataatcgtgggtagtctgtgttaaagtggttgactgtcctacagtaccatctcttaagcgtggcacagtgcgttgtcaaagagttcaagtgaaactgtcccatcttctgtgagggccttggatgcagaggaagccagcaggccatttctcagggagggttgcatatgggctttttcaagatttccatattgaaaaatactttagaaaacaagcctagtgggtaagaggtcaggactttgaatagcaattgttttaaagcagaaggaaatgctttaaatgttttaattataatgtttaattacaatttaattgtgtgtgtgtgtacgcttgtgtgcaagtgtgcgcgcatgcgtttgtggaagccctggtgcttgtggaggtcagagaacaactgaaaacagctccctcctaccatgtgggttcaaagtcatcagacttggcagcgaatgcatttcctgctgagctaccccagagacccaaagctgaattttaaggtaatgctgcgtacattccaggtattcatggtgaccacttgctttataacacagtttttaattgccttttcttattccctacctctttaccctataaatcacctgtctagaatccttcattctggcgcaattcaaaccaaggcacttaaacacataaggttattatttaaatccacatagtgccccaccagtaataaaaaggataaggtaaagaaagatatagcttagctggtagaatgcttgtgtggcatatgtgaagtccagggttcagttcccagcaccacataaaccatttgtggtcacacatgcctgtcacacaaccccagcccttgggaggtggagaccggaggatgagagcatctggtgatccttgactagagagaaagtctgaggccagcatggactacatgggactctgtcaccaaacaaacaggaaaccaaccaaaagcaagatagctgaaaacagctccctcctaccatgtggatactgtgtatttaagcgtgtgagtgtggatagatagcacagaagcacacatgtgagcctacacaaaaccctgaaaggatgtagcaactttgaatgcaggagtaaatagactccaggagtgctgtgctgtagtggtttcctgagtcacaagcaggattagcgctgatagaatgattttctgatttggtagactacttggtaaggtttaatgtgcaatgtgttaattcttcaattatgatggtagcgtttcttcaaatttattggtttcttgcaaactattttgtgtttgtaagaagaaactttgtttgtttgtttgtttttgtgttttttaagacagggtttctctgtgtagccccagctgtcctgtaactcgctctgtagactagtctggtcttaaactcacagaatcacctgcctctgcttcctgagtgctggaattaaaggcgtgcgccaccactgcttgaaaagttgagttatacattcaggtcattctggggttgatttatgtttgtttcttcagtgacatgaagttagacacttgcacattctgcagggacagtgattatctatcacatagaacaagttctaagcctttccctgagacccctaccttccctttgcccttgcctccttcgccctgtcctcatcctgccggctgaggtataaacatgacagctggaaatgcaccatcttggagcagatagatgagtgctatgtgcaccccagggctgggccagggtgctggtgagcctttcacatgaggctgacccaagtctggatggtctctgcctcaacactgtcaaacaggcaatgcagaaacttctattccaccaggccactcattttggatttcattttgtgagagtaaataaatctagagcagtgtttttatttttatttttttaattaagtagtttaaattgtttgctatagatgagtattgaaattgatagggtaagatacaatgagctacctaccatgtgtttcaatctatgcaaaatgtccgagagactgtcatctaggatttagacaggttgtaaggtggagcagaaaggctgtgtggggaaaaatagccagatcactgttacattgtctccaggttagaagactatgccaggacagtaaactgtcacagagttcatccaggacagtatactacctgtgtcacagagttccatacagtcgcctaacaggaattgtgcaactgatcagcaagctccatgaagaaccacaaagtgccatatgcagaatggagcatcagggtgtgttcaggccagggaggccctctgagccctcaccagtgtgtaattcacccaggcaaacagatggaaagcaggtagataaaacaggacatgtccgttattgtaagagatggatggcctgctgagatggctctgtgtaaaggcacttgcccgcaaggctgacaacctgagactggtccctctgacccacatggtggaggaggagaactgattcctgcaacctatcctctgacctctaagctaaaatgaattatacacatgtgagtgtatgactgtgtatgtaaacaatttaaaacaatgtattatagacgaaaggtggggtagggggatgtttgtgggagaatagttttctctttcacacagctaggaacagctgatttggagaggaatatcataggacaaggctgttgtacctgatgcacatcctagtgtgtgtgccctagtgctaggcttgcagaatattgttgaaaatatgctccagggtgctgagcaccggctgcggtggctgagtgacaatacgccgtctgtcgatcttcgtcttattcctgacttcctttccaagctccagcagggaggatgagacagtctgacagaggagcagagctgaccaatgaggacagagctcttcccacgccacctgatcctgagaatggtatgtgtctccagagttccttcctaggccagaagagatggttggtaatatctgagtatgtgatcaagcacacagggtggcttgccttcatcctcacagggagcttctgcacctttgtccactagagccagtgttgatagttctgcaagccactgtcagtgcaaggaagacattgccaccaaagggtcagagccccaccaggccacactggtttatagaaaactcagaactgcacaacttgttcgcatccaaagtaacagttaaaagagatttttttttttaataatgaaaaaggcaatgatttactctacatgatgttcctttacttggtaaacgattgatagttatatcaggaaatttaatgaaggaatgaatggcagaaggttcattgagtgaggatgctagtgacctgagtcagaaggcgagaatcaactccctcaaactgtcctctgacctccacatgctagctaagtaagtaaaagtaagtaaaatctaatgggagggccggccagatggctcactgggcaaagactcttgctgccaagacttacaacatgagctctctctccctgggatccacagggccaaaggtgagatctaactcctacaagttgtcctctgaccttcacccaattgctgtggcatgcgtgcccccgtcccacacaaataatgcaatgtaactttaaatttttaaagtctaatgggggaggtttgcagtaacactttcaataaatgattttagaaagaatgaacaaaaccaactgtgtttgacttggagaaggaaggtcctggaaacacctgcatggtttagagacaagttcccgcctggtaaggaggaaatggagaaccattgtgttattctcagtgtctcatgttaggcacagttccaagagggtgttagcttatgtgcagtttacaaaagaaaaattttcacagtttgttacataaatgataggacagggcatggagccttaagccctgtgttgtccccttgtacagagtacctggcaaactcagcagtcacagaagccccggtcacaacatcttccttgctgcccttacccgccagctgccctctgaccttttctaggtctctctgggatcctgaggctcctactgcaggaactgagccttttctacagccgagatgtgaatggtctgtgtctcttatatgacctcctccattcaccatggctgcaggctctgctcaaggtgagtgcttaaagcctttctttgctctggctagcaaaagcccgtgtattagaccatccaggttgctgtaaagctatgctaaaaaagtgttggtttatttatttgctttttaaaataaaactgcttctttatttttgcatacttttaatttgagaaaaaaacctcgataaaaccccaattcaacacatctaaccttactgtcaggtagaggaggatttcctgtcttactataaaagaacagggaagaagaaaacagaagcagagagccaggtggatcaaggcaagtcatggctgcttgaggagccataggaaaaactgcataggtcacagggtttccaggggcaactctaaactgcttgcacgtgagatgcgttctcagcatcatcaggaacaggaatggctggactcctccactatcacccatcatcatcagtgcccaggcccactgtgatcatgggtggggtggatctcaggttcctcaggagagaagccaggaaagaagagtgcagctttaacagcattgcctccacatccttgacaaccttgcttctgccagtcccagccatttgctgcagggtcaccataactgggtggtcagggttgatttccaagtgctgtttgaccatgacatagcccccgatagagttgtctcatagtgcctgggcctctgtgaactgctctgtgtttgctgtctagctactgtgctcatcacagggtagcaaggtgaggatacatgcctattggagattgtcatcttctccatcttctccttcatgatctttcagagattctcaaaacttgagtcactgccctccatttttcttactggtggcaccagaacgcctttggatgtttaagagtccaggctcttcccatcaacaacttgagctgccaaacttgtcaagaggctcaaagacctcttccccacatcctcaactcaacctgaaggtggagttggcctctcattctttgctctcaccagtgatgcagtaggcaaactgctgtgtttcctcatagcatacatacactctgtctcttctccaggctgagagggtatggcagcacagtagctcagagaagcatcgctggtgggtggaactttcatggactccaagctttagattcttagagaatacccataaaacttcttgtagttttcttccagcttcaagacctggatgactttgaagagtttgctctgctggagcagtttttggagatgttaaagggtggggcttcagaatcaaccatgccacagatgaagctgagatactttggtatcacctcatcacggctgtcgcacatgaacacacaagggcataggttgatgtcattccttttgttctcaaagaggtcaaagggagctagccaatggataaataacaatgccctggattccaactagccttctacacaaaagcgcttggctgctaagtgtcttctcagtcattgttgaggctcttaaagaatcttcatattcctcctgagtgacatcatcactgtttctggtctaagcagacttggctttgttcagttcttctgatcaatgtatttgtcctcagtcttctttttatctttgccagtgacacactcgtcacctgatccggaatcttcaagcttaggtcttttctcatcgtccttacctttctctcctttctctttctcagcctcatcatcactgatccccttctccagagagtaatggggtggcccaacactgcacgtgctccttcaccagcacttgactcttctctgttctgtctgggatcacttttggtggtacagcgagctctgtaaagtgcctgcctgacatgcacagagccctgggatagaccccatcactgtaaaacaggggtgctagttattgttctattgctgtgaagagacaccatgataaaggcaactcttacaaagcagcaaacgggccgcttgcttatggttttagagggtgagtccgggattttcatgatgggacacaataactatgccactgaggcaggagctgagagttttatatcctgatcttaaggcagatggcagagagggagacactgggcataccatgggattttgaaacctcaaagcccacccctgtaacacatctcctccaacaaggtcacacccactccaacaaagttacattttctaacccttcccaaacaataccactccctagtgactaaattttaaacatgaacctataaaattcattctcattcaaaacacttactggtaagatggtgcagacctttaatcccagcaattaggagatagaggcaagataatcagaagttcaaagtcatttatgactacaaggtcaatttgaagacatcctggatgtcttcaatgagaccctgtctccaaaaagtgaggagaaaagatacacaaacatacacacacaagaggggggagacagacacacatacacaaagagacagacaggcacacatacatccagagagacagacatagacatgcccctgtttgctttggaagcatttaggaatgaaaaactatgtctgctcttttctttactgtctccaacttcttttggaaattcctgtgatcacaaatcagttatcacaatggccacattatactctcattataaatgatcaacaggttcttttgcttagtgttccctatagctgtcaatcagcatagatcacttctacatacctgagtaccggccctacagaagagcagaaagctcactcatcacagatatggataggaaagggtaaactgcctcttggacctcctttctccacctgtaagagaaatctgattccccaaataagatgacggacagcactgtgaagcccagcaagcattgcttacttagcctgacctcatcctgtacagaaatgccacggaccgccccagtcgggtatgggggtccctgggatgaggttcctcgaaagttaggttggtaaaaatttggcagtgacaaacagaaacaaacacagaggcagtttgaatctgagtgtattttgcaactctcaagcatgggtttttatgcattaaaaaaacccaaatatttctggagtccaccttcttgagttctttatatatattggatattagtcccctatctgatttaggatagataaagatcctttcccaatctgttggtggtctttttgtcttgttgacggtgtcttttgccttacagaagctttgcaactttatgaggtcccatttatcgattctcgatcttacagcacaagccattgctgttctattcagaaacttttcccctgtacccatatcttcgaggcttttccctactttctcctctataagtttcagtgtctctggttttatgtggagttccttaatccacttagatttgaccttagtacaaggagataggaatggatcaattcgcattcttctacatgataaccgccagttgtgccagcaccatttgttgaaaatgctgtcttttttccactggatggttttagctcccatgtcaaagatcaaatgaccataggtgtgtgggttcatctctgggtcttcaattctgttccattggtctacttgtctgtcactataccagtaccatgcagtttttatcacaattgctctgtagtacagctttaggtcaggcatggtgattccaccagaggttcttttatccttgagaagagtttttgctatcctaggtttttttgttattccagatgaatctgccgattgccctttctaattcgttgaagaattgagttggaattttgatggggattgcattgaatctgtagattgcttttggcaagatagccatttttactatattgatcctgccaatccatgagcatgggagatcatttggtgaaaggacccagatattgtgagactatgctggggcctagcaaacacagaagtggatgctcacagtcggctattggatggatcacagggcccccaatggaggagctagagaaagtacccaacgagctaaagggatctgcaaccctataggtggaacaacattatgaactaaccagtaccccagagctcttgactagctgcataagtatcaaaagatggcctagttggccatcactggaaagagaggcccattggacttacaaactttatatgccccagtacaggggaacgccagggccaaaaagtgggagtgggtgggtaggggagtgggggggagggtatgggggacttttggaatagcattggaaatgtaaatgaggaaaatacctaataaaaatttttaaaaaaaccaaatattacaactcttagaagatgtgttcagtgaagcaattacaactaccatcattatcatttggcacagtaaagcacaaaaatcaagcaaacattataactttgaaaagatatattcagtgaatcacaaatagaacagatactatcatgatagaaatagaaatagaaatagaaatagaaatagaaatagaaatagaaatcctccaagtgtaacaactctgaaaagatataatcagtggtgcagtcatccaaggctagtggcatatttccaagagcaggttaataaatctttatggtcaattattgtttaacatttaatgcctgatttttttttaataaatcttcaacacatacatttaaactattttaattctttttttttttaaggctttctttaccacataccaaagcccacctctgatgacacacgtgtagccatatgaaagtgtattgctgggaaagtttttatctatcatattactattatataatttggtaaatgatttataaagtaaagcattggtttccccagagataaggtcatgttagtgaccccatctcaagggatggcttcttacccattattcttgcttaagatcgatctcagcctaggctaccaggaacatgtaaataagaaaaggaataagagaaaatagaacagataaattgccatgagaactacggctcaataatttgctctggccaagagctccacaactggttccaggaggcctccttcttttgaagtttttgcctcagtctgtgaaacgtgttacacagattctactggggttggtgtggcactgaaaagatccccagggatcaggagggatgaagccggaatttgcacaagtgaattccctctggagaattgcctgaggaaggagaactaagcaacttcaaagaacagagcacagtgtggatgagcgccttttgaatatctggcttcctattcaggacccttggtgggtcatgagccacacagttcactccctgcatggttgtccagcacagaggtcctaaggggtctctactccatagaccctcccttgagaagccctcatatacactgtgtatagatccctgctgaggtcagtcccagaaatctttcctttatttccctcgctgtaaaaagaagaaaatttgcatacttttcattaatgagattgttctaggactgtccattttctggtagcagccagaagtaacacttctggagccctgggcccgccagtggggaggacacttcactcagcctagagtcacatagtgtcacttgtttggctgtcagcatggctgccttaggctgtttcttcctttgagagcttttactttaaaatgttcctggccacatcctccatatcatttgccctttttaccctcctgcaggtctacgactgcctccagaggtttaaagagaagaagctagttcctgatacaactcatgcacagatcttagcctgtgaggtaaggaggttctctccagaagagccagagagcccttgctgatatcctctgacctgtaaggtttgtgtaaatgaatggaagtttctgttgggaaaacttagtcactgagtatgcattctaataaaagctatctctttttttttaacatttgtttatttattttatgtatatgagtacattatagctgtttcagacacaccagaagagggcatcagatctcattacagatgtttatgctacaacgtggttactgggatttgaactcaggaagagcagtcagtgttcttaactgctgagccatctctccagcccttaataagagctcttaattgaacttaatgtaaagaaacttgtcttccaaaattaacacacacacacacacacacacacacacacacacactttcaccacatggccgtctctccctttgcatttaactgaccttaggtaaacacggtgactctgcggtaatgattctccagttcctaacgtagattctgtttggattccagtctctgctagccagctgccttctcttcctcatcctcctcaaatttggatgggcacctcacacaaagcatgccttcaacatgcccctttaactcactcctctcttagcctttcctgtctcagttaatgacaggtcagggcccttgttacaaagactgttaaggtgtacatctacccaccaggccctgtatctggagacagaaaaggaaactacagcacgttagaacatctacttttcaacctgtgtggcactgactatgggaggccagctggatttacatagcgggcagctgtgagccacataagtgggtactaggaacaggatgtgggtcctctgcaagggcagcaggtactcataaccctgagccacctccccagccccagacgatgaaaattttaagtattttatttcactttggttttttggaaacagggtctccccctgcaggccagagtggtctgtaactcactttgtagctaagctagcctcaaacttgttgatccccacatgttcagtctctcaagagctagaattataggcatgagccacatggcttaaaaatattttatgctgtatatttttccatcgtgcgtcaggtcttggagctgttacccaaagcttccggttcccccgagatccaagagctaagacaagtccttcaggctcctcactgcaaggtaagcacttgctaaaatagaccaagttttatcagagacagagttaggaagaataaataaaagtgatagaaaacattgactctggatctaaactctgcttctgtacatgaacagccagcaggtgttactcgcagatgtggggctcccctgtcattgatccctgagcagatgctaccatatgtacacggaggcacccagaacttcccagggagccttattctcttaaaaagagaccatcccgctaggattcaggtagcatccagggcagcatctggtttcagataaataatctctatactttctctcacgtagggaaggttttgaactttgaacacagtgtatgaaataacttgggatatacattcatttgtatatctgtgtatgtgcccacttgtgtacagatgtctgcagaggtcagaggaaggcattggatcccctggaactggactcacagggaactctaagccgcttgatgcgggtgctaggaacagaatccagggccgctggatgctgagtagccagatcttctataatctcttaagctctgagccatctctccagcccctaaaagagattgctgtacactttttagtctctatattccacctatattttaacctctatgtttctttgtctataaaaagaagggggggggcaatgacaatccctatctcttaaagtgactgttactgaatttgcttagagctgtgcctgacctgtgtttgtggttatgtgtcttatacagtttcgagccaccatctttgagatgcacatgcgccgcacgcgacatttgcttaccttctctcttctgtccctaggccttgctgagtgcccatgacacagtggctcagaaagactttgaaccccttctccccccactgccagacaatatccccgacagtgaagaagcaatgaggattgtttgtctggtgaaaaaccaacagcccctggtgaggaaatccttccatcttttgtttacggttatgctggggttcgttgggatgtaagttagagctaatgggtacttgaatggcaatttcgtctcagtcacacagagagtgggatggcagcatgacagccggtgtaactttgcctgtggttcaaattcactcagctcatcatgcaaatagatgcaaaggcttctattgagtgtctttcttttctgagaaaacaagatataaactcttttttggtgaaaatgcgactatctatctatctatctatctatctatctaactatctatattacatatgttagttgtcctttatgtatcttacatcttactcaattctgatacactggcctacgttcttctcttccactaatagaaggctggtaagaattcattggtgctctattgtgttctctctccagggagcaaccatcaagcgtcatgagataacaggggatatcctggtggccagggtcatccatggcgggctggtggagaggagcggtgagctggggtagcaaggtgtaagcgagacaggaaacacagagtctacagcttttcttccaggagcagagacattcctttctccacttaggtcagggccttcaggtgctcctgctcaaataaagcagtaaagaaacaagaaaagttgtttcaagggatgccagcaccctcagccagagaggccctacatgctaggctcagtgaggatgcattcttgttagcatcctcaaggttgccaaacaaagcaagcgttgtcatggcgttttacagtggaaggacccagcctcttctgcttctgaaatggcagaatgagcaacttctcctttgtgctttccaccccacacgcacatctcccttttgcccctgtgcttccacacctgcctcgtgcccctgctccctacagcctcctggcatctgcatgtggcaccctgacacccactggaaaagcctgtggcgtccctcactgtcaatcccccaggccttctttcctctttgtgtctttgtctcttccctgattggtcatcctcctccttgattttcccccacatgttcatcctgctgttgtctcaggcctctgaatcctcccatctctcctttatttctcaaggctttttaagacatcaacacacagtaatcatgcacattaaccagcttcagtgtgaagaaacaattcatgtctacaacatgtagtgatagatcaagatatttgctcttctttcttttttaaattgacaatatttttcccatgcactgtattcagatcacagtccctccccacagtctcctcccagatcctccccacctctgcacccatccagcaccatgcctttttatctctttctttaggaaacaaacaggcaagtaaagaaattaaaccagaataaatttagaaaaaagaaagaaaaggaaaagcataagaaacataaacaaaactcataaaacacaagactggagtgtagtagtgagtttggctcttgatttgtgctcctggaggatcttgtttccagccacccacccagggaatctttggatctgcgagtgaaagacacacacacacacacacaccttcacttatttttgaaatgccttggctacctcaaaggctgggcactcctaaaccttcccctgctaccctaggcccaatctgggacatggccagtagccacccacccgcattcttatgtggtttgttggcactctctcctgcagctctaaatctcttctgtctcccaccgcatcctggtgatcctctgtctcctccccctgcatcctagcctgtgcaacctgagtgtcccatcctgtctccctttgcccagtcattggccactggcatctttattaatcaatcaaaaaccaattggggacaaggacctttagagtctggacacacaggttcccaattgaatcaaagcttttgaaccaatctccaacatctcaccttttctatccaaattaaaacaaaacaacacaacaacagcaaaaccttttctctcagacataagttgagtacaaccacaacaattatgtaaatcacagagtataacatacaattaacatctagtctatcctatttgataaagagtagataaagtactctactatcattcctaacttagagagtttatgattctatatctgaattctgtttgattttagcctgtaataccatctgaaaaccatgctttcaactctatacagtatctttcaatgctaaacagcttaagtttgcttatgagactgtaagtacttttcaatcccgtcaaaaatctgagaatgaattaaatattacctgagtatacataaaacaccaaccatagctcctaaaacttaaaacaattgtagagacagctgactacctggctagcctctattccttctaatactggggcatctgtcctcaggcttctgccccagacatctttagagttcttgccaggattttggttccattttacaacatcagagtagcaaaacaaacaaatcactcttggtgttggtaaagaggtagaaaatgcagtgctcacagacagttatggtggtataagttggggcaaacaggtttttttttttttttaatttaaaattttcacacatgcttgggctcatgtttggggtcattggaagagtggcctctgtgttctttctttggacccttcctctggttgtgttcttgttccatagggttgctgtatgctggagacaaactggtggaagtgaatggagtttcagtagagggcctggaccctgagcaagtgatccatattttggtaactgtcttacgcctgccttttgttagtgattaggtggcatgccgtgccccgtggggtgtgtgctgtcacgtgacggtgttcaagtgtacccccccccccccagcagcttttcatctccagccccagactttgtttgctgccatggaacccaggagttctggcccaggcatctccttgaggatcattagttccccctgcacacgcacacgcacttgcacacacacacacacacacacacacacatgcacatacacacacacgaacacgcccctcatcacctgtgcttcgtggaaaaccgagcttgccactcttcctctttgccgtcctccaggctatgtcttgtggtacgatcatgttcaaggtgattccggtctctgccccgcctgtgagcagccagaagatggtaagaacacacagcaatagtatggtgtataacaatcctagctactattctgttttagacaagggttcagtattccggctgtttcacagtgctgatgatctgaaatggagagtgggtaaaggaacacaacaaagggagtggggccaccatgcaattaagatgctgcatcaagaatagtgagcatctggacaaaaatatttctaaactaaatggttctgttctacaacacattgtaaaattctgtgataatgggtttcattatgacattttcatacacacatatgtataatgtactttgatcatattcaatccatctcattattctctcatgttctactacctttcatcttctttacctttccaactatccccatttctgcttttacatgtgtgtttatgcatgcacacatgtgcatgactgtgggtgtgtacgttcatgcgtgtgtgtgcattcaattgtatgtgtgtgtgcgtgtgtgtgtgtgtgcatgtaagtgtatgtgtgtatgttgtatgtgtgtgcatgtgtctgtatgaatgggatttatcagtgttattaacaggaacactgaggcaaatgcctcaatcttctcatcaaccactgactgtttttaaatcctgagcggggaggaatgaggcctccatgagccctcacagggtgctgacctgcacagtcatgtaggtgatcatggctgtgagtcaagtgcaactgttacatcatgcctataagtcagggtccacactacccctcctacttctgcctgctcctacattacctctgcctcttcctcgacagtgttctctgagcgttggagaggctaacacgggtgtcccatttatggctagccattcaataatcacctcttcccagtactctgactacatcagagtctgcagtaactgctggccagtgcaaagagaaactcctaaggtcagagctgacagcatcactagtccacgggtattgggaaagcgatttgacagacacatcatacccatttagcaaaacatcctcagtagcttcccactagggcctctgatctcctcagccacaggcctttccactgtgtctgcagtattgaatgtgaactctctcttgagcatcacatcccactggaaagtggttggttacggccataacggacttgccactgttgctccgactttgcttggctggtaggtattactacatgtaagtaaagccgttgatgacaagtcttccccagcagccttcttagcaccttctagtgctagccagtagggaggaagcttccggactagttccagcctgatttctctaagccccatgacagagatgccaacggcaaccatccccctccagcattcagtttagaagaacaactctcttttctggtaagggtagaaaacaaagatgagagcaacaggcagaggagtgaggacaatggttttaagttgtggtggttctggacaagcgttcttctgagagcgccgatgtgaactcgctgccaggtttatgttcgcgccatgattgattactggccccaagaggatcccgacatcccctgcatggatgctgggctgcctttcctgaaaggggacattctacagattgtggaccagaatgatgccctctggtggcaggcccggaaaatctcagacctcaccatctgtgctgggctaatcccttctaaccaccttctgaagaggtaaggccggccacttttggggtaacagggtgattactaggcaatgcttgggacatcacgtttctgagtatgtggtaaagatacaagcagatggaagaacataaacaaagtgtcaacttactgatagactttcagcttcttaaacactaaggggaccaggatggttatatcagctaggtagaaaagtgcttatgagactaaattaaacttaaatatttctatggtctgaatatgttgacccagccccccagtgaaatgtaacccccagagcaatagtattaaaaggcctttaggagttgatgaggtcttgaagatccatggattacagcatcagcagcttattggtattgtgaagagggaggtaatggcagaaaacggagaagtaagaaattgaaatcctggaaagactgcagcagttggcagtgttcatggccctggatgtggcagtgggacgggtggcagaggaaggatcaatcaaagtctgctgaataagagatggaagtgttagaagggacatttgcctgtgcttaataaaaccatccagaattacagccagggttgcttagagcacgggaactgccatgaaaaatggggatcaacatcccaagtggggggctcttaaaggaaaggaagggtgtcctggaaatactggagtgggggacccaggacagtcacagccccaggctcagtggatagagccacccgtggtgtgctggagccaaatgacaaagtcccatctttgagtctcttctcaaatgcactccgtcagtgccacaaccccgagagagcccacactgtaagcatcagccaatctttgctttctttctgcctaggaagcagcgggagttctggtggtctcagccgtaccaacctcacacctgcctcaaatccacccgaggtgaatgttcgtatgtgaatgtgtgcagagaccacgaactcagcatgcacatttgagaatggtgcttccatctctcaggctagcatcctgccagagaaaggattagcaattctactgctgtgaaaaacaacgtgaccaaaagcaactccacaaggagagggctggttttgcttatactaccacatcatggtctgtcatggaaggaagtcagacaggaacctgggggcaggtggggaagcataggaggaaggctgtgtgctggttggcaccttatggcttgttcagtgtgctttcttatacactcccggagcaccagtctagggatggtactacccacagtgagctgggccctcctgcatcagtcctcaatcatgccaatctgatggaggcattttctcaagtaaacgttcctcttttcagatatatttaggtttgtgtcaagttgacaggaaccaaccagcacagaagttaaacatgtccgtgggtttaagtcattaccctcccaaattcaagttctccaagacatcccccaccctccccagaagctcttgtgtgtcatacctggacagatgtctgtggctgtacagttacataatcttcatttatgtcctttcttttttaatgttaagatttatttatttatttatttatttatttatttatgatattttgtgtgttttggggggtggattttgcctgcatgtctgtgtactatatgcttgcagtaccccaggaggccagaagggggtgtaagaacccatgggacagtagataaagtgccagaagagcagctagtgcccttagttaccagagccatctctctagccactacttgttttctctttcttttccttttccttttcctctctttctctttttctttctctttctcttttcttcctctttttctctttctttttctttttctttttctttctcttttttctttttctttctctttttctttctctttctcttttttctttttctctttctctttttctttttctttttctttttctttttcttttctctcctctccttccctctctgtacctttctctctcctctctctctctctctctctctctctcctagagattgaaccaagagcttggtgcatgctaagaaagcactctcctactgggctttatccttagattcagtcctgggcttttttgactaaatatgagactgctatcatttaaggaatcattatacagtgttcttcaaacagtaggaaaggagtggtcaggaagggatccatggcctttggtgtttgtgagctacttaaggcttaacaaagctgctgacactggcagatagcagccaaaggagaatggcagacaacagaagcaagctggagcctgctgagtggtcccttcagaaatggcccccttcaggccctgtaggggctaaggcaggggagaggggacatatggagacagacagggtacagaggagactcggtgtagaccacagacagcaacaccaacatcacagatctgcaaatggcacatgctcctgtttacttttttttccaagccagagattgctttccttaatgaccacaaatagtttttgttgctgttgtttgtttgctctttgtttttggcagtgtctcgtgtagggcaagctggtctggcagctgaaggtgactttacctcctgaccccctgcctccacttcctgagtgttgggttataccactcctcccagctcacagagacattgtcaaaagagaacatccatacaagaccctctccctgacactgttatcgctcagtacagacacatgtctgcctggttccagcaacggttataataccacccttttctctcttaacttttcttcagagggattttcacatcataatcttcctagtaatatttattttgaaaaaataattaaccaatacagaattctttagttctctttggtatttcatttatcaaaggttcttggagatgctattggtctagagtgaccagaggatatgacatctgcccgtgtgctctaagtacgatttatgttaggtatttttgaaagtccacatggagagttgttcacctggccctgttagtattggcagacagccctgtagctgggaccggagtctgagctgttgactcagaggaccacctctctcaggaaatgcttctgatgaacagcaccatgccccaacacttagaccgtgtcttttatctgtcatgcacgatgctatctatggtaatgctactttgtttctttttgctgcttaaatcttattgtgtagaaatacaggatatggacaggctactagggaagaggagacaccatttaattaatcagaattccagtgctgagttggattatgtgtgcttagcagagagttgtttactgtaatgcatttattgtcatccctgttttgtaccctcctccccatcacctctcctactcctcctcccttccctcctagatttgagttcctaagacatactgccctaactcagacttgagaagagcacgacttctacagagcgtgttgagaaggcaggtgcatttgccataagccagtagttctgcatttccagccattctggaacgtacattcatttctgaagggcggtcactaggtgtctccatgaattcccagagcactaattgcaatttggtgctttgttcttcttgttcaaagttaatctgaaagacacagaatgtgaactcctgttcctttctctccctgttgccagcactgtctatggaggaaggtaaggagggtgtcgggaagacacccttatctccaaatactcctaggaattccctctaattctcacattcatttctgctccgctcagctatgtgaagctatttctgtgtatctggtagtgtgtagcacaagggcatttattctgatctaagagatcaaggagagggatgtagtgtttattcacagctctagagtctgacagagcacaggctaagacctcagtggagttatgttcatcaggactttgtatcaagtgtttatacaaatttcatgacattgtaaggaaattattattattctcatcttgtgtataaaaaattgaggtcccagaaaaggaatgattgcctaaaattaaaaacagatagtctagagatgcaagcttgctcctggagggccctatgttggaagttaaatgggaccttcagggattgcctttctatatgtttatgtttagccatgtgcacgttaatgctgtgtatctgtcagtcagtctgtctgtctgtcttatctatctgtctctctctcctgcctctctctcctcagccacaatgagggaagagcttttgccttgaccaaggatgagtctctgtattaagtgttttccactgcaagaggttcctctagccaaggacagctgtactagccttagggtataaacatttagaaggcagtttggccatctatccatagtaaattatgtcctaggacctatgacattcaagccattgggtttggtccaggttgtcaatatcagttttgcatttctttccatgactctgactgaaaagtaattggctaacaccaaacagttgtgctcctgctgcaccagtggagttcccttgccatcttgtcagtgtggtggtgcccggatccactctgggcaacgctgctgatgcactttcagcaggctgcacactttgtcgggtgccgtgggcgctagccagtgctgcgtacgcagtagcattttatgctctactgttcacagcacgcatgcttctccgatgcagtagaatttgtcttctctctccaagaattctgagcaataattctaagagagataatgaaaggtagtctgagttttgtcaacagggttttgcgtggaatgtgggcacattttaagccccctgtctatgttcttttgtagaagacagcatgaagattgatgagaagtgtgtggaagcaggtaacagttcctcctgactgattcaccactagaaacatggagcatctcaccctggatgatcggaagcagaggtgtccggccgagagcccttcctctgcagggcatgtcaggggcctcgagcccttcctctgcagggcatgtcaggggcctcgagcccttcctctgcagggcatgtcaggggcctcgagcccttcctctgcagggcatgtcaggggcctcgagcccttcctctgcagggcatgtcaggggccgagagcccttcctctgcagggcatgtcaggggctgagagcccttcctctgcagggcatgtaaaatgaccccagccggtgtgccttcactgtgactccacactaggaagggagaagcaaaactggggtgtctccagccttccctctcagagattgtctcaggacagagataagcagtgtctcaggtggtgggacagccagaaatgcccatgatctttgtggaataacgaagagtgtgataccaaatacttaaaatgcaaagtctatttttgctattacatgtaatgattctagtgtaggcagatggtaatgggttctgaaccttggagaaataaaaaagacattttatatttttatatctaatgggttttgtgaattctaaaaagatttttctcaaatttagcagtggtactaggcctggctctcgaaccactaggctttatgagggagccagtgcagagcattggtctgataggtggatttgcctttctcctgagacaagctcttcctctgtatcccaggctggcccggtactcactacatagtctaggctggtttcttttcttttctttttttaaagatttatttattattatgcataagtacactgtagctgacttcagacgcaccagaagagggtgtcagatctcattatgggtgggttctttttgagccaccatgtggttgctgggaattgaactcaggacctctggaagagcagccagtgctcttaaccactgagccatctctccagtcccctaggctggtttctaatgcccagcaatcctcacgactcagcctcctgagtgcagggattataagaaggagccaccatgcccaactctgccaagtaactttgtcatgaccttgtgggctaatgcagtgtttggatatgaaagattcatctatatatttctcagactagttgcagaataacgtggacacttgtttaaaaaccaggttccacagactgttttttaaaaattagtatgatttattttctttctacattttaaattaaagttccattaatgcatacattgacagagttcaaaccccacaaaagcatattcagatagaagttcctcttcctgtgtttccctcttcaatttccctttgtaaaaatgatgattatgatgatgtagtttgtatttgtatgtatgtgtgcatgtgtgcatatgcacacacatgtacttacatgcatgcacacacattatgtatagggggccacacatgccaccgtgaatgtgtggagcagaggacaacttttagagttacttttctcctttcaatgttagctgggttccagggttcaaactgaggttgctatgcttgggcaagcaagttcttccacctgctgagccatctcaggtctcagttaccagtgtctgtagtatcctccaaacatactctttgaaaatggggacgatggtatgcgttcttctccctgccccaccctgacctttcacccaaacataaatgcacatccttagacggtgcatctggtgcagctcttctgggcgtggcctcctgcctctgtgtatattgaagatgattctgtcttgtgtaaagagcatctctgtggttttggttttggtttttaacagcttattgggtttccattataagcactgttacaatgactagctttataaatatgtattccagttatgtgattgcccttagcaggggctgtgcctgatctaaggatgcctgatgggtcacactactgtgtgttacaaatgtccttccacacagacagacgatagtttcttaattccatttccgaaagataacaagaggggcagacaaggtggctcaactggtagagttgcttgctgcatgttctctgacctccacgtatgtcatggcatgtgtgtgcctgcatattctctctctctcctccctccttcctcctccctctcctttgtcctctcacatatagtactacatacatgttctaagtttttcggaataacaaaagttgttttaactactgaggaagttgatttatcctatctctctcagtcacttgaacaagccagccattcatgaatccatcctccttgccgctggctgggagaccctgacttgacagggagcttgcaccactggtgacctttggagcagtcccctgtgccacacccgatggtctggaggagtttcttgtggtgttccactttttatttttaaaagatttatttattttatgtatatgcgtttactgtcactgtcttcagacacaccagaagagggcatcggatcccattacagatggttgtgaaccaccatgtggttgctgggtatggaactcaggacctctggaagagcagttaatgctcttaactgctgagtcatcttgccagactatgttctacttcttaatatattctctcctttcctgttatctatttatttaataccctgctgcatccctcctagaaatcacagcccatctatcaaatgctattcatctcatttaaaatgtagtatgccatagagctaacactgactccatcttgatccagtgtaaacgttttaaaggcagtgtgcggggagaaacatggattaggcttgcactgctaaaatatagacttggtgtagacagtcatgtaatgataattttgcttttcacctccactgaaaaccacagatgaagaaacttttgaatctggtaagttaaaaaaatatcatatctagtaccaacttttacatgtattttccatgttttggtataatttaaacatatttagagatataacaaatatctttaaacgagacagtaaaataataagaatctaagccttgtgagataacaggttcatttgttcactgcagtagatttcactccctatgcctattcccagatacgccgcatacttcagatatggaccaacactgcatttattcttgaggttctatacatttcatttagccagttacttttcttaggaccagggctgtccgggggtggggtggacgtttggatttctgtgggggcattatttaagagtaggagtgttctttaactggtaggtttaggaatgtcagagtcctgaagagtatacaaccagcttgccctagcagtttccaatctgtgggttgtgacccctgtagaggtttcatatcagataacctgcatatcagatatttacattataagtcataagagtagcaaaattacagttatgaagtagcagtgaaataattttatggttggggtcaccacaacatgaagaactgtattgaagggtcacagcatgaggaaggctgagaaccacgactccagaatcacatatgttcctactgggtaatgataattgaagattaaataggtagctctttaatacatgatagtgatgtaaactttataaaccatatgtgtagaaggctagggagatggctctgtggataaagtatgtgccatataagtgtgaagacctaggtttgaatccctagagcccatgtccagccaggtgtgcacagtggtgtgcatctgtaatcaagtgctcctatgctgaggcagagacaagagaaccactggaagtttgtgtgccagctagcctgacacacatcggagaactatgaaaagtgagttgtactcagacattcgcacatggctgcaacacacacacacacacacacacacacacacacacacacacacacacacagtcattctgctggaagaatagttttctcatgcaccgggctgtagaaagttttaatctcaatctggggttctaccctgccttgatcatccagtttctggataaaagacttttattatttacaataagccttaatcagcacaagagctgggcaggtatctctcctctatgccattagaatctactttcctatcaacaaccctgagttattacttaccatgttttatctggcggcttctcctccattcacctcctctctggtggttctcctctgacccctccaagcctggaaaccctaaacctcacttatgtttcctctgcccagctattagctgtcagcatctttattcaccaatcagaaacttgggggcaagataacataggtctacatgcagactctcttgtctctggggcaaccaggtcttgaggaaccagtattagcattagaatacaaacagcatcaggccgaccaactacaaccaggcatgcgcatggtgcacatgcgtacatgtaggcaagcaatcatatgcataaataagtaaataatttaaaatagagatgtcagtataagtacttatcattaaatgatagcatgggaactactcaacttatgtatttaccacctacttctttttctatatgaccattttccctgagattgttacccatttgggataatttaattttctatacttggctcagagcttatgatcaacttcttctttagcatctttagattatatttatctttctttgttctgtttatctcatcttttttttttttctggaaaatgctctgtactccaaagtaatacccgagccccagagatactcacagtgtctgtgaaaggagatgcagtgagtgtgtgaagagggcacatggagttccagtgtgactgtgggctcggtagcctttcactgaccatcaggccccagccctctaagataagcaatgccctgcatacgtaaggtgttcagatcagaacatacagtaggcactgtacataataaggtgttcggagctgagctgagcattcagtaagcaccctacatacggaaggtgttcagaacagagttggagcatacagtaagctccatgtgagtgttggctgatgatatggttacgaaatcattcatagggggtgggcagctgctggctctctagatcagctttactggggaaagtatgcagccaacccaaagctctcacgaacgctttccatttgactctcataagagctccattaaggaccagttagtgtccagctggcatgttttctgagtagataagccttggcagtcgttcatgacacttaactcctgttacttggaccacttagtgaatagttagggctcttcagtttccctctctgcctctgagtgaaatataatgtgaccttcttgaatttctccagagtcagtgatacagtgtatttaactaaaacaacggtcacaacatttgcagaaaacccagtcacttgaatatgtctagataacaacaagcaaaaatacccaaccaaccaccaaacccctaccccactaccccagccttcacaggaccagtagagaagaaatcatatatgttaggccatctgggggcaaggaaggaaggtgtcagactgctggagagtgtgccccttgcctatcttccttcccaggaatgtggtggtagggctgtaggagacaaggaagaaggcttagccattttcttcctatattttctttcaagtacagttttgtgcccatcagtagccttcatcggtaaatgacaacttcagggacagtcttgacacacaacttgcaggacaaatcactgtcccccagcagtagagtcagatcaaataagtttctgagtcccgacgctgtgccttccattggccctgtcaagttaccagccttgctaaaatggcggcatgacttccctgctatctgtttcacgttccttaaatggttaacttgatctttgccaagattaattcttcacatctctttcttcacttgctcaaatatccagaggaactcgcagaaggtaagtgttcatttttatcccctgcatataccacttgatgcgatgctcagggtctctcactgccacaaggcagcagcacagcttcctacaagaggtgactttttaaagcccagatcaggaactagtcggttccatagaaaacaaaggcaattaagctttatagctatacgttagtgaatgtttccttgtgaatgtatttacataacatagagaactgtgattaactaatagatgatgctggtatttttttagatttaatttttttacttatttgtacatgcttgaatgaatgtgtgccatttatatactgagtacttgcagtggccagagaagggcattcactcccttggagctggagttacaggtagttattggtcatgaacatggatgctggaaaccaaactcaagtcttttggaagaacagcaagctcccctaaccgctgagccatctctccagacactggtgttttctttgcattttcaaatgcattagtaaagccagatacagtagcatatgtagtcagcacttgagaggtggcggtgggaggagcatgagttcagggtcaccctcagctatatagcaaatttgatgccagccaagcctacatgagaccatgtcataacagacaaaataactcttaaaaataaggttagagaaagaaaattatatatgtgagttaatcctataaacagatgtttgtgattcattatatcaacaatcagaaaagacctgtttaaattacaagggatttcataattgtgtttctgagttgcagtagaagcagaacctagcaactgttgggctgggtgtcatcccctcctttgtctctggtgttcctggctgccacagagcaagttctgattttttttttttaaacggaaataatcaagctgactttggctctgacttgaagatagtggtcttgcaggccctgtagtaatgctgtgatggacagtcttaatttcatttatttaggaaatagagctctagtaaagcctttgtcctcgtttcattacctgtttctatgagaaaatgtcttgtcagaagcaacttacaggaggaaggatctctttagcttacagttctaggtcacattccaccatagtgggaaagttaaggcagaaactgaaggcagctactcacatccccagtcagggcagagagactccatggatatgcgtttgcagtgttcagcttactttctccattcttacataggctgggacccaaacccaaggagtagtgttgcctcaaatgggtgtgtttcctcacctcagttaatgtaatgaagattgtttccccagatgtgcccataggccagatgctccttccaggtgaatagattgtctcacactgaaactgtccatgacagcatttactgcagagtctgcaagaccatggtcttcaagtgaaagccaaaatcagcttgtttcatatttttgtaacatcagcgtttaaaggatgtgtttgaaaatgcatattgagacaagttctcaatatatagctcagcctgggcataaaattgtggtcttcctgttttagcttcctgagtgttgggattccaggttgtcccatgcccagcttctttcttacaactttaatcaagcctgaaataggtttctattctcagtctttctagacaaatcctatgtatgatgcgatgctaaagagattgcataggagcaacgggatgggaagtgcagagaacaggcctagtaggctgccaagggtaccgtgggctggcctgccacctatggagaacatcacttgaaacagaagatgatgctgtacatttgcttgttgtgttcctgtcttggtcctcacataatctcccattctctgtgttccagctaaggacgaatttgtcggcgatgggcagaagttctttatcggtaggtggcaactgataagagttgtgcgttttttgctttttagtgccattcatactctctggtgccttgctgaaagctgcctttgctgatgaatctctccaacttctttcttctgacttttctctgcctggtttttcccccatcaataatctgacctattgacctattgattattgttatttatctaatttaacttggatatcttttaattattctgtcaaacacaaatctgttcatttcatccccggaccattctataacctatctaccttactctaaagacatgagtttcatggctgttaaaaaccatcttttatgtccacattctctaatctgtcacccgaggagagttctctaaaggagcagatctctctgataaaatcaccctggaacccccttttcacaaaacataagagcggcacagagctataggctaaaagctagaatgttgtctccaagtctagatgtactttgggatcattggaggagagctaagacacaaggggctgcctttgtgcctcacttccagaattattgaccccaaagccagtgagtcagacgggcagggtaagcagctgcacacaggtgaggagtagggagtccaggcagggccaaaggggaggccgtgcacagtggtggcctggtgctatggtcagggccagaggagacaaaacagtagctgatggtcagcctctgataccccacagccccccatcaagatgcgccctagccctgagactgttgctggttataagtgagcatttgaggacagtaagagccagggctgaggagtgagctgcacatgaggagaagggaagtttacagcgaatccagtactgtagcattatattgtaagtgctggtccatggtttctcaatatagatagatatgaatataactgcatctgtgtgtttatagatacacatagagtttctgactctaccttcagagaggacctgcaaatggctgtacagataccaaaaaggcttttgatgctgtggcaggaaaaggattctaagaattcagctagggatgactgactaaggggtcctaactttacagatgatgtaatcacctaagctgtctgtgacagtatatccatctgaacaatgagagccataagactacccagtgtttccacgatagacacagagcttctacagaaggccccaactgctctccccgaggccctgcttcctctctacagctaccaaaggaatccttcagaaacaagcttgctgttcgaaggcctcttcacacagcgctcacacctaactcagcactgactcccctccccgatgtgatctggctatggctccttcctcagtaccgattctcaccaccttcccattgttcaccaccttcaaaccagtcactgtatcttggcattcgttccactctgcaggcagctccttagctggccccgtctgcactcaggcaacttctcatggccagcctttctgatcctgttatgaactgcccatcctaataaaccactgccactctctgacctttcacctcctccatgaattgcacatttcctgagaagatggcctggattgtgtgatcactgtatatagcatgatccctggcatacagcggatgctcaatactacttacatataccttatgggacatcattagctgctgcttgttttgtttgctatttcaagaccaggtctcactatatgtgcgtcctggaactcactttgtcttttgaccaggctgactctgaactcacagagatcctcctgcctcagcatctgattaaagatgtatgtgccaccacatccaggtccctatctgtttctgtcctccctcttcagctgggttccgccgcagcatgcgcctctgtcgcaggaagtctcacttcagccagctgcatgccagcctgtgctgcagctgcagctgctacagtgccgtgggcgctccttacgaggaggtggtgaggtaccagcggcagccggcggacaaacaccgcctcatagtgcttgtgggtatgtcatgctctgctcagctcttcgagtcatcctagatttgatgttttgtgttggtagtaacaataaagtggggctctttacacaccttcatctagaaatggtttaaaggcctgcttgcatgtgtttctaagaaagctctcaaaaggcaagcttcctttgccttctctgcctcctcttctcctttgacctacacttgaacatagtgggctatgacgtgtaagaacctgggtattaacaatctctaatatgacgaggttattcctgatctatacttttatctgtttagaatttggtctagaaacatgcatggtctaccccagcttgcatcagtagtctgtattaagaaaacaccttagagaaattccatctctctaagaaacgtttagccatgttctttgtaaagtgtctaattcttctggatctaccttgaatgataaaggacttgggtgatctggtttttgtgaccaagatctctgcaaacttggctccccgagacagtgacagcttgcacctcacctccagcagggtctgacaatgctaactcagccacctgttggaaatgttacagcatccgtgggtgacagagttgcattccgattgagacttttcaaaaaaaaggaccatgtctcagattatctgatgcaagcccagagaagtctcagagcaccaacagtagtggaggtgacagatccctgtgagtccacacttatttgagtgttggtgcgatgtttgttatttcatgagtccctggaagaatgatgttttctgcgtttgttccaatcctaagaaggggggggggtccctaaaagcacatttgctgtcaagtccctgcagcagcacgtctgcagggccagctgtggcatgtgatcctgtgcatccacatctaactgtttctgctgtgaccttctgtcttcaggaccttctggcgttggagtcaatgaactgagaagacagctcattggatgtaaccccagctgttttcaaagtgctgtgccacgtacgtttatttgtctttcttggtggctcaggttttggtaaaactttgtctctgggtgtgccggggtcacatcttttactgtcacatctttactgtcacatcttttgtaaaaatgtaaggaccagtccttgagtagttctccctacatttgctttgataactataatagcatagtatgctaggctaggctttcaaaagataattctcatatcttttccttttgaagtggaaggcagctgacaatgtgtgggagtcagttctctccttctaccatgttagcttctgagaatcaaacccaggttggcagacttggtggcaagtgtctatgcccatttagccacccccttgactctttaacttttcttagtcatatatattgtagggagtggttctgaggctttgatctgcatgtgaacgctgtaggttccccaattggttcttgattgatcaataaagatgccattgaccaggggagaagaggtgggactttcaggttcccacaggcaggctaggaggaaaggaatgcaccatgcttcagaggaagggagagggggagggagagaaggagagggagaggagggggggagtcactagccatgtgaggtctcaggtggagtgaccattggctgcttccccaggcaggagattagaaatgtagatgcagggtgttgagcaaggagaaggtaaagaggcaactaagctgagggcagtgttgagctaagagtaaaggaaaagtcatgctaactgtaggaggcttagaagaacccagctgcttagccataaggtaggttaaacatgtgagctgtgtgtgtgtgtccacagatccaagggaaccagagaggtagctggtagcccctggtccacatggagcttaaagcagggtagaaactacacgctacaatatatgactattaaggatacaaagtgtttttataataatggccaacattctataatgatgcgtagtatgtgggatgaaggaggttagtgttttgtctgagacactgagatgaaaaaatttttttaaagatttatttattttatgtatgagagtatactacttctgtcctcagacacaccaggagagggcatgagatcccattacagatggttgtgagccatcacgtggttgctgggatttgaactaaggacctctggaagaacagtcagtgctcttaactgctgagccatctctccagccccctgagatgaaaacttttaaaagaggaatgtgaaaaatctttcaagtaccaagacatatcaatatatgaaaggcttggggaaagaacctaagaggggtatttgtagaggtttgctttttagtcagaaaaagtcactttgtaggatggtttccaatgactgtgagtgcttcaaggaagatggggatacttgggagactataaaacgtctcatgtgttccctgcatactggggaagcaaaagactgccgtcagaattataactgaagtggaggtccaacggggcattggtggagtcatcccacgcacattatataattcaccaccccttgggagccttaagttttgctggcttttcttgtcctcagtaggaaactgcaggagaaattgcatagttacagaagtctaaggacagacgtgaagaggggtttgaatagagaaaaaacgaaagtggtcacaaggtgatatcttcctcctgagccccttggagattgatcactgagggcctgttgcaagcttcttacatgtcattttcattgatctattttatccttaaaccctgtcaagtggaagaacaggttatttttattgataggggcaatttgttgtaaaagagaataagaacaagcattgcggcacgtaggacatagagttagagtggagtattgtgggatagctccactaagggaggtcagagtccaccactgaccagctagcctctgggctcagggtgtaatgcaagactccctgattaccaggccttctccttctctgacctcgtctggggaattcaaaacccccacgtacacctctatcaggagaatgctagagaactcattcagctagtacctgagattcctcaaatgcttcccatgctaatgaggcattttggtaccctaagcctacaacccatgacctttgtccatcctggatgtttctacccaccatctcccgaaattttataagccttgagtcaccagctggtcctgctgtgtgttattcactgtgagtactcacagggccctcgacccccaagccccaccctttcccctctctgctccctttgccctggtggaccttattggctgacaatccatgagggtggggagagcaccagtgttaagttctagaacccaaactaatacctgggatatagtagatacacatatgttcattgttattgttactagacagtcaacaaatcacttttagatatttgggggaacttgtgttttctataccagatgccattgaagtataacattgaggagtttatatctaaattagtggttctcaacctgtggttccaacccctttgagggctgaacaatccctccataggtctcacctaagaccatcagaaaacacaggtatttacattgtgattcataacagtagcaaacttatagttatgaaataacaatgaaaataactttatggtagggggtcaccacaaaatgagaaactgtattaaagggtcgcagcattaggaaggttgagaacatctggtctagattaaagagaccacatcaaagaatcaaattgaacacagatttgtcaagttttcccctttctttatctccataacttctactttgccaacactgcagaatgccatgggcttcctctctctcaaatctgagacaatctcttgtaataaaaagtagtttaggaggaagcattcatcttacaatgtgagcaactttcttactctccaaaagctccatctacttatcagtaaaagaacgacacatctggcgatcagtgagagaggtacaatgaggtcatcagaagtacatcatccaaaccaaagccattgctgctgctatgaggggcagacatgcacgttgagcttcacatgtagctcagtattacctaaataacagcaggtgttctcctgtctgatactatgatacgttctttcccacaccatgagtaatcaataaaggtttgtcatgggtggaatgtgacatgggagtgcccactttcttacagcagttcaaagttcctctcttggttccagcatcttatctgtttaggtgttcatttgtttgttttagttggcaatctctatccaagtatgtatttctgaaagttttcattatcttccttggtagataccacccgtttcccaaagagttatgaaatggatggacgtgagtatcactacgtgtcaagggaaacatttgaaagcctcatgtacggacacaagtaaggttcagaagtcagttcttacttctggttatttgacagtagtctgaaagctctcagcagtaagccctcatttctgaagagctgagaaagccacatacattgatttttctagagccagagcttcatgcttcagaaaaattaagtccttagttttctaattttttttctcattcattttgttttggcaagatctatatatcccttcctatggcatttcacagctgtatcctagtttgctatctatggccatgaaaaacaccatgactaaaagcagctcggggaggaaagggtttatttggcatgcacttccatgtcacaggtaaccactgaggaaagtctggacaggaactcaaggcctgaacttggaggcagaagctaaaggagaagctatggaggagtgctgcttactggtttgctcctcctggcttgttcagccacctttcttacccaggaccacctgttcagaggtgacactgcccacagtgggctgggccctccaatatcaatcattgatttagaaaacaccctcacagacttgtctccaggtagtgtgatggaggccatccctcaactcccaggtagtctgatggaggccatccctcaactcccaggtagtctgatggaggccatctctcagctgtagtctgatggaggccatctctcagctgaaagtcccattctaggtaactctagcttatgtcaagctgataaaaagctaaccagcacagttcatataactgctgctgctgttttacttgtgaaggttgtttccttttctaggatgctggagtatggtgagtacaagggccacctgtacggaaccagtgtgaacgctgtacacgccgtccttgatgaaggcaagatctgcatcatggatctagagcctcaggtgagtctgtggtaacacatttcccatcatgctaagtcaggagtgcatgtgcacatgcctaaggctataatcgagacatcttattcagctatacctttaagagtaagactaactctcatatctccgggccggaccaggccattcctcgaagtgtaaatgggcaacattttgttttagttggagagaaagttttacttttcatattcagaaccagagcttgagtggatagccataaaagaaaatgtcccagtctttcctgctttgaatacagagtacaaacttgtccaggtaacttcttgtggcagaagatactgctgaatgctctgtgctgggccgaattgtactacgtgcttgaacaatgtgaggagagcaggggtgattcatcctattcatgtagacccggtttgtccatccttgcactttcttctttcacttaagaatatactttgtgtgctaaagaaaagtagggaaaagcagtttgctcttccctgggtcagagctagtggtcagtaagatggaagcagtgtccagggtgacgtgctaaccagaggaaagggaagagagggcaaagtggacatttcctgaattttggttttatcacatgaagttctataaaggagtctatgctcagtaaacagcattttgtcatatttaagacttatttcaatatatcaatagctactgaaagctagaaagaggaagggccaggattctaacttaattttgattctagaaccataattattattaaaatgtttggattttacaatttaggacttgggggcacatgagactataatcacactgactacagaaagctaggactaatatttttaatttttaaggaatgtataatgtgtatgtgaatttgctggtgttgaagccaggggacaactttcaggagtcagttttcttctacggtgggctccaggggtcggactggctcatcaggtctgcctgataactgcttctatagctgagccttcttcctggcccacttctgtctttaaattgtgcatttaatttttctatgtaggatattcagtcggctcgaacccgtgacttgaagccctacgttatatttattaagccacctaacacgagctccatgagacactctcggaaaaacgctaagatcaccactgactactatgtggacatgaagttcaaggtaaatcatgccagaatcatcctggtattactttcagttatggggaggtggagagccatcgggcagctgggccgaaggcctttccctgttttactctttatttgaccctcttctcaggagcacttcaagaaaatggttttaaaaagtaaaaaccactgttgtttccacagaatcctttggaagttttaatgattagtctttacaatttatcctttttagctaggcattagtggtgtacacctttaatcccggcactctgtaggcagagtcaggcagatctttgagttcgagaccagcctggtctacatagtgagtctcaggtcagccagggctacacagagaaactctgacttggaaaacaaacaaaacaaataaaaaaacaaaaacaaccccccaaattatctttttaattagatgtcatttatagttactaaaataaggtttaataaatgctattttttctgagcttaacaaatgacccacaatctgcaaagccaaacaaatgtatgcataagcctatttctatttttgagctgtttttacttaaatattttgtaaaatgttgtactgagtatgcctcatctataaaatatttcacaaaaatgtttattaataatgatacaaaaggagcagtcagcagaactcattctagatgaggttttccatttatgaatggacatcatgtgtattgaaatacattaaatccactttagaaataagccacagcatatgactcactaaagtgtagaaatcctaagtgcatacagcttggcaaattttacatgtatgcacccaaatcatcatccagattacagctaaatcatccagacatcacagctctgtgtgtgtgtgtgtgtgtgaaaaacaagatcttctctcttgggacattacagctgtctctgtctctctgnnnnnnnnnnnnnnnnnnnnnnnnnnnnnnnnnnnnnnnnnnnnnnnnnnnnnnnnnnnnnnnnnnnnnnnnnnnnnnnnnnnnnnnnnnnnnnnnnnnnnnnnnnnnnnnnnnnnnnnnnnnnnnnnnnnnnnnnnnnnnnnnnnnnnnnnnnnnnnnnnnnnnnnnnnnnnnnnnnnnnnnnnnnnnnnnnnnnnnnnnnnnnnnnnnnnnnnnnnnnnnnnnnnnnnnnnnnnnnnnnnnnnnnnnnnnnnnnnnnnnnnnnnnnnnnnnnnnnnnnnnnnnnnnnnnngtgtctgtcaccaagcctgatgacatttgatccttaggacccacagagcggagtcctacaagttgtcctttgctttttacacacacacacacacacacacacacacacacacacacacacacacacacacagatatatacattttagaaatgaactactatagtaggtatacagtttattagtactatcaatatttatattgctgtgaaaaaaaaagtatgacagcttcacaaacctgcatgtccttttgtttgttttgagacagggtttctctgtatagccctggctgtcctggaactcactctgtagaccaggctggcctcaaactcagaaatctgcctgcctctgtcttccaagtgctgggattaaaggcctatgccactactgcctggctaagcctgcagtcctaatctccatactgttccaattttaggatgtcctgtcaaagcaagacaaaagtatttttatattaaccctaagagtttttctctctatatttttcaattaccatgaaactatggttttcctgtttgatcttttgacatctgtggacatagacagtctatttcctaagtctttggggcttttaaatttgtgtccttgctaggcatggaggtgcacaactgaaacctcagcacttgggacggtgaggtagaaggatcacaaatataaagccagcctggtttatacagcaggactctgtctcagaaatccagaatttggagggagggcacagatagaatatagaggatgtgtaattgacataattgtttttataaataccctcacgagtttgccagcagaacacctggtcttattgcctgtgccattcatacatatttttcaatcactcctgaaggatgaagacctacaagagatggaggagttagcccagaaaatggagagtcagtttggccagttttttgatcacgtgattgtgaatgacaacttgcaagatgcatgtggccagctgttgtccgccatacagaaggctcaggaagaactgcagtgggtgccagaggcatgggtttcccctgacactgaatcttaatctagtgtcctgcttaaagctggaagcttcatagtgtgccctaaagatccggaataacggctgccattgaaaacagcagtgtttgacccattagaactgcgactatgaagtccttattgtatagctataaatagcatcctatacatatacagagctactcatttggctctcaggcattttcccgatgtttccccatatgagctaatggcaggtatgtgacaatgttgtcactgaatgtgagcattttatagatttcatatggtgttttgtaagatgtaactcttctaaataaaccagtctacttaatgacaaactgtattttactttgtaaaatattttcttatttctgtttatattttacaaaagtgcctagttgactaactaagctaagagcggttaacaagtacacatttatctaataaggaaacctatgacactgttatttccaaatcagcaaagtggactagtcctggagcctgtatatgagctccaaaacgaggatgttgatacagtcttggtctccctagatccgaagctccactgcacccatgtctgttcatcttctttatatccacacttccctccattctacctattttaaactataactgttcccactgaaggaactatcagaactgaacattcagattatactcctaggcctacagggaatctaggaaactgggcaggccagtgaaagagatcctcgctgtttcagtcatacagatctccctccaggcagcaccctggcagacgggaaccaggtgggggacgccggcctctccaggctccgcaaagccgcctcctcccacaagtccccggaggccgggcgtcgcgggaagccggcctcgggctccggcggttgcgcctagggaggcccgcgggaaagcatcatgagggacgactcagggcctccgctggaggaggaccaagcggtgagcgacgaggggcgcctggcccggagtgtggcgaagtggaggtgtcctaaccagcagtgaccaccgccgagccgggaatctggggacagcactgcccgaggggtgcggcgggggcggaccggggctgtacatcagggcgggccccgcaaaaggcgatcaggtccacccaacatccgggcgccctagtcagcgttgccatggcgacgcctccgggcggctctcggtcagagaggaggatgttccggtggggagtttgaatacgagtctggtcccgccgtgcccacccccacgcaaaccacgatgacctcccgggaaactgtgggtgaaccccctccgctcctggggacgccggccgacgctgaggttttcctagttcgaaggggtcagattgggttcggctccggtagccccaatacctcccgtgggacgggtggggacgctccgggcccagcagccatgaggcgcagcccgatgacgctctgcgcctgcgcgcctgggcaggaggggcggggcgggccggaccggggcggggcgggcggctgtggtgccctgagctctgctgcggtccctggagacgtgatggggaagaagcaggtggttagcgagcctcaggtacttttgagctgttgggaatttagtctccgcctgttcagcggttcttcttttgaggggcttagaggtgcggtttctagatgggtgagatggttcatttttgcgggacttttgaaataccaagaggactgggtcccactttcatagcatcttgagaatagtagtgcttttgtaggaccaccattctattccagttgtcattttgactgctggattccattaggacatcgtcagtgtcctaattttgtagcattctcacgaatttgtttgagtgaatacaaccatggattgcgaaatgggacaagcaagaatatctaaaatgtgagcctttggaatcagtgccttccataagcagcatgaaatacccgagctaataaatcgacgtctaggcactgctcttagagatcaattcttttaaaggtgtatttgtagccggacagtggtggcgcacgcctttaatcccagcacttggaaggcagaggcaggtggatttctgagttcaaggccagcctggtctatagagtgagttccaggacagccagggctatacagagaaaccccgtctcaaaaaaaccaaaaaaaaaaaatgtatttgttttgagtgttttgccaatatatgaaccacttgtgtgcctgttgctcacagaaacctgaagaggctgtccatttccctggaactggaattactggtgctttgtgggtgctgggaactaaacccaggtctgctgcatgagcagtaactgctcttaatggctaagccatctattttgaaaattttcagaatgcttaactaatgcttcctgagcttgcaagcaggacttttcttaagtaagaacagggtaaactacaccagccccaaatacttcctgttctaaaatatgttacctatttctatttaaagtaacttaaaaaaaaagcatgttactctgtggcataaaaccttagttggcttcctagttaatagaactaaatccgtattccttctgctagtctgcgaggtcatagttaatctgacgtctgccttctgtcctgtgtcactggtttctgcctggctgctctttacctggagcccttcatgccctgtctttcttgaaagccttaacatgtgctcctcattccctgtaaatttggcacctttgtcaggaagggctcagctcagataacatcaaagaggctttccctaagtaaaacatcactcttcattccttatatatggttatttattgtatgcaaacacacatgcacatgcatgcacacacatgcatgcacagacacacacacaagcatgcatgcacacacatttatatggcatggtctagttttatctgagcatgcaacattatcttccaatacttaaccactaatggaaggtctgtaaagggagatgagctctgtttgatcctgttctgaatgctcacaataggccagactggttgaagtggaagaagaaaagaattttacatggggtgtaggaatggcagaatagatctaaacccagcagtccagtttacatcaccgcctcccgggtttcactgataatcttccaaagatttgaagagaattgctgatccattttatttgataacatctggacagtgggcttttaaaggagaagctttgtggtgcttgagataaatgaaggtgaggttaatccagcttttattgacgagatgtttgcctctcccctcccctatagcgtcctccacgagcactcccacctgtgccaaggtaaaaacagtttacggtcatttaattattgaactttaaaaatataaagtaagaagaaaaaaaaaatcaaatagtatggttgaaaacctacaatacttcattaaaaaaaaatccttcctggaattttaaaaagtcttcctaagaagtgagtggtaaaagttaaattcaaatcatgagaataattgttatgaataattacagaaagctgtcactctagcacggtggaggaatgggtctgtcctgggtgtgctgctgtcctatttaccaggattctccaaggccctcctgtttgtggaatattccatcagagcttaaaccgattataaccggtgacaaagaaagttcttaatctgcttagtccctctgattaatagacagtagggaatgtgtatttgtgctttcaaaatacttttagcagtgctattaaacaatatactatttacaaataataagctagtttataaactggctagcagtatgtaaaagctagttttatttttaaagttgtaatgatgtaagtcaatttttagctagacaataaaatagatatccaattaatagtttcttttttctttctctctctctctttccccccccccccctttctgattacatttggccggggtcacgtgaagtgctatccaaggtgagttagtttactgtagtgtaaacagtcctaaatgcatttgttgttctgaagtaagagtgaagatgagtacactggctcttacgagcctacctggactgcctaggtttcaaggtagggacagtggcacacacctgtagtctcaggcccttgcaggctgagggaggagagctgcttaagcctaggagttgacggccagtgtgggtaacagtcagcccttgcctcaaaatgatgatgataataattttcacaatcttccgtgactgccatttgaaagtcatgtgtgatatacagtaataagttgctctctgcagttgccttgacttgttaatagctctgtaatagacagtactttttctcttctccttcagtcaggataggcaaggttgtgctacactaacaactccaaacgttttattcacttagtatgttcctcgtttgttgaaaataattcaaggatggaccagcaggatgacttagtaggtgaaggtactgatgccaagtggaaaaccagagtcagagtcccagaacccacaaggtagaaggaaagaactgacttgggcaagttgtcctctgacatctacatataagatgcggtgtgcacatatccatgcacacacacctacacgacctctctctctccctccctctccctctctcttcctctctcttcctctttctccctctccctctccccccgctcatgcacactcaaatgtgagagacacacacacacacacacacacacacacacacacacatgcacttacgtacgcacatacatacgtatatacataacataaatgttaagttttgttttctgaagaaaaagcccaagtaggttaattgcaaagtctgtgtcccttgggcctcagtccagagcagttgcctttttaatgatgtagtgaaattgaggctgctttgtcacgtgcttctgtcatcctaataggaagtttcttcccttgacgtgcagctgggacgtgtgtgacacatatcacttctccagtccaaacactggccgcacttcaccctgcttatagcttcttatgtcaacaagatagggcccttcagtgctgcagacagacacatgccacatctattcagctgcctggccgaaaccaatctagactgtggtacctcagtgccagggactggagactgtatgggatcaggtggacatttcttgagtccactttctaaatgacagttgtaaacaccactgggcagcagtgtatattggcaccacactgtggctgtctttggccttgtcagcctcttacctttcttcccctcatatgtaaatgttggttgactccagagaagagagggaaaagtcttccttaccagaagttctgttccagctgattctctgcctttcttgttgttgctctttgttttatagacgatattccacttagtcatcctaagaaaaagaagtccagaacaaaaagctcgctaggtaagatgtctgcattatgggagatcacaatttttcctgggaccttaagcatgatcagcattacagattacagagagacaagcttccagggccaccaaagcaccgataagtggggcgagaccgtgggtaacctgagattaactagatgtgttcgtagaataaagtactgtgctacctatgcttaaatttacaatattgtctctaaatggcacagtggcttgaagctctacttggttttagacccttgaatacaataatagatttagaaacctgagattcttaactctcccattctatgttagagcaagaccctgaagacagaatcacatcatccatgtcttcaagctttaatggcaagcaagcccacgaagcccttctgccatcccgataatcctggatggtctgttataactcagactcaacacatctagaatgcgtagccttcaatagtcaggtcttttggttttgtttttttccttgtgggcttgagacctcagagaaaccttcagctgatttcttaacttcactctacttcacatctctcccaagcctaagcggtctgggtagtggggatgctttgattcttgttgctgatgttgttttggtttttcttatacaaagggactcatgttctataggtactgtattggctctttaaagagcattgtaggtatctctaagtggcgattacgtattatttaatctttaacttaatattatttaatttacgtaaagatctcattctaaaggagggctgcagtcaacatagagtggtgggtggtgtggcaaaggtagagcgtagattgccagcagtgggagggtttggactgttggtaatacagggcctgctaaccttccttcaaggacgcttctcttatcttctgccttcatgaagcatgggagtgtcaccttctctaagtccctaacaaaatgggacaatgtcagtcactaattcagtgaatgaaaagaagtttatcttctgtttgcatttctcagccattttttcccaatactagtataaccccggcccccacatgctgtgccaatgatcttccactaacctccatccccagcccagagttggccttcggaataccccttgtttttcagcatagttttctttttctttttcaaggaatagtagtaggcaagagaaggtagtcaagaatgattcagatttcctgaatagtgttgaaatttggttaaaaggtttcattagaggaaaagttgaaactcctaaatgacctgtcacctccagttaataattcatgatgacttcatcctgtgctaacctacaatgaaaaacgagctatagaggctggtacacgtcttagggccggaggcaagaacattgtctgtgatgccagttttactctctctgcaccctttgaatgctctgaatcagtttctcctcctatgcattaagagggtcttctttttagccccccctttcctcggcttgcctgttgccatgtttatttcattttcagtgtagagcctgaagtgagaggagaggagccgtaaagtcaggtagaggcacaacgcagagcagagggtgctgatgtacagaaaccatcgtacggatccttgacccagctctctaactcagtggtcgctgctcaagctgacacggttttctcctctcctccggtagctaccgcttcttcggaaggccatgctgagcccgttgttaacaggagggctgaaggcagtgagccaccagctgcagaactcaaggagcacccagaagctcctgctccaaggagacagaagaagataagaccacctcctggtacgtgaggaaagagggtttgcctgtgacagaggtacattttgaatcttgttcccataggtgggttcttgctttcatccttaaaatacctaccatttcaagtccagtgactcagaccctttttcaggtctctttggtcatgattttgtagtctgtgagagaagtaaatggggggggggggcgcagggagaggggagagggagagggagatagagatagatatcgggtctaaaccagaaagctcagttctcagtacacacaagaatttaactagtgaaacggacatttcaggctaatagagatagggtgaattttgtactaacaaggatctaataaagcatcagtcaccatttattgagaatttgtgactcgggcagtgctctcaatgtagacaaaaactgtgtgtgtatcaagttgggtacgtgtaatcgcaacacaacactgagtgaggcagggtgttacagggtgtaagacagctacataatgaattctaggcctgagctacaaagcaagatcttgtttcataaaagaccacaatacaaaaaataaaatgtggtgataatgggaacggaaacacaaatactgtaagcggagtataaatcactttggcctgtccggaggactaagaatagaagcagctggaataactgatacaatcgggggacattagcttagaagtagaaatgggtaaacgccagagcactgtgatcctgtttaataatcacagtttatctaaataagcataacgcaagtgtaggttagaaggatcattcaagtgaagttgtctacaaagtattgttgagtcagcaacacaggttataagacagtgtgcatggagagggtctcactttcacagagacagactttattgtcctcccgtggttgccgtaacaagttactataaactgggagagttcaaacaatctacttttatttttttcatgggtctaaaggatagatgttcaaaatcatggtgtccaggaggccggactgcttccagaggctctggggaaggggctgtccttgccccttgcagcttctggcggtgtggccagtcttcagcatccttgactatgggcgcatattgccagcctctgcccttctctcattgtttcattttgcctgtttccctgatcctcttcatcagagataccagccattggacttagggtccatcctcacctagcatgacctcatcttgagttgtttatatctgaaaaagctctatttataaagttatgttggcaggttctaggattcatgacttgcatgtttctggagcgtgattcagtctagaccataggtttaggtacacacgtacacagtgaagacagtgggaaacagtagtgctaactgtgactagatttttttttttaacaaggaagaacaaaatatgatttttattttcttcatttaagaacacataatagttttatgtaattagaaagggacagtggactgattttattaacataaaaaaagggaagggagcaataactatgagcttaacagagccgggcactgttaacacagattagccctggagaatttaatacaaagggtttttcctgactaattactgactgtgctcctggagggcagcgggtgctggttatataggaaagttacaggagcagagcagcgggaattaggagtgaggagaatacatgccagttttgggaagattgaagtgggtgccacagtgcatggggcagtcggaaggagacccaggtgactcccatagggcccgacccctataggatgtagtaatcagcattgagtgtaggttgatgacagcaaggttttgatcatttggtcaggatacgaatttgaaaattgagatgataccaattcctagattgtgaagaatagcagtataaaaatggcctagccattttcagaacgttctggacccagctgagtgccctgaatgcctggactctcaccacttttgatgctgaggtagaaagtccataagttccatgtcagtgtgggcaaagtactgagacgctgtctcaaagacagaacacaaaagaaacaaaaaaccaaaccaaaccaaaaaaaaaaaaaaaaaaaccaagcctgaaaagaatcagaccagaggaagcttgggctctggggaacctgctgtagccattctaaatgcatacagccctgcctgacactgtagccattctaaatgcatacagccctgcctgacgctgtagccattctaaatgcatacagccctgcctgacgctgtagccattctaaatgcatacagccctgcctggcgctgtagccattctaaatgcatacagccctgcctggcgctgtagccattctaaatgcatacagccctgcctggcgctgtagccattctaaatgcatacagccctgcctggcgctgtagccattctaaatgcatacagccctgcctggcgctgtagccattctaaatgcatacagccctgcctgacgctgtagccattctaaatgcatacagccctgcctggcgcatttctctcttctcttctgaagcagggtcttgtgtaacccacactggccttggtgtgtagctgaggactgaacctctgatcctcctccttcccagctgctgccatgagggtcaccacaccttttccttagcagtgctggggactgaaccttgtgcatgctaggccagcactctactagctgagtgacgtctgtagctctaactttctgggattgtaaagctctggttcctgttttgttttacccagagtgactgttgtgcactgtcctgcctgtgttgtctttctagtctaggctgcattttagtaaaatagtttgaagggttgaggctgtctcggggaatgagtattttcaggtggggagagtagctaatggtcagggggctctgtggacttgtttgaccttaatggctaccctgggtacagaagggtgaaggtcgtaaactgagattcctgcactctcagaaagcctgcctgtccgattggtctgtggctttggatagcgtggatgacgaacagttcctgtactcacacaaacctttactgacttataagggcggctcactgtgccttgcacaagtgctctgactggtgacgaacgcttcttcccttctgggactctgtaagtctgtgtgacgga

SEQ ID NO: 10 - DNA, 2252 bp, Mus musculus
ttgccaggagcaacactgtgttttcatccttgcagctccagcagggaggatgagacagtctgacagaggagcagagctgaccaatgaggacagagctcttcccacgccacctgatcctgagaatggtctctctgggatcctgaggctcctactgcaggaactgagccttttctacagccgagatgtgaatggtctgtgtctcttatatgacctcctccattcaccatggctgcaggctctgctcaaggtctacgactgcctccagaggtttaaagagaagaagctagttcctgatacaactcatgcacagatcttagcctgtgaggtcttggagctgttacccaaagcttccggttcccccgagatccaagagctaagacaagtccttcaggctcctcactgcaaggccttgctgagtgcccatgacacagtggctcagaaagactttgaaccccttctccccccactgccagacaatatccccgacagtgaagaagcaatgaggattgtttgtctggtgaaaaaccaacagcccctgggagcaaccatcaagcgtcatgagataacaggggatatcctggtggccagggtcatccatggcgggctggtggagaggagcgggttgctgtatgctggagacaaactggtggaagtgaatggagtttcagtagagggcctggaccctgagcaagtgatccatattttggctatgtcttgtggtacgatcatgttcaaggtgattccggtctctgccccgcctgtgagcagccagaagatggtttatgttcgcgccatgattgattactggccccaagaggatcccgacatcccctgcatggatgctgggctgcctttcctgaaaggggacattctacagattgtggaccagaatgatgccctctggtggcaggcccggaaaatctcagacctcaccatctgtgctgggctaatcccttctaaccaccttctgaagaggaagcagcgggagttctggtggtctcagccgtaccaacctcacacctgcctcaaatccacccgagcactgtctatggaggaagaagacagcatgaagattgatgagaagtgtgtggaagcagatgaagaaacttttgaatctgctaaggacgaatttgtcggcgatgggcagaagttctttatcgctgggttccgccgcagcatgcgcctctgtcgcaggaagtctcacttcagccagctgcatgccagcctgtgctgcagctgcagctgctacagtgccgtgggcgctccttacgaggaggtggtgaggtaccagcggcagccggcggacaaacaccgcctcatagtgcttgtgggaccttctggcgttggagtcaatgaactgagaagacagctcattggatgtaaccccagctgttttcaaagtgctgtgccacataccacccgtttcccaaagagttatgaaatggatggacgtgagtatcactacgtgtcaagggaaacatttgaaagcctcatgtacggacacaagatgctggagtatggtgagtacaagggccacctgtacggaaccagtgtgaacgctgtacacgccgtccttgatgaaggcaagatctgcatcatggatctagagcctcaggatattcagtcggctcgaacccgtgacttgaagccctacgttatatttattaagccacctaacacgagctccatgagacactctcggaaaaacgctaagatcaccactgactactatgtggacatgaagttcaaggatgaagacctacaagagatggaggagttagcccagaaaatggagagtcagtttggccagttttttgatcacgtgattgtgaatgacaacttgcaagatgcatgtggccagctgttgtccgccatacagaaggctcaggaagaactgcagtgggtgccagaggcatgggtttcccctgacactgaatcttaatctagtgtcctgcttaaagctggaagcttcatagtgtgccctaaagatccggaataacggctgccattgaaaacagcagtgtttgacccattagaactgcgactatgaagtccttattgtatagctataaatagcatcctatacatatacagagctactcatttggctctcaggcattttcccgatgtttccccatatgagctaatggcaggtatgtgacaatgttgtcactgaatgtgagcattttatagatttcatatggtgttttgtaagatgtaactcttctaaataaaccagtctacttaatgac

SEQ ID NO: 11 - protein, 628 aa, Mus musculus
MRQSDRGAELTNEDRALPTPPDPENGLSGILRLLLQELSLFYSRDVNGLCLLYDLLHSPWLQALLKVYDCLQRFKEKKLVPDTTHAQILACEVLELLPKASGSPEIQELRQVLQAPHCKALLSAHDTVAQKDFEPLLPPLPDNIPDSEEAMRIVCLVKNQQPLGATIKRHEITGDILVARVIHGGLVERSGLLYAGDKLVEVNGVSVEGLDPEQVIHILAMSCGTIMFKVIPVSAPPVSSQKMVYVRAMIDYWPQEDPDIPCMDAGLPFLKGDILQIVDQNDALWWQARKISDLTICAGLIPSNHLLKRKQREFWWSQPYQPHTCLKSTRALSMEEEDSMKIDEKCVEADEETFESAKDEFVGDGQKFFIAGFRRSMRLCRRKSHFSQLHASLCCSCSCAVGAPYEEVVRYQRQPADKHRLIVLVGPSGVGVNELRRQLIGCNPSCFQSAVPHTTRFPKSYEMDGREYHYVSRETFESLMYGHKMLEYGEYKGHLYGTSVNAVHAVLDEGKICIMDLEPQDIQSARTRDLKPYVIFIKPPNTSSMRHSRKNAKITTDYYVDMKFKDEDLQEMEELAQKMESQFGQFFDHVIVNDNLQDACGQLLSAIQKAQEELQWVPEAWVSPDTES

SEQ ID NO: 12 - DNA, 73884 bp, Homo sapiens
ccaggaaaaaaaattcctcaccaatttatccccttgatcatttgaaaaattaattttcagcaagttttaaaaacacatttttaaattttaggttgagtacagagggaaataatagacactgaggactctaaaaggggggagtgtgtgtgggagggtgagggttgaaaacttactgataggatacagtgttcactgttcaggtgatgggtacaccagaagcccagactttaccactacctgatatatccgtgcaacacaactacatatgtgcctcctgaatctataaaaataaaataaaactttacattgtgtcttctataattaatcattttttcccttaatgttggacacttaatttctgtcggtgtttgcttatattctagaagagtggtccttgctcagagttaatataaattgacctcagatgagatttgccagtaaggaacacatatctcatatagatcagaattctccattccttggtaactagacagaagaaaatcatagcacgtgaagattttgtagtggtattattcattagctgcattcttaattttatcctgttagaaacatcagttttctcagggaactaaaatacttagttgataataaagcttgctctcataactaatggaaatgtgtttttatgcttttcaacccccctagaggtataattgtataattatattttttattcttccttaggttcttatttcctgagctgcctgaagaaggcagcacaattcctctctctgctcctctgccaaccgaaaggaagtctttttgcactgggaagtcagattcccgatctgaatcaccagagccagggtaaatggagttgggtggggacagtgaagaaagggaatggtgactagatgatcttactcaaagagtcccagcgagaaagtgtgttctctagatctatttcctcatttctaaaatgatatggttggggccaggagggttggggccagccacagtggctcacacctgtaatcccacactttgggaggctgaggtgggaggattgcttgatcttaggagttcaagagcagcctgggcaagatagggagaccccatctctacaaaaataaaaaaaattagcagggcatggtggcacacacctacgggttcagctacgtgggaggctgagatgagaggatcacttgggcctgggaggttaaaggctgcagtgagctgtgactgcaccattgcgctccagcctgggtgacaaagtgagacctgtctcaaaaaaaaaaaaaatttagctgggtaggtgccccctctgaggtccctcttagttctctcaagtactattagccataccccaggaaaaagcaaccacagatgatctgagcacaaaggctgcttagcaaaggaagtaacatcacactgtcctagaataacctcagagaaatcagcctcaaaatggaaacaatgtaggttttcagtgagatttttaattcatgaaaagaattcacagtttcctctaagacaaaattatagataatgtcctcatatcaactccatatgtaaagagcagagtaatattataacttctttaaaacttcccatctctacttttgactttttgaaactgaagctctaccttggattctgtattcaattttaatatgaaaaatgctccttttctcccactccattattttgtagttatgtagtaacgagttctggattattgcttcctgtgctgctacctcggctctacccaccgctgtttatgctttatgctttggataatgatcgcgaggaagacatttactgggaatgtgtccttcgactaaataagcagccagatattgctctcctgggctttcttggggtgcagaggtaagtgtagtagttacaagcgcaaccaaatggttttaatttaaaatgcaaactgcattattggaaatttggcactttgatatctaattatatatatggcttgtaattattttttgcatatgtcttctttaacaaaatagtgatagttaataatctttatttctgagaatatttggagatgagtatgaaacctgctgattctttggaatgtgttttttattatgttttcatatatatagtaatatatatttattatatattagtaatgtattttatatattatgtatagttatatatatatatatatataaagtgtgagctattttgcctggtattttatagctctttagagcagaatacatatctttggcattcttccttctcttcttttctctcctccctctccatttgcaatttttaagttaaaggttttgaagtgtttttttttttttctttttttgaaagagagtttcactctgtcatgcaggcaggagtgcgatggtgcaatctcagctcactgcaacctccacctcccaagttcaagcaattctcatgccccaccctcccaagtagctgggattacaggcgcacggcaccatgctcagctaatttttgtatttttagtatagatggagttttgccatgttggccaggctggtctcgaactctttgcctcaagtgatctgctcgcctcggcctcccaacgtgctgggattacaggtgtgagccactgtgcccagccctgctgtttttattagaaggtattattgcttgctatccagggaatactaaattattatgttttctttctagggcagtgataaagctgattccacctccccaatctctatttgtgctaccaggaaaagtgaataagcctcaatttttttttttttttgagacggagtcttgctttgttgccctggctggagtgcagtggcacaatcttggctagctgcaacctccacctcccaggttcaagtgattctcgtgcctcagcctcccagctagctgggattacaggcctgtgtcaacgcacccagctaatttttatattttcttatttttgtgctttttttttattttgtgctttaattgttttcagtggaataattcagtagtagaaatgagataaaactgagtgaaggaaaaatatttggtaatatctgtaacgtgtaggttattgggatatagaatgacaaatcccttagggagatgataaaaactcttaaatcacttctggaatgtttataaaaacttaacctattgtggagcagttctttttaatggggacaaggaagccaatatagctgtcaactatttttatgggattttgtctaccataagtaacaacttatattaataatttatggattccattataggaaattttggccagcaaccttgtcaatccttggagagagtaaaaaggtatagtagattttcttttcctcagcaaatatgcttttctctaatgggaaggatttgagatagcaaaactttttcattttactttgatagaacagtacccaagcttgtgtttgcatctgttattaccaaagacctgcactctgacaacagtatcatttatttctgttgttgcagaaaatagttttcctccttgaccttcactctcttttttgcaggttttgccaaccacgaaagatgcttgttttgcctcagcagtagaatgtctgcagcagatcaggtaatctctgatttgttgaaaagccatacaaatcaaagtagtgcttggtctattaagatattattaatatgatcttatctttacctaagccttaagcatccccattctatatgctgatggtgtcaaactcaatctggaaatcagaaatcagaatgagacccttgggttatcttttactctaaaatgaccttgcattttcaaaagtaggagagagccaagccagaaatttatccatataatcacatctttagccaattggaaattaaccaaatttctcattcagaaaagagcatatattaggagaatgagatttcacgtgggtaaaaggaaacaatatatgaatcgtagacagttggaggctacttttctcatagcaccatgggagtacaaagtcatcctttccaacgactcataatgcctaagtgtccgggttaaggcatgtgaatcccaggagggaatattgtcaaaaaagcacgatcaaatggctttattaagaaaattataggatgtctttttgtcattgtttctgtaacagcacaacatttaccccatcagacaaacttaaggtcatccagcagacttttgaggagatctctcagagtgtcctggcgtcactccacgaagacttcttgtggtccatggatgacttgtttcctgttttcttatatgtggtgctacgggccaggtaactgttttatgactttgttattagtgagtcgttatttttaaaagtctgctgcttgcattttctgaactgacagcaggagtacgctcttccactagaaaaaaatcgattaacccattccactgtgacattacccttttattgagctgttctttctttttcccatcaactagattcaaaaggagaatggacatgtaagtgaaaataactcagcatctttttctctctggggcaggattaggaatttaggctctgaggtacacctcattgaggatctaatggacccctatcttcagcatggggaacagggtataatgttcaccaccttgaaggtgagtatagttattatttaatactttcttatcttcatatctgtctttcatttaccatattataaatgccattaaccactttttttgtataaaagtttaatgcaaaccttaaatgcctttagagcacattttgttctacactttaaaacattatatagtatattaaagtaggataagccagttgttcctcaaaatactaaagcaaattcttcattatctaatcctccttgtaaattgatcaaactgttataaatgtttacatttatataaataattgtaactctaaaaaagaaacagaaaggattcttagtgtccaagaaagtttccaacaggagtgctattcaatggaacagggtaaaacacagaaggcagtatgtaaataatgaatttgaattccatcttctttctttgccttgtatttactgtaaccaatagattacaaatgagcttctttgatctgggtggcctggagagattgttagaagtcatttgtttcctgccttgatttttcttggaatttggaagaaacactctaaagtttattgaaaaaacagcagatagaaagtgcaaaaacacttgtgaaaaatgagaaagaatagacctactcttccagttagtaaaatttataaaattacaataatgaagataaaatagtatgtgactgtcacaggaatacacaattacctaaatagaaaggatagctcccatataaacacatcataataaaaacttcacatgaaagtggaaacaccaaaccaaaatggaaaagaggaattatttaacaaatggtaaaacaaagtattggatagcttattagcagttttggagggagggtagaatagcaaattatatagatgctttggggtttaaatatagagaaaggaagagagaaggaaagacaggtaaattaaaataagaaaaataactagaattcaatgtcaggtttctggcctaggttaactatttaaacttttcaactaaaataccattaatgcttcttttttttgagacagagtctcactctgtcgcccaggctggagtgcagtggtgcaatctcgactcactgcaacctccacttcccaggttcaagtgattctgctgcctcagcctcccaagtagttgggattacaagtgcctgccaccacacctggctaatttttgtatttttattagagatggggtttcaccaggttggccaggctggtcacgaactcctgacctcagatgatccacccgccttggcctcccaaaacgctgggattacaggcgtgagccactgcacccggcctaccattaacacttctattaaataaactgaaaagggggagaaactggggaaaatattggccacagatgacttagattattagtgtttatgttatttgaagagtatctctaaacagatcaccaaagaagaaactgaactagtaagtttacatatagaaaaatactcaacctcactgaaaatcgtagtactgcagatttaaataaggtaccattttgtgctgttaaattatcatgaatattttaaaattactgatggggttatagtgaagtcattattattcccacattgctgataatggggtaagtagccattacccttttggaaagcaattgttactaacatagatatcaacaacatcaaaaaatgtggagtttgactcaatggttctactcctggggatttatcctaagaaactaaagaatggaaaatgttacatgttatctggatgtgttattcattggggtatgagtaattcccatacctggaaactcataattcagggtgcttcttaaaaatgcattcttggaagttatgactccccaggtctgcaatgatgcttaatctgtatatttattaatcatactaggtgattctaattagagttgtaccttttaatgattggtatactctaaatgtccaatcagtaatggcaaattgtggtgtctctgcatgtgaagaatattagctagcttgtaaaaaaactttgttttagaataagacgggaaatgaaaaaattttgtctatactaattacaagtaggcaaaagacagccactagataggggaactagaagggaacagggaaaagtgaaatcaattaaatctgttgggccatcagctgaatttgttcataagggattttgtttctttagtcccatatgcattgctctctttatgtaatttctttaaaagtgaatttgaaattattttgaacttttcttccaggcatgttactaccagattcagcgtgagaagcttaactaggctgcataacagcttgaaaactggattatctactacagagtgttataacaccatctggagtcttcctgtagtggcaaaaaagaacagtgttgaaattggaaaggactttgtgttatttaggttgttagaatgagccttaccaataataagagccctgagcccagaaaaaaggactgtatagtttaaagggaggattgaaagggaggtaaaaaatcagattagaccagttcttggcctatgataagttccaaaaataccatttatctactatttgaaaaaagaagaggatatcccttcctacagtaaagggtatgtcagctacatgaagttgtaagaaaagcttccagtagagcttcttatattaaagaagttgatggatatttttgaatttctggtttgcctgaatccacctgcagttaccccgatccgtttgcaagaaccagatcgtacttgaaactatagtggccacactctgccttcctgagtcccttccagtcatgtgtgcatcatgtctctttgccaagggaggggagaaaggaacttttaaactgcagttttaactttttctaagctgtttcttgatgggagaggttctgtgcaaaactaccacattctgtccccaaaatgtggaatgcatccaaataggagtcttctgcctcttaacttaaaagaacataggaattttgtttttggtttctttatcatgctacagagagtgaatacactggaattcagacaccgactctgagctgctaggaacctcatttgtccatgtgcaaacgctgtattccaaggcctgtgaatggcagcctgaggaagttttgcatgcaggctgtgttttcgagcaggactaacaactgggaaataagcaaaaaactgcatcgatccccagcctggtgttgttcttccctatacttcacactgaactcaggatgggaagaaaaaggaaacaagctttggctttttccatctcaaaagtattgtggcacctcaacatttcagtgttttgctttttaaaaaatgccctattgtaagttgttggtttatactgtataagtaacactagtagctgttttgaataacataggtgctcttcctcatctcatctcctacaccgtggtgagcatacagagtgtcctgatttgtgttaagtgactgagaagatgttaattacttttgaaaaaggatcatggtttttgctctactttataatcaagacaagtgtttattaaaatactgttttggaatgttggctgtaatgtaacagcaattttcataataaaaggcattcatctttatgtggttgttttatgattgtagaagaaatgaacagggcagcctaaaagatgaaaggaaacccagacttagtatttctttagcccacattgtaatccatgcctctaagtattggcctcaaaagtccctctggggttttagaaatctctgtctttaaaataaacgtaaaccaatagttatagcaccctttctagcaaagagcaaattaactttctgaccccaataacccaaggacacgggtctccaaagaaatctattatttctttgaataaaaagcatattttgatagttactcgttattttttttcctcctaaacagatcgagggaagggaaggtgaggctttaaaattctgcttagaaacgttagatattaattatctcccagttgtaatgttttctcaagaggcctttccatcttgttgctgcctctaccagaatgtgcctgtcctctgttggaaggggaccaacccttaaaaatccgtttatgttaaatactttgcatttacattggagattgttttgagtttctgaacaaacacataaataaccacatttgcctggtaaagccaaatttacagaatttctgactctgggcgggggtggataatatgtggaaatggacaaacaaaaactttgagacaaattgacccattgagaagatttccaatgatgataggctgtctctgttctaagaaaagccatgttacaattcgtccttttactggagtcttgaatgaaactgttcagttactttggattcttcctactatatgcttttcagatagcatattaaagttataaattttgaagtgtattggaagaaaaaccctaaatctccaggccaatgtttgtaaatagaagtccttggcactcctgcagcagtttacaatggtcattcacatgcgtaatgaatgcttacagcagcccaaggatgcaggtgttatccccatttccccccatttttcagacaagcagtgaccaagatttgctcactgccagagctgggactccagcctagaacttccctactccctacttccctagaagtccagtgctttttgctactacagctgccagagatgtcatttcatagctggttatgtattgaaagttcttaaaagtgagttaaaaatgaaaatcttattgaaatcaagtgcttttcacaaaatatgctgtactcaaaacacaaatgtatcacattcccaacttgtgttttcatctatgatggagagataaggaaagccatgtgattaatatgggtagaagggctgaggaccctctgataattgccatttggtctctaccttttgccttgctgtcagcaataccttcctctcctttctgcaatatccccttccaaatgctctccccactgagcactccctgcagtattaagttttcagataaagaagtagctcctatctgagacagaaagcactatttgttaggttcagaacagtggcttgggaggggattgaccagaaggtactgtttttgatgggtttctattattagctgaacagtcttcagttgttttctcaccataacatgagagatttaataaggttagtaggttattggcttatttccggtcctgccacatttttttctttcattaaaaatgctatcttctgttgtggaatgtctgtcatcttgaactaatcaacaaaaatactatgtttttctgccgttaactatgtgttggcaatttgagagaaaatactagaatgtaggtttgaaaatgatacaaattagacttcaaggaatacttaagaagatttgtggcaggaaaggcttgtgagtaatttagttgttaggctgggttaggcatctgtggattacatcaaagaggatgtgcagagattttatcgggagcagtgaggtgactttggcagctaacaggccactagtatcctactaaagcttttgtctggataggagcaacatgcatgtttacagtcttgcaggtaagagaccttggcaaataatcctcagttaccagaagatgtatccataactgcctagcttgcctgtcagtttttaatagctaaagatataaatctgggtaatctaactcaaatggcttagtttcattttaactcaaatgatatggggaattttatgatcttgaaagagcaggttttgcttcgagaagccatttcttcagtatggaataatgagttgtcaggaagattgagtacaatgggcatttgccctggtcctaatcaacagcatttggacccagaggaagccagctatttttgtaagggccatttctcatcattaagtttccaagtgcttttttagggtttgtctagtaaaaagcactattttgaaaaacaagcatagtaagggtagggggttgtggcatttaatagtacgttttaaaaagctaatggaaatactgacttttaaaacaagatttaggacaaattccttaggcatcagtcacactaatgcatcttctgagtcaagaactggctatcctttctgtgtactcagtccggaattgcatgtggtgggtgcttacttatttgcagtctcaatcaagaattctcactctcaagatagcagaaatagataagcttcaactgacaaatttggtacagaagtcatggaaaggaaggtaagtcttttgccaggcatcatgccaggcatcagcatctttcaggactaaggaaacaaaagaggaaaactcgattttactacatgttaactctactgaatacctccttgaatgtcagattccttatctgtaaaacaaaggttttgcatttgattatctctaagatccgcttctgcccccagttttaaagtttgatagggaaagaggtttaagtcaggataccaggccagggaggaaaggaagggagggcacaggcctctggagttcagctgcctcccccattaggattgaagtcccagctgctggctactgccttgagggaggtatcagccttttacttctggatcttggcctctccttgttctaccccttcccaacaacaactgaacataccaagtgcttgctatggcccaagcactgttgcaggtgaagctgcagcatgaacaagataagcaacatctctgctccccaggccctctgcagacatgacacctgcgggagacagacactgagcaagccagtggatacaagaactgggaaaatgagaagtgctatgagggcaagaagttgcaactgttttcttagctacctggagggagggaaaatcattttctggaagtttttttctttgagttttgtcttagctttggctgtcataacaaagtaccatagacagtggcttaaacaacagaaatgtattttctcatacagttctggaggctggaagttgaagattgggatgccagcatggttgggttcttgcgagggttctcttcctggctttcagatggccgcgttttcactgtgccatcatctggcagggagagagagaacacatgaactctgatggctcttacccagacgctaatgacatcttgaggcctctacctcatgaccttaacccagttacctcccaaaggccccatcttcaaatgccatcaacaatggggattagggcttcaacatctgaattgggggtggggacacaacattcagtccaccataaatttgtcataggaacctgaagatgaggagccaagcacagtttttagaatttgcataagttgtagattactgtaattactgtttttgcctctatggctgagaaactttgggtcaaaacgagccttttagaatgtatgaattagttatctaggtagccctgaagttggctctagatttattagaagctattttaaccattgcattcactcaagaaaccaccgcctatctgtgaagcacagtctatctgtaaagctccctcacaataaattcatctcagaaatatgtagtctctagtgtgtgcccccaactgctgaatgggtaggcctagctcagcacagtcattcgggcattaaatatggcagaaatgtggtccacctcatgacgtgcaaacaacagttggcttgtttaatctgcactgctttgccaaggacgtgtgatttgtgaggtgctggaggggaaccaattttaagagtcagcctgagtgtcagcctcatctgtctgctctgacttttgtctgctctctagcaggcactccatctcccttttcaattttctaccctggaagtgctcccctccagggaggaagatgagtcagatatgcagctgtgatgctaaatgattcaatagagtcaaaaacaacacagaacacaggaaaacgcattgtttaatctgactcaattacaagtgggcaaggtaggtgatggagggcaagtcaaaagcataacgatgtcaagctttggtagaacctagcaaaccggaagacttcagggtgtttggaaaggaatgtgtaggggaaagttgtctaaaatgctgtaacagctttctgtgttgctcttctcactgccttagaatttagagtcaaaataataatgatcttttcttcttttagatagccttcctggcttcaacccacaatcagtctagattctagacagtggttctcaaccctatcagagtcaatactccagtctttaacaactaatttgaagtgttccttttataacaaaaaccttaatgtattctttattgtcctactataacaatgttgttggtccctacccccaccgcataccccttggttgttaccattttggtgcactctgagcccactccagctgctagcccctccacttcctatccgaaggtatacatgttgcatgctggaagagtcagaaataatgctctctgggaagagctcttaacctgttggctctaacaggggccaagagagtgagggtatttatataccaaggttgccattggtgtataaaaaccctcatgttgccattggtgtgtaagtactctcactcccctggcccctgttcccccgtgggattaagctctagttgcctacagtggttacttcttgataacaacctattactggctttttcaccttccctgcctcaataccctactccccattgtatattaaaccagtgcaaaagtgtcttgtgtttatatgtaaagaaaagttggcgtctagattcagataactacaggttttattgtttttcagtgacatgatagttcagtgggacatttgaaagttatacagggcatgaggcgattcttcactgtgtagggcaacttgtggaaaactttgcttaaagagcagtaggcatattttctttgcccgtgttttcttaatcccttcctcccctaccctgttggccgaaatgtagacgtgatgactggagctgcagctgccatcttggagcaggtagacagaaccatgctacaccctagggtgacagagcagtagccggaaggaacctattccctgaggacttcatggagcaaggctgccctattagccctggattctctctgtctctgaactttcacacgaacaagatataaactactctgctaagccaaaattattctgggtttctacttcttgaaactaaatctacctaaagcaataccaaaaataaacattaaaataagcatttcaaactagttttcaaagactggtattaaatctgatagggttaagaaaactgtctaggccaggtgcgatggctcacacctattatcccagtgcttagagaagccaaggtgggaagattgcccagaagttggagaccagcctgggcaacatagtgagaccccatctctacaagaagttaaaaattagccgagtgtggtggcacatgcctatggtcccagatactcaagaggctgaggtagcaggatgatttgaacctaagaggtcgagggtgcatgatcatgagccatgatcatgccaccacacttcagcctaagcaacagagtgagaccctgtctcaaaaaaaaaaaaaaaaaaaaaaaaagggaaaaagaaaactgtccagactctatacaaattgtaggattgagccaggaaagcactctagaaacaaaacaaaacaacagatcgttacagtgttgtctctaaattctaagagtgtgcctcagtaataacccataattcttgcaactgtgaccagaccagctagttcttctatgaagaactataaggtgcaatgagaggaaatggggcacctgagtggagctggtccacgcaagacttttctgagctctaatgatgggtaaagtcaactgggtaaagaggtggaagataaataaatatagtatttgtcatttacttctaaaaagtgggtaggtgtggtttctaggaaatcaattcttctgaaaggctaaaaaatgtgtttaaaacatggagttagggggagcattttatgcaatagtcgttttctctttcacgccactggtgatggttaagagtaggcaccacaggggaagactgtgtttcatttgatgtgtatcccagtgtgtagcacagggcctggcttgctgaggaaatgctattgaaaatatattccagtgtgctgagagctggtggccagtgggactgagtgagctgtgtgccgtgtattgacccgcttcctagtcctgaattcctttcagaagctccggcagggaggatgatacagtcagacaaaggagcagatccaccagacaagaaggacatgaagctttctacagccaccaatccacagaatggtatgtgtcaccaggactccttttctagaccagaaagtaatatcacctctgacatgtgatcaaatgaataggcagaaatcctgacagacttactgtgatccctatgaggatcttgtacatttttggttgcactactgccctaccagtgataactttaagaacaaatttcaagccaggaaggaaataaatggacatgatggattcaaaacctttttttcccttacctgacaatgttttatgtaaaacttagaacttcttaagttgttcacattcagaatatcactacaacactgtgaaaatactgtcaaaaaatagaatattcactaaaatctgtttagagaccctttaatcaggagaatactgagctttgcattaaatctattgggagttagaatttttcaatatcactctcaataagaattttttgagaggatgaaatgactcttatgtttgagttagagaaagaggatacagaacacaagtagataattttgggataaacgacaggctggtaagatgggggaggggaaagcaatcattttcctttcatgacatcttacatctgcacatcacgatctattattttactcagtgttaagaacaacactatgacaaagctagcaccttctcatcttgggcaaagaaactgggtttcggatagctatgtgactttgtgacgttcacaaagtaagagatggaacagggcttgaagtcagatcttttggcctgagatccagtgtcatttccactcctggtgagaccccatggcatgccccagctatctgagttgcctttcacatttacacccgcacctgccaccccatctctgctctcttcctttcctaggcctctcccagatcctgaggcttgtgctgcaagagctgagtctgttctacagcagagatgtgaatggagtgtgtctcttgtacgatctcctccactcgccgtggcttcaggctctgctaaaggtgagtgcttctttgctcggaagcctttgcttgctgaaggggttgtggggagtgtgtagaaaatgacagcttcagtccattcaggctggatagtggaatagtttataaacaacagaaattgatatctcacagttctgtaggccaggaagtccaaaatccagtcggcagcagattcagtgtcttttgagggctccctctctggttcctaaatggtaacttcttgctatgtcctcacataatggaaggggctagccagctctcttggggtctcttgtataagggcattaattccatattcatgagggcagagccctgatgacctatcggctcccaaagaccttacctattttttttttttttttgagacagagtctcactctgttgcccaggctggaatgcgctggcctgatctcaactcactgcaacctccgcctcccagcttcaagcgattctcctgcctcagcctcctgagtagctgggattacaggcacccaccaccacacttggctcatttttgtagttttaatagagatggggtttcaccatgttggccaggctggtctcaaactcctgacctcaggtgatccgtccggctcagcttcccaaagtgctgggattacaggcatgagccaccacacccagctagccttaccttttaatatcatcacatatgcattttggaagtacacattcagatcatagcaactacttacccaatggtgtcatttatcaactggtaggaaatttcaacttggaaaaagttcttagaaggcaactctcagagaagagctacacaaacttcttcgcttaggaaggaattaacttaggtggaggagaatatggtagtcccttccttttctccccacagctctttttcttccagaggccccctggaatcacaaaacagccaccacgatggtcattggcaacactttatcagctggctacaaccgtttgtccttgcagcaaccctggataaataaaagtgctttaaaaaattattcctatttgtttgttaaagttagaaagtaaaatatctacagttctgtttaggtaccctgaagtttcttattctaaagtttcttctggcccagtgtgatggttcatgcctgtaatcccaacattttgggaggccgaggctggtggatcacctgaggtcaggaggttgagaccagcctggccaacatggcaaaaccctgtctctactaaaaatacaaaaaattagccatatgcagtggcacgcacctgtaatctcagctactctggaggctgaggcacgagaattgcttaaacctgggaggcagaggttgtagtgagccaagattgagccactgcactccagcctgtgtgacagagagagactccatctcaaaataaataaataaaatagaataaataaagtttattcttttttaatttggctaaaattccatgcactatacaatagcgtctaatagatagtagaaaaatagcatctactatctagtagatgccactactataattttgttgttctgaacaagtgttattattaagagagatccttttgaagttattttttgggatgtgggtatttccttcacttaagtgtgaaatgtggtctgtcttatagtgcatgttaatattatacaataaaagtggcaacatctttggcatgaatgaagtactcctcatagcacctgttataaaacacctgatttctatcaggcattttcccacaggatcagctaagataggagttttaatttcatgatgggcattgcctttgctcaccactgctaggcccttggtgagttatccaatcagccttcatcacttccaggtaaacctgaatgcgggccctgggatagagcagggaagcagcatcatcactaatctggatagaaaagactgggggctcagccggccccttgggccttatttcttcgtctgtaagagaaactcaattcctaaaataagatcaaggggtgcattgcagagctaggcaggctttggtgtcctcagcccaaacctagatcttggtatggaaaaaaattcccaagggtatgtggagatgaagttggaattttaaaaaatgaacttgtactagagaattaggagaggaatgggaaacagccccaaagcacaaagcagagtacagagaagcgtttgtggcatgcccaccacttattcagaaccttcagtggccctgagccacacagctcacatgctgcacaggcgcccaacacaggggtcctcacaggtgtctggtcctaaagggcccctcctttaagacgctcctttatgcatcatctacaaatccccattggtttcagtcccagacaccctaccctcactctgtttaacaagattaaaagtttgaatttctttttattactgaaatgcttggagaagatcaatttcccaatggcagccaataattaagcttttgaagcatcggggccaccaaactcaagttcatttctctttggcaactagagacacaacttactaaacaccaaccacaccgtgctgtgcagccattggtgcagttgcctggggtgtttcttctctttgagagtcttaaatccaaaatggcaatagtcatattatcaatatcaattctccctcccttgtccttctgcagatttatgactgcctccaggaatttaaagaaaagaaactagttcctgccacaccacatgcacaggtgttatcctatgaggtaaggagattttattccacaggatagtagagctctgatgtggtgccattttccccacattgctagttcaaatgaattaaaggttctaaggaaaagttttattgatgactatgcatctaataaatgtttctaattgaactttaatataaggaagaacattggctgggtatctccccaaattaaaacactccccaccaccacccacgtcatttttagcgtgtgttcatttctttcttttttcctaagtctcgtactccatttgcccttcataaacagggtaatgttatagtaataattctcggatttatatctctagcctggagatttccctaaattccagtctcaaatatccaaccgcctcctctccatctcacttggatgtctaacggactcctccaagttcacatgttccaaactgagctcccgatcttccccacctgccgatcacccccacccactcttctggaagccttttctatctcagaaacgatacctgtgttcttgcagtgctcaggccagaatcttaggggtcatttcgactctctttttctgatacctcacacccaatcagatagcaaatcctctcagctctactttcaaaatatatccaggatctcaccaaaatatatccaggatctcaccaccccataccatcatcatcatctcttacatagatagttgcaaaattgcctcctatctggtctcctgtgtccactcttgctcctctacagtctactctcaacacggcaaccaaaaataccctctttgaaagcaagtcaaatcatgtcacttcctcactaacactcaaacccttcaaatgacttcccatctcagagtaaacaccaaagctctttttttgttttgcttttttgtttttgatacagagtcctggtctttcacccagactacagtgcagtggcatgatctctgctcactgcaacctctgcctcctgggttcaagcaattctcgtgcctcagcctcctgagttgctaggacaacaggaacccactacacctggctaatttctgtattttgggtagagacggggtttcaccattttggccaggctggtctcaaactcctgacactaagctatctgcccaccttggcctcccaaagtgctgggattacaggtgtgagccaccacacctggcctaaacaccaaagttcttacatagctgaacacaatcaagctgctgttacctctttgacttcacactcaatgctttctccattcactctgttccagccacattgaccccttgttattgtttaaattcatcaggctgggtgcagtagctcatggctataatcccagcactttgggagcctgaggcaggctgatcacttgagcccaggagttcaagaccagcctggccaacatagcgaaaccccatctccactaaaaatacaacaacaacaaaaattagctgggcgttgtggtgcatgcctgtaatcccagctacttgggaggcacgaaaattgcttgaacccaggaagtagaggttgcagtgagccgagatcacaccactgcactccaacctgggtgacagagtgagactatctcaaaaaacaaacaaacaaacccaaaaaacaaatcatcaggcatgcttctgcctggggccctttgcactcgccattccttatgtcagcaatgctcttgcccagatatatacctgatctgtccctcatctccttccagtctccactcaaatgccaccttctcagtgaggcttttcctggtcacctatctaaaattgtattccctcctagcacttcctagccagcttccctggtttatttttcttcttaacacttgtcaccatcaaacaaaactattttacttacacatttcatttgttgtctgtgtctcctccctagaatgtaaactccatgagaatggagatttttgtcagccactgctgtttttgcatcacctaaaacagttcctagcacacagtagtgttcaataaatatttgtcgaatgaatgaataaatataatccattttattatttattgcccatcccatattaaaagaaacagcaaaaaagaaagaaaaaacttctgctctcaattccagtaatcaacaattcaaattgttctcagttgtccacaggaaaagcacatatataatattttattcagttgaaatcccagtgaatggaggtaaacctttgtaaactgcttgttttcatttgactgtaggtaatggggctgactaaagtcttgaaaggtcttatgtcctctgaaagcaggtctacgcctaaaccacagcagagagagcagaatttttttccgcttagcactttttattgtaacaagcattaaaattgctaatcaactgatactctaaaagagaaattatgatttccattttctatttgaagaatggagcatcccatgggattaagctctttgagttccccaggtacgttcctagagaaactcatacagcttcataagcctgcaaagcattgacatcagccaacagctattatattttagaggcactagaggaaaagtgccttggttcatatgctgttaccaaattggtacatcctccatgcctatgtgccaggattgggcattgggtttagatccatctcaactcttgaattctatttgctatattaaagtagcaattttaatgaataaagaaggatggtaggctttaatggatggctttatagatgaaaaagaaggctccagtaatagctttttaaaggtcaatatcatgttagtatgtatgttatccagcctgggtgaggttaagtaggtgataaagattttttaaaatttttataatgtatccttttccatgaaccaggtagtggagttattacgtgaaacccctacttcccctgagatccaagagctgagacaaatgctccaggctccacacttcaaggcaagtgcctgctaaaatagaaaagatgtccccatctggcacatagacaaagttgggaaggagaaatatatgtgatggaaaatgttctctctgaatagatgttctattactgtacacggttactgaccaacagattgtacttaaatatgtgggactcagatgtgactagctcagtgttgtcaatcatgcagtcaagcctgctgtgtttatgaggaggcatccagaactttccatggtgctttgtttcccctacaaagctattgcccatccaaaaatcttgggtagcaaacagggaatgttctagttatagaggaatacctccatgcttcctttccaaagtgggactattttgagttttagataatgtgtgtgtatttggaatatacagtataatgatgattatccctgtgagagggtttatgaagaacatttgattgcagaacagaaacctatctcttagtacttacagatttgagaccaatttatcaataaattagaactttaagacaacgtctgtatttggagtgctgaaatttatcagtcaaaagttataattcacaacacaaccaccagtcatcaaatatcctcaacggcacgcactacttagagaattttctgagttccaactaaattgtgtctaccaatctcagtcagggtggcagagtgacagcttctccagcccgtgaaatgaagaatttaacctagtggactagtcaaagaaactctttgatcataccctatgatcataccctatgatcaaagagcttgatcatatgaactcctcattctgtaccacatgagcccttgagtgttactaacaaattaaaccagcaagatattttgattgctgcccttcgttctaccttaattggggaaaatattataaaagttgttttgtagttcaaactccacaggggcatcacagattacatgggctgccaggaaataagaatgtcgtggcataatacattttagcagaaatgaaagagtgtattgtgcattgcttaacctctctgtgccttatttccttatctgcaaattgaggacaattaatgtacctgcctcatagaattattgtgaagatcggattaattcatataaaatgcttcgcactgtgtctggcatgtctgtattggtgtttgttgttgttgctgtgtcttagatagtattgagttactatcttctagaggggtttggcccatgtgtgacatttgctcaccttttccttccctgtgcccaggccttgctcagtgcccatgacacgatagctcagaaagattttgaaccccttctccctccactgccagacaatatccctgagagtgaggaagcaatgaggattgtttgtttagtgaaaaaccaacagcccctggtaaggaaatcattttttatctttccatttagggtaagcttaggttaattgtgaaccaaattatatctagtggttacttgggcagtagccttgcctgcgatcacatatacagtgataataacggctgtcaactctgcaagttttgcctgtggtttcaaacatattacatgtcacggtgttttctctaaggaaagatttcagcttagtgtttttcttttgtgaaaagtaagatgagatttataagacatttttgtgagaaataagacatatgttttattttaatatttggctttctgacctatgcatgtatttccctcaattccattgcatttgcctatttccttatattaatgagaagctaaggaaggcattaatttgattttctaagaacagtccctctaattaggttttaattgtgggaggtttctgtatctttggatgaatctaagtattcttttatgtctgtgtggttgaaatgagaccccaggaagccaaagccgaatggcctttcctttttgatggcatgctatgactgacaggccacagggcactgtgtggtccctccgtccctggttgcctgaatagccttgtttgaaaaaccagagctgcattgattgaaagaccagagctgcattgattgagggaagccacctggaaaatggtcatgtcaggtaacagagggatctcgtctattctctcttcagggagccaccatcaagcgccacgagatgacaggggacatcttggtggccaggatcatccacggtgggctggcggagagaagtggtaagctggagcagctgggattgagagttaccagaaaaacaggaaacccttgactgtttaggcttctttctagagaaatcccttttttttctttttttttttctttttttttttttgagatggagtcttgctctgtcgcccaggctggagtgcagtggcgtgatctcggctcactgcaagctccacctctggggtttgccattctcctgcctcagcctcccaagtagctgggattacaggtgcccgccaccacgcccggctaattttttgtatttttagtagagacggggtttcaccgtgttagccaggatggtctcaatctcccgacctcgtgatccgcccacctcagcctcccaaagtgctgggactataggcgtgagccacacacccgtcctgagaaatccctctttcttaacttgggtcagggctttagtaagttccatttcttggataaagcagtaaagaaagaagaaacaaatattccagagaaatcttactcctctccttcactgagtccttcccattctaggtaccacattaaagtctctcagtttacattctcatggcaacctcaaaggtaactattatcatgccattgtatagatgaggaaactgaggctcaaagagattatgaaactaacttgctcagagttacaccgtttgagtcaggattcaagctgcttagctctatattcccaactttttctctgcactttgtccttctactttcagaaaggcatagctctttcccatcttgaaatgccttttgctcacactttcaaccagttaaccagattttcatcctttcactgctgttcttctaaaaactttttttttttttttgagacagggtcttaatctgttgctcaggctggagtgcaggggtatgatcatgactcactgtagcctcaacttcctgggctcaagcaatccttccacctcagcccccgagtagctgggtccactggtgcacactaccatgcccagccaatttttctattttatgtttagatagggtctcactatgttgcccaggctggtgtcaacctcctgggctcaagcaatcctcctgccttggcctcccagactgttgggattacaggtatgagccaccacacctggctactgttgtgcttctgaaatgagtggttctatacctgttatacatcttcactaccccgaagccctaaaacctagcacatgctttatacttcaacattctcattgtaaataccaagaatttcctagttgctaagtccattggcccttccttcctcctcagttttcttttcttttctttttttttttttgagacagagtctcactctgtcacctaggctggagtgcagtagggcaatcacagctcattgcaacctctgcctcccgagttcaagcaattctcctgcctcagcctccaaagcagctgggattacaggcatgtacctccacccccagctaattttttttgtatttttagtacagacagagtgtcatcaagttggcaaggctggtcttgaacttctggcctcaagtggtccacctaccttggcctcccaaagtgctaggattataggcattagccgccatgcctggccctcctcagttttattttcacttcttgaccacatctgatgctgttgacacctttcttgaattttttatcatgcttcgtttctgttctataacaccattccacttcttctctcaactatctgacaactccactgttttacctcacatttctcaagtcttcacttaaaccccaagtttctccacattttctcttttgaataatacctaccccatttcctttttgttgttgacttatgaccctgacatctttggatttagtgctattttcttaccagcgttctggttccattttacaacatcagactagcaaaaataaaaatatgaccataagtcaatgccaagtatttatgacgaggtagaaaaatggactgttcacacatttctgggggtgatgtaagttggaataaccagctttcttttctattattattttatattaaacatttttagagcatgcttgggttagtgagttaaatagctatcgaggtagctactgctatttttatcctacttctttgtatctttctttgttttttgttactgtctgcctagggttgctatatgctggagacaaactggtagaagtgaatggagtttcagttgagggactggaccctgaacaagtgatccatattctggtaaatcttctttttgcctttttgttaatgacttggagaaatgccaaggctgaactgggaccatcaagcccacgtgtgtgcactgggatgtaccggggactcaagttctcttggcagctttctccctccaggctcccagaccttgtctgtcacccatgtcacttgctgacctccctcctctaccccgagaagttctggtcctggctgggaaacttcccgtcccaagcagctccttcctccttcagccacgggaagactgccagggcccccagcccagctccctcatcacctggtttgctccattggaaactgaacctggggtggacagagtgagacttagtaggagagtctgaacccaagcaaaccactccttcccccactaacacttttctatggctgaaatgttcaacatcttcctggagggcagcctttcttatagtggatagaccagtggttctcaaactgggttcctgccaggatttcatagcagtggcttagagactgaggcgaggagtggtgctatgagacaagcacctaaatcctttgtaagccactgctgcaagattctgtgtggtatagaatgtgctgcaaaggaagcttgaagtactagaaatcacagatatgcatggcttctaccccctggtgccagctgtgatgttgccgggacagtgggattttgaaattcctgagtacaaacggggtcttaatctctagatgtttaatgcccatcacagtgtatgtaacaggggaattcttccttcccccggtctgagagctccctatttcctctattagtttggaaggttgtcagttctcccagaaaacttaggagcccctcttcttccccatcagactggggtatctggtgtagaaacaggcattcaggaaatgcttactgagtaagggaataaggagggaaagtcagatggagatcctgtctctccccagggcctgtgtgaggaagaccttgctggtggggtgtttctgtttcagtgtagggtgggggggggtccctggaagaggccacttcagtgtggcttttagcagaccagcgaccccagaaccacacagcagggcagatgcaggggtaaattgcttcctgatttccatttctggatggtgacagctgcagagcccttgtgaaaggctcttgggggattttaccatgagacctggatacattgcactgtaactctgtccaccgagccccagtaaccctgctagctccatgattgtcatcctttctcctctcttattttccaggccatgtctcgaggcacaatcatgttcaaggtggttccagtctctgaccctcctgtgaatagccagcagatggtaagaatttactgagccttcaatctcacacacagtaaatccccaagtaacagcaactaaatatgatgcgtaataatcctatcctttgtactgtgttggacctgggttcaagactgtgttggatatttttcaatactgatggcccgagaagcaaaataagtaaatgagtacagtacaaggagatgggatactaagaagtcaagaagcaacataaaaaatcatgaacatttgagcctaaacttctctaagctaagagattctgttcccaaagatgctttttatcatggtacttaggctcaggaggcgagttctcctttttggtgagggtggagaggaaagataggagtagcaggtggaggagtgggagaaatggttttaagtcatgatggcccatgggcaagggttcttcggatggcaccattaggcaccttctgatagcgtcattatgcacctgccatcaggtgtacgtccgtgccatgactgagtactggccccaggaggatcccgacatcccctgcatggacgctggattgcctttccagaagggggacatcctccagattgtggaccagaatgatgccctctggtggcaggcccgaaaaatctcagaccctgctacctgcgctgggcttgtcccttctaaccaccttctgaagaggtaaggaacgtcaccactcctggactcagggctgaaccatcaggaaacaaaatgtttttcttgggtttctgttacctcaagatgagataaagagggacaagcagatgaatgaacacacacacactggtttataaatccaaatgtcaacttatcgataaaccctaagcatcttaaataccaaggagacgagaataatcatatcagctagaaaacagggaaaagtcttgggaaactaaattaaacttaaaaagtgctatggcctgaatgtttgtgtcctctccaaaattcatatgttgagacctaatccccaatgcaatagtattaagaggcggggcctttagcaggtggttaggtcatgagcactctgccctcatgaatgggattagtgcccttataaaagaggcctgagggagcttattttccccttccaccatgggaggacccagctaaaaggtgccatttatgagtcacggagtgggccctcgccagacactgcatccactggctccttgatcttggacttcccagcttccagaactatgagcaaatacatctctgttgtttgtaagtgacccagtttacggtactttgttatagcagcctgcacagactaagacaaaaaaggattcatctttcaaggctgagttgagacctcaatttcaacccaccaccctcaccttatgctactgagttttgacaagctaccaagggagggcgtgcaaatagaaagaagcagcagtcccaggctcagccactgttaagagatcaagaagaaaaaatggaaccagtaaaagatattgagaaggaatgaccaacgaggcagaatgaaaatcaagactgtatggggtcctcatcagctatatcaccttctgctgggaaggctgagaattgaccactggatttagcagtatgacagtcattagtgatcttaataagagcaatttcagtggagaagtggggccgaaatcctcattagagtgggatttgaagaaatggatgacagtgagcataggaaactctttgagacattttgggaaaaagcagagcagaatgatggagaaatagccagaggggagagtggagtggtgtgagcgaaatttttagatggcataagtaatgggagtcatccaccagagggaacattttgatgataagggagaaacagaagagaattgctgttgttgatgtctttgagcaggcggtaggagatatgctttagtattcaagaagagagcttggcctgacctaggaccataaacagctcatccatagaaatggtaccacgagggaagatggagtatggggcacagctgagggtggagcatatggcaggcacttgtggaagttctctcctaactgttattttctcagtgaaatgagaaatcataagcagagagcagggtggggaagggggcattgggaaggagagagtagaaagcttgaaaagtttccatgagagttggagagcaaacagattaggtaaacatagtgtgatcagcattaaaggccctcttaagttaaaggtcatatatttgaagtgcttctggggtgcgggtccagattagacagagggttggatttaacagcaaatcaagagggggccaagggacagattataaggatggagtgtgacatgtaagctgtttaggagggagatgaggaaatgaagcaggtgaggattggtgagaaggaagtaagatcaatggattgcaggtctttatgaggtcaacggtgtattggggctgggaagatgggaagtgttagtaggagaaagggatgctggaagttaaaattaaggagagattgctgttgtcagtactgatgaggtcttgggtatgacaatgggaggcagtggctgaggttgaatgagggaaaggttattggaaaagaggagatcaagcacccaataggccagggtgctgaaagggacatttgtatgtgtgataaaatcattgagaactgtgacagaacagtgttgagacctaggagtgagcaggagtgagctggcgatggctaccagaaaagtagtgggatgatgttcaaagctgggggctcctagggaagaggaagaataatctggaaatggcagtgagaagcaaggacacaccccccacctccaggcccagtggaaggaaagctatacacaaggatgtgctggagccatgtgacgcgagccatctcttcacacacccacgttcagtgaagacaggatggtagcttgaaatcagccaccgtgagagcatcaacactgtagaaatcagcagagcctccgagtcagggcttccatcccccagagctatttcaccagcaccccactgggcgtgggagaggaaacatccccctcttgaaggctgcaggagaagcagaccacagggagagttgggctgcagttaaagcaagaagaaagggctcaaagaagaggctgaggtctaagagagtttgctgaagatttgctgtgggttccagagggcgtgggtgggtggaaggggtcttatagggattaaagcacaggggataaggggtgacctgagcttgggggctgaaggacatgaacagggataaaggcctaatgagattagtcctcatggtttcaggtcagaaagtggtgaggagggtctggcaggggccttgcaaggagcacacaaaacccaattatgggtttcttgggggggcacacaaacaaagaatgataggaagttctcatgctgcttttagtcattgccacatgaaaacctaatatgaaaataagaaattaagcaatttcatttagaagcaatatgtcaatagcagagtctacacaaatgtcttgttggggacagaataatggaaggcacctcggactctcctgaatctcattcagaaaaccaggaggcacattggaggactggaggagggtgttgagactaaatccgctgccatatctgggcaagaggcctgccccgagcgcaggctgatgtggcttttgagaagtcagtatctctgagcctcaataaatgaggtctttgatatctacaaacaatttttctctcttcctacctctccaactttgctatgagtaaaaatgagctgggtattttgtaaaatacggattccccggctctgccctcccctctctgaggatctgattcaatagatatggactgagccaggaatctgcatcttcaccaagcgcctcaggtgctcagggtaagtggtatgaagagcagcattgtgcttaggaatagtgaatgagcgcataaaatattttttaaactctttataagagtgacagatttgaatgcaagtagctgggggggttttgttttggttttgcttgtttgtttttactttcaacaggtagaaaattatatctgattttagaaaactgtgaaagagtgaggaggaaggcttctccaaaaagggcatattggtggaaaataatacccatctaaaggagtttggaatgactctattgcaaattgggggagttagatgttgatggtttgtgccagagtagcaaatatttttggcaagtagacgtgactttccagtgagaggccccattcgctggagtttcccccagagggaacatgtgaagatgtacaggatagcattttgtaagaatgaaaaaccaggagctcccagaggagaaaggccagggtgaagcctagagaggaagctgatagagaatgagagacacagagacagagatagagagagatcagactaccaggtaattaaccatggagtaaccaaggaaaggtacagaaggttaaaaaacaggaaacacagatatttacagagctcatcacctaactaggaatcaagaatcttggctctggcctgcatgtgctgtgaattaaagtaccttaattatgcagagaatatttctggaagaatgcacaagaaactgagcagaaggaagggaagaagccttactttttaaatgtttttattttttgagatggagtcttgctctgtcaccaggctggagtgcagtggcatgatctcagctcactgcagccctggcctcttgggttcaagccatttccctgcctcagcctccagagtagctgggactccaggtgcgcaccaccacgtccaactaatttttgtatttttagtagagatggggtttcactgtgttggccaagctggtctcgaactcctgacctcaggtgatctgcctgcctcggcctcccaaagtgctgggattacaggcgtgagccaccacacccagcctacttttttatactgttaagatttttactctgtgtatatgttatctcttcaaataattaatgaatctgaatgccctgcatgtccatgctaattgagtttacagtaaggtctcatgtattatttagtcctcacgatgccaaatgcgctgagccccatttcaaaagtggggaactaagtttcagacattaggagatttgtccaagatcctaaggaggggaagcatgcctggaacccaggtctgttgaatcccagtccatcactttgtagattatagcatagatgcctcctgctgctaactgttcaacctccaccacattgcttgacttccctggatcagtttcctcatttctaaagtgaggaaggtggactaaattggcccttcttcaactctcttgtgaattagaatcacatggagagtttgatttaaacatgtagatgccctggccttatctccagggaattggaggcaggagctctgggaggcccagattatttgcattttaacaaacacctcagatgtattccaaagtttgagagattaaattagagcttgttgcctttaacatacatatgacttacctgggctcttattaaaatggagattctaatttggaaggcttggggtggagactgagattctgcagtcctcacaagctcccaggtaaaggtgatgctgcagttctgggaatacaaagaacagagtgtcttcgaaatcttctcttgctccaaacttcacagtgttgaataaagaaggaagagcaactttgcttagaaagttgctttgaagtaggcaaggcaaggaaaacctgcccaaagaaattgctgggggactcaagggaagaggaacaagtcaacagaggtttcaggtgccaagaaaaggtgaagccttgccctggagcccaggggtgatgctagagatcaagaaaggagcagagtcatctatagaaactgtagagagcctctaatagcctgagagggaaacctgaacatgtcatgagaattcgaaggagactgcaaagacaggctaacatgcctgagaggcagcttaccacgggtcatttactgaaactccatgtgcaaacttgtgatcatgtgcgagattgtcactgtaagtctttgttgttctgaaaagatcccgtgaggcagaagaagacatgagagagcctatatgtttggaaaatttatttgacaatgtatttggagaagcaatcacccttttcacttgagtgaaggcagcagaattctaagaaacattctgtttgtcgttgctctgggtctgtttcatctaggttaacaaagagtggtttttgtttgttttttgtcgcatggttttttcccccccataggaagcaacgggaattctggtggtctcagccgtaccagcctcacacctgcctcaagtcaaccctatgtgagtattgcaactgcccgacaggttcttcctgtttgcaataaagaccatggcattgcagtaaataaagagtctaattgatgtgaggctggccatgccacatgggagatggagttgttatttaaatcaatctccttgaagggccctagattaggggtttttcaaaggtagtttggggagggcgtgggggtggtggctattcagtgggcacttgctactgattggttggatcagagacgaaatcatagggagttgaagctgtcctcttgtactgagttgcttctgggtggagccacaggagccattggttggtgggtccagatggagccacaggtgtcagacatgcaaaaaacctaaaaagatgtcacaaaaggccaatcttaggttctacaatagtaatgttatttgcaggaattattggggaaattgcatatcttatgacagtctacaccttagcagaattcaggctcctctccttccactaacttgatggtctctcattagctttataaaggcggctgagttttaggggaaggactgttatcatttaaactataaataaaatgtctctcaaagcgaaccctggaatgaaggcagcttgaaagctaaaagcaagaggagcttgggctagatcggatctcccccactaccataattttctcactgatgtaatttttacaaaggcaatttcagtatgtgtctacctcagacccagcatgtgcatcctgggagagcctgcttcctccctccagggctggcttcctgcctaggagatctctaaatgtccccactgcccccaaataatctccctggcagccagccatctgaagtcctaccgttgacattccttctttggatttagaagggttttcagtttatgaaaatgcatatgttcttatcttggtgacacctgaagacatccctccccaagttgaggccttccaagatctctgcagctcatatgtgcattatacctgactggcaagcaaggctgcataactacacatataccttcatttgggttctatcaacttagaggacttaaccttcacactgttcagaagcactgattaacaattgtgtatgcctttggtgaataaatatgggatggaattgttacttaatgaatgcagtttgattgctagacaatattattcaagcagctggggagtggtgagtaaaggctccatggtggcaaatgcttgattaaaggtgctgtggcttggcagaggccagctgagcctactgagcgaggcccttctgaaatggccctcaggtgggccctggaaagggggtaagggagggaactgggcaccagaaggacggaggggaggcaaagagaggagactggaaggacacaaaaagtatcaacatcacagatctgcccggggcaagcctcacccactttattatgtctcccttctccaagccaaaaattacttttccttttattttcttattgaaaagatgtgaggacaactataaaggcagtttttgacaaaagaaaacatgccttctcaatgacaatattttcatattaacttccagtggtgaacacatattttagatggttatagtaatagctgcaataccactttttatttttttaaacttaacatctttttttttcttttttaattatactgtaagttctgggatacatgtgcagaacgtgcaggtttgttacataggtatacatgtgccatggtggtttgctgcacctattaacccattatctacattaggtatttgtcctaatgctatccctccccttagcccccaccggccaacaggcccccagtgtgtgatgttcccctccctgtgtcgacgtgttctcatagttcaactcccatttatgagtgagaaaatgcggtgtttggttttctgttcctgtcttagtttgctgggaatgatggtttccagcttcatccattcccattcagtatgattctggctgtgcgtttgtcataaatagctcttattattttgagatacgttccatcagtacctagtttattgagagtttttagcatgagggggtgttgaattttatcaaaggccttttctgcatgtattgaggtaatcatgtggtttttgtcattggttctgtttatgtgatggattacatttattgatttgcatatgttgaaccagccttgcatcccagggatgaagccaacttgattgtggtggataagctttttgctgtgctgctggatttggtttgccagtattttattgaggattttcccatcgatgttcatcacggatattggcctgaaattttttttgtgtgtgtgtctctgccaggttgatggtatcaggatgatgctggcctcataaaatgagtgagggaggagtccctctttttccattgtttggaatagtttcagaaggaatggtaccagctccatttggtcctgggctttttttttggttggtaggctattaattactgcctcaatttcagaacttgttattggtctattcagggattcaactacttcctggtttagtcatgggagggtgcatgtgtccaggaatttatccatttctctagattttctagtttatttgcatagaggtgtttatagtattccttgatggtagtttgtatttctgtgggatcagtggtgatgttgtcccctttatcattttttattgtgtctatttgattcttctctcttttcttctttattaatctggctagtggtctatctattttcttaatcttttcaaaaatccagctcctgaattcattgatttttttgaaggtttttttgtgtctctgtctccttcagttctgctctgatcttagttatttcttgtcttctgctagatttttgaatttgtttgctcttgcttctctagttcttttaattgtgatgttagggtttcgattttggatctttcttgctttctcctgtgggcatttagtgctctaaatttccttctaaacactgctttagctgttttccagagattctggtacattgtgtctttgttctcattgctttcaaataacttatttatttctgccttaatttcattatttacccagtagtcattctggagcaggttgttctgtttccatgtagttgtacggttttgagtgagtttcttaatcctgagttctaatttgattgcactgtggtctgagagactgttatgatttccgttcttttgcatttgctgaggaatgttttacttccggttggtggtcaattttagaataagtgtgatgtggtgctgagaagaatgtatattctgttgatttggggtatagagttctgtagatgtctattaggtccacttggtccagagctgagttcaagtcctgaatatccttgttaattttctgtctcgttgatctgtctaatattgacagtgggttgttaaaggcttcccctattattgtgtgggagtctaagtctctttgtaggtctctaagaacttgctttatgaatctgggtgcttctctattcggtgcatatatatttagaatagttagctcttcttgttgtgttgatccctttaccactttgcaatgcccttctttgtcttttttgatctttgttagtttaaagtctgttttattagagactaggattggaacccctgcttttttttgctttccatttgcttggtaaatattcctccatccctttattttgaggctatgtgtgtctttgcatgtgagatgggtctcctgaatacagcacaccgatgggtcctgactctttatccaatttgcagtctgtgtcttttaattggggtatttagcccatttacatttaaggttaatattgttatgtgtgaattttatcctgtcaaagctggagtgtcccaggtcaacttcagactgctgtgctggcagcgagaatttcaagccagtggatcttagcttgctaggctccatgggggtgggatctgctgagcaaaaccacttggctccctggcttcagccccttttccaggggagcaaacggttctgtcttgctggtattccaggcgccactggggtatgaaaaaaaacaaacaaactcctccagctagctcagtgtctgcccaaacggccgcccagttttgtgcttgaaacccacggccctggtggtgtaggcacccaagggaatctcctggtctgtgggttgcgaagaacatgggaaaagggtaatatctgggctggagtgcacccttcctcactgcaaagtccctcacagctttccttggctaggggagggagttccccgacccctttcacttcccaggtgaggcaacaccccaccctgctttggtttaccctttgtgggctgcacccactatctagccagtcccagtgagatgagctgggtaccttagttggaaatgcagaaatcacctgccttctgcattgatcttgctgggagctgcagaccagagctattcctattcagccatcttgccagccacttaacatcttatcagaaacatttttcatgacacaatctttgtagtgatattttagttacttcttccacgttttgaaaattttttttttaaaacaaactttcatttatcaaaggcacatgaaaatgctaattacagtttctaatcagcatctgataattacctgtagtataacttctggttttcatttaatttgcttatgtggcctgtgtgatttatattagactttctagaagtccatgctgaaaatagttttcaatattctattattatcctcacaaatatctaggtccacgagcctcaggtttggagccactgacttaaagggtcccctctcttagggaatgtttccggtagacatgattattttttaaactactagaaagatcatttattttcaactattatagatgatccttcaattaatattattttgtatgtttctgctctgcttaagtcttatcataccctcctccccccaaaaaaattaggggcaggctactgagtccaaagatatagggcaattttattaatgaaatgttattgatgttagtttgcagatgattattaaaatgttatttactgaaggtgcacttatagttgtcttccctctttctttcccttcctccctccctctctccatctctctgtcttcttcccttcctttcattgaaaatttgggttcctaaaatatgctgaagtaagcatgttaattcagaaattcatagaatgctacccttgtagaactagctgggatggaagaaggcgggatttaccagaagcaagtagatttccatttccaacaaggctcacaaatgtatcagttttataaagtattcatttatcattttcttactaaatcttccctgaatttctagagaataaacccagaatactaattacaataatttttgcacattacatttcttattgtaaattaatctgagaaaatatagtacagatactgtgttctttttatcccccctgcttcaatcatttgcttgtactcagcaatttctatggaagaaggtaagaaatagtatttaggaaaaaactcttatctccaaagtcttttagaaatttcttgtagtttaaagaattcactttaattcagttcagctatttattaagctcttcctatatacctagtagtgtgatagtcattaataccttgatttataaaaatatgtcattcaaagatatgcatgcaaagtataattgtcctaacactgagaggaataaagaaaagagaagcaacatttatatgcagctccagagtttaacatagcgtatggcaagaactcaataaaagctgtgaaactgatgagatgttttgtttcaactgccttatacatattacctaacaataaaactatagtgaaaattattattattattcccatgttatggatgaaaagattgacactgagagaaggtaagaacagttgtcagcagttgaaaacagtgtaatctggattcaagattccctctgtctaaaaggccctgcattagggaacaaatgggaccttcagttactatcctttccccttctccatgcccaaccatctggatgactcattatgatggtgctctctctctctctctcacacacacacacacacacacacacacacacacaaagcaagatgctttctgcttccagaaagaggaaaaaagaggtgtccccttagccaccaaccacagttcatccttgaatttggaaagggaaaacagagaactgcaagatgacttttgaaggctgatctatgggaacaaggctccaatctgtgtccccccaaaacaaaaaaggtgtatgacacaggagggcaagagaagaaggtgagggagagaggggcaagtccagggtgcctgcttctggtttgtctactcagggtcatgttacaggctgcactgttaagagttgtgaagggcaacctgggcatagcccttggtgggagggaggagctgggaactgtacggtagtggtgggtgataaggccatggtcttagcttgagcttccgtaacaagataccacagactaagtggcttaaacaacagatatttattttctcacagttctggaggctggaagtctaagattaaggttccagcagggttggtttctggtaaggcctcttcctggcttgcagacagccaccttctttgctgtgtgcttatgtggtgttgcctctgtgcatccttagagggagagggagagggagagagaaagaagagagagagagagagaggaagagaagagaagagaagagaagagaaagagagagagatcgattgatctgatgtgttttttcttcttataaggccaccagttctatcaaattaaggccccagcagtatgacctcatttaaccttaattacctccttaaaggccctctctctaaatacagccatactgagggcaagggcttcaacatatgaatactggggggaacacaattcagtacattatcctagctgataatgtggaatcattgatttggggagaacaaaatcagtggccctatcttagatcccagagtcaagcgtcagaaaagtcagagcttctcatgctgttactagataatcatgcctggttttttgtaccttcctctgtaaaataaaaatgaaaattgtagtctttgtttgccctaaagaaaaacaactttgttatgtactgggaactaatgaactcactgttgttatggatggctaataacaatctaattatttaactaggaaattaaattaatctaattaattaggaaaataatctctaaatgaatataagtaaacaaatgacagtgcagaaaatctcaaccatgccactcgtttatctgtgtccctacctgtatgagacagtgttatttcataaaatttttcatatttcacttaaaaacattaatgagtgatgtggtttttaaggggtggcgataacaccttatagtgttataaaggttaccttatagtgtagcttattctacagactatactttggactacacttttacagactatgtacttttggaacatgtataagcttcatttattaaatcagtatttgttgagcacctgggatgtgctgggcactgctagaaacaagatgtaaagtgctgaaagaaaaaattcagaacctttattcaaatcaacaattttgatatttaaaagaaaactcaatttaagaaataatttatcatttgcccactatgtgcaaaatactgtactaagagtctgtaaaaactagtgaggcagtccctgtcttcaagaagctgtctaggagaacaaagaaggcaaacccccgaatggttatagatgtagaatagatgtgcagtagcagacagttcaaggtagtaggaagaaaatgctctgcaagggggtattcattctgatcagtgtttgggatggacctagaagcatgacaggcacagggaacagtgtaagcaaaggctgtgatgtccactctaatggtagcgtaagatgcgtgaaggagagaagcagatgacaaccttccaagctgggtttagatcatgctgtagagagttttgagaattaggataagtagtttttaaagttatgttcctttattctcttatatatacttcagctaaaggtaaagataattcacatttattgagtacttaccatatgcctgagcttttcgtgcattttctcaatcctagcctatatggtaggtactgttactctccccattttcacatggagaacagaggcttagaggtcaactaatttgtgcagcattcaaaagcctatggtttttaatttttaaccattttatgttatatagcctcccacatcatacattttcatttaatataggagagccctttttatctctccaagtaagcaatagttgtaaatttatcataaggtggactgagttttattgacatacctaattttatttgtattttgtgagttttattgacatacatagggaattttttttatttttatttatttttatttatttttatttttatttttagatggagtttcgctcttgttgcccaggctggagtgcaatggcactatctcgactcactgcaacctctgcctcccgggttcaaacgattctcctgcctcagcctcccacgtagctgggattatataggcatgtgctaccacacccgactaatttttgttttttttggtagagacatggtttcaccatgtcggtcaagttggtctcgaactcttgatctcaggtgatccgcccgcctcggcctcccagagtgctgggatcacaggcatgagccaccatgcctggccgggaattttctttttaatgcagacacattttaaattctgtttctccctttctatactcttttatagaagatgacatgaagattgatgagaaatgtgtggaagcaggtaacattttctcttgattgctttgctgttagaagaaatatgaagcatgtcaattatagattatctgaagcagaggtgtccaaaggggccatgggcctttcctctagaaatgtgtaaaatgaccctccacccccatctatcttctgtagttctggcacttggaaggagaagctgtggtaatgtctccaggttcccactgatctactagaaaatgttctagaaagcagtgctttgtaaatgatctcaagaacacttagtaactctcagcatatccgatggtagaacacttggaaacctctgctctttgtgaaataccataaaatattgcagtatcaaatttttaaagagcaatatatatattttattattaagtttgatgccatcttctggtggattctagtatagataaatagtagtaggttccaaaatgatgagacatgcatgaaagttttttacatttctactctttaatttttttgtaaattgggaaaagatttttcaaatttagtggcagaactaagattggcttaagaatcactaggattttgttaggagaccagttggagaaccttagtctgacaggtgaatctgtctttgctttacaggctagtctagtttttagaagtgagagaacaatgtaaaattttaaaacagtgggcatttcaatgattcacatatattttccagagcaacagcagaatactgctgacattatgtttattttaccaagtatacatttttttaaacttgcagtaatattcatttcttttctacaatttccattatatttttattaggtaacaattcacatagttcaaaatttaataactacaaaggtatattcagtaagaagttcctctctttccatgttctcctactcatttttctttcttggggcaataaattttaatagtttcttcagtatcaccccagacatattctgtgcacataaaagcaatgatgtggccgggcgtggtggctcatgcctgtaatcccagcactttgggaggccgaggtgggcggatcacgaggtcagcagatgcagaccatcctgcctaacacagtgaaaccctgcctctactaaaaaaatagaaaaaaaaattagccaggcgtggtggcgggcgcctgtaatcccagctactcaggaggctgaggcaggagaatggcgtgaacccgggaggcagagcttgcagtgagccgagattgcgccactgcactccagcctgggcgacagagcgagactccgtctcaaaaaaaaaaaaaaaaaaaagcaatgatgtatgtatttctccttcccccttcatcacccccatctttttttccaaatccaaatgcacatactctttgatagcaagatatgcacactgttctgttcctggcttttccaacttaacattctgtatcttggaggtgactctatcttagcacataaagagccttgttttatttttttaacagcttattggttattgtatacttatacaatcatttatttgtaggcattgtgttatgtccatttgtttctattataaacagtgctacaatgaattgccttataactatatcattttacatgcatgagaataccttagatgcagcattgcctgatccaaggacgcatgcattggtaatgttgccatgtatttcaaattaccctccatgtatgtttcttaatccttaatctctctttaaaatgctaacaagagttgttttaactaatgcggaagttggtttatctcacatccttctcagccacctgatcaagcctacgtaatcaagtcattcatatgctcactctcctcgtcatcacccccgtttgtgggtccgcaactcttcaggcagggtgcacccctcctacatcggcaagccctctgcagcaaagccgagcagtatccaacagtctctagggatttccctgacattccactttccccttccctctgagctgctttttacattttattttattcaccttctattattttatttattttgagctcctgctgcacccctgactgtcatcatggctcaactgccgaataccatgtgtttcatgtaaagctgatatatgccatagagacaccatcgattcgaccttgatttaggaaaaaaactttacaaaggtggtgtatgggcagaagtaggggccagagaattagacttaaaatatagactcagtgtagatggtcatgtaataacatttttgatttttgcctccatgaaaaatcatagatgaagaaacatttgaatctggtaagtaaaaaatgagtatttggtactgatttttaaatgtatattctaaattttgatgcaatttatacacatatttataataactgtttaaatatatcaacattaaaaaattaaaaagtaactgcgtgtatcccacatcatgttgtcaacctcaaatatacattataaaatttatttttaattttaatttttaatttttttgagacaaggtctctctgtcactcaggctggagtgcagtggtgtgatcatggctcattgcagcctcgaattcctgagctcaagtgatcctcccacctcagccttccaaacagctggaactacaggcatatgccattacacctggctaatttatttatttattttgagacaaggtctcagtctgttgcccaaggtgaggtgcaagtggtatgatcatagctcactgcagccttgacttccttggctcaggtgatcctcccactttagcctcccaagtagctgggactacagtcccatgccaccatgcgtggctaatttttcaattttttgtagatacagggtctcactgtgttgctcaggcttgtctccaactccaggcctcgagtggttctcccaccttgacctcccaaagtgagccaccacacctggtcccagtaaaatgtattttaaaaaatacagcaacagtgcagttgtgagatgtagattttaccttagccagtacttctcacagggctagtactgtccctgatgtagcattttggaactttttgggagcatttttttattgtcacattgattgcggatactcctggcctttaactggtgtctcttgacccacgtatcttctgaatgtcctgctggacaaaactcgttacaaatataaaagcgtcatttttcaacacacaaaaagttttcataagatttagcatgagaagcacagtggtttagaagacagtcattacagagagagacattcaaacagaatgcaggcattgccttgcaattattgaatgatttattccacgtatcctgtttattcgatattgctagtaaataaactggaaagtatatctatactgaattaattttctttttctttaatatattatttgttattattgatgacatatggtatcaagtgtctgtccctcaaaataatgttgacatcattaaaaacaaaataggccccacagaattttatttttaaactgcaaacctgctggggcatgttaacatgacttatccaattccaagtatattatttttcctcattttctcccatttcattggtctctaattgctttggcatattatctttaccccaattaaggcaattttcttctttctcttatcacatacaaataaatctagccttttattacttaccaaaacactttttattctagtgtccacctgtttcttttctatttttctgtacttcatataaggaatattttctgattttcttacttctcttgaatccatgcttcgttataagtaaatattaatataagcatctagtagtttcttaggtcttccaaatatgttatgcccaaggatttatattttgatatatatacttttttttttttttttttttgagacagagtctcactctgtcacccaggctggagtgcagtggtgtgatctgggctcactgcaatctccatcccccaggctcaagtgattcttgtgcctcagcctcctgagtagctgggattacaggtgtgcaccacaacacccagctaatttttgtatttttagtagagacgggtttccatgttgctcaggctagtctcgaactcctgatctcaagtgatccgtctgccttgtatatatatacttttaaaatatatatatattttaaaatataaattacttcttttaaaatgttttttaatgttacagctggagcattgtattgatttttaaaattacatgtgtggtagattatgccatctattaatttcctttcataaaagtagagagatggctacaaatattagttataaaaaaagaaagcattgagacagatgagttgtgaaccacttttctaaattatttacatttatgttgtttcaaaatttcctattttccgttagatggttggcctgttagaaataatttaattgattatttatacttgcccatttggcttagtttttaattcccctagcttattctcatccttctttgttctgtcccactggaaaacactccacatgtgaaggctgtggttgaggccggggagtgtttgcgggtctgtggaaggagaagcagtgggtgagaccaccgactccagccagattggccagtttgaaccctgggttcattactcactaactgcgggttctctggctcttaacctctctgcccttcaggttcctcacctctaaaatggcaacaataatttatatgaataaagtgcttagaacagtgcctggtacacaggaagtgctacacaagtgttagcgggcattattattgtgaaatcttgttccttgggggagtcagcagccagttcttttgagaacagcactgcagagggaggtgcctactgtaaaacgccccttgtggactcctctcagctggaaaagtgagaactctcaagcatcgatacgttctgaacccagctctctgaggagctcaattaaggaacagttagcacccagctggcatattttctaagcatagaacccttggcattcattccatgatgcttaattctgttacttagactgcttagtgagcagttaaggttcttcagtttcggtctgtagtctgaataaagtatagtatgacttccttgaatttccccaggaggtgacgaggtgattgtatggtttatttaatcagaagcgtcattaaaaaaaaaaaaaaggctggatatggtggctcacgcctctaatcccagcactttgggaggccgaggcaggcagatcacttgaggtcaggagttcgagaccagcctggccaacatgatgaaaccccgtctctactaaaaatacaaaaattagccaggcgtggtggctcatgcctataatcccagctactcaggaggttgaggcaagagaattgcttgaacttgggagacagagattgcagtgagccaagatagcaccattgcactccagcctgggtgacagaggggactgcatctcaaaacaaaccaaaaaacagaatatggctattttgtgatatctagaaaacaaagaaaacagtttgctttgtatttggtttcctctgtcttcatggggcagctggggatggaagtgtgtgagacccaggaaggggaaggaatgaggaccctcgcttgggccagaggctgctgcagcacccagcagcagcaccatttctaccacttcctccccttcacagagctgctgcaatactgcctcggggagagaggagggagaaggctcaaacctgttgctttcctttaacttctccctttgaagccctattttgtgccaaccaagtagagtcttcctgagttaaaaagccttcagggagagtcttgataggcaactttcagaaaaagttactgtcccaagcagcagagtcagggcaaaccagtttctcagtcccaatcatgtggtgatcatttgccttgccaggccttacccgagttaccttttgctagtggtgacgtgcacgtcttgcttatgtcatttgccttgatttgatggctaacatgatcttcttaaaggcttaactttttcatgtctgtttctgcacttacccaaatatccagaggaactttcagaaggtaattgtttttatttcctagatataccaaatagaactatgtttaagatctttcagtgcctcaaaaatgaatacttgactggataatgtttaagatgaagatacggaatttgttgttgtttatggttttcccctcatatttacattttttcccgaggaaacacacttccaaactaagtttgtgaggttctccaaggatatgacattttgtgggtgaaatcaatgattaaatattcagtttcatagacaacatttaaaagaacaataaaaataattaagctttatgaatgtatccccaagaaaacatttccttttaaacttactgacatatctaagtgagaaaatatacttacttaccagaagatggaattgatattggtgtgttttctttctatgtattttaaaacacttaaaaaaaaaaggttaagagaaaaggttgcatatgtcagttcattctattaacaaatgctctttatattttatatatatgtttatatttgagacgaagtctctctctgttgcccagactggagtgcagtggtatgatctcagcttactgcaacctccatctcccaagttcaagtgattctcctgcctcagcctcccaagtagctgggactacaggcacaagccaccacacctggctaattttttgtatttttagtaaaggcggggtttcaccatgttgggtaggctggtctcgaactcctgacctcaagtgatctgccaccctcggcctcccaaagtgctaggattacaggcatgagccactgcacctggctatatattatttcaatgatcagagcagagctgtatatttgagaaggaacttaagtaaaaagtaatttgaaaataattttcttaataactttttttctggagttttttcctgagatctcaatgaaaggagaaacaggagtttgaactatctctagatgcttcagaggcagtgggcacagttttcctcattttgtctctcagagtcctggccagtcagaaacatttggcagccacagagcaaatcttatcttatatagaatgaacccttttaagagggagaaaataaaaacccatatctagcaaagagattaattacaggacttgcagaaaaaaaaattataaacacagtatggtcaagaacaaggccgggcgtaatccctgtaatcccagcagtttgggaggctgaggtgggtggatcacctgaggtcaggagttcaagaccagcctgaccaacatggtgaaactccatctctactaaaaatacaaaaattagccgggcatggtggtgcgtgcctggaatcccagcaactcgggaggctgaggcaggagaatcacttgaacccaggaggtggaggttgcagtggccgagatcgtgccgttgcactccagagtgagcaacaacagcaggggggtaggcagggagggagaagaacaaaaagctactttatgcttatttaaagttatatgatactgaatcatagtaaaaacataagaactgggtatgtatctttaaacatatcctaaggaaacttatcttaaaaaattaataaactcgttttggctttaaccatactagacagaatacattcagtgtaacgctcaaattctgtgaagtgcgtccctatagtttgttgtgtgtgaataataggatgaaaaatgcttagaacattcggtgagccactcaaggataaattcaactctgctgccgtctactaaggtggtcacttgaaaagttgaaaatgatttcatgaatttattctgaataaacttctcgctctcacatattctgctccatctgttctttgtgtttcagacaaggaggagtttgttggctacggtcagaagttctttataggtaggtgataaattaacaagaggtgggtctctgtcacttgttaaattatgtttccaaacctgacactgttttgaaagtttcttttgctaatgaacatttccagacctgttcctcattctagtttccttttctttctgtccttttttcttgtcaatattctgatccattaattattcattgttattcatctaatttccactgggttatctattaattactcatcaaacacaaatctttttgttttcttccagactgtttcgtaacctatttatcttatgctaaagagacaaagtctctgacttttaaacttacttcttatggccacatttctatcatctgtcacctgggcagagctttgtgaaggaccaggtaccactcatgtaaaaccgctctgggcttccttctatagggaggcaggggaaaactagcagagccgcagggtctagaaggttggttcccaagctggatgcattttggaatcatcaggggagcgtgaaaaaaaaaaaacaaaaaaaaaaaaaacaaggggccacctttctgtattgctttcagaatcattcagcctaaaagctattaggtagagctgagcagagtaggcagctacacaaaggtggagagtaaggagcatgagcagggtgaagaaggcatctgtgcaggggacaatggtagcctggtgccaattgtcagaggcagagtaaaatcaagagggcagctgccatcacttggcctctgatacccaacaggctttacaaagatgcccgcctcatctagcttgggctctgacactttgtgcgaggctatcaacactgtctgtcccctatcttgcacatttaagtgctcttgattgatacaataagcaaaaaaaaacaaaaaaacaaaaaaaaaacaagggccagggttctcactgttagagaagggagttacaaacatggaaaggggaagtctagaatgaatcctgtagtgttggattgacattgtatgtactggtgtgaactcatggttttcaatatatagacatacaaatatagatcgaaatgtgcatgtgtatttatatgtacacatagagttgctaactctgtctactgagagcacctggaaacagctctgaagataccagaaagccctatgattcgaaaggcagattaagcaggaatctaggagcttagaaatcatgacccatgtgtccaactttgcactgatcacacagtcctaagcaaccacctaacctgtctgtgtcttagtgaaaccacctgaaaaatgtgaaaaatgagcctgctccactctttctaccctggcccaagccaccctcatctcccacccagaccactgcagtagcttcctaactgctctctcctgaggccacacttgctctccctacggtttacaccaaccagaggagtctttcagaaacatgaatcaaatcatgtcactaccaacagcttcccatcacacttccacaacaatccaacactttcagaggccctgtgtgatctggctccagccacttccctgaccctatttccatactccctgttgcttaccgccctgcagctatacaggcttccttgctgttcctcaaatgctccaagcacagttcgtttctctgcaccactgcacttgctgttcccttggcctggcttgcccgtctctgcagaggcttcctgatgtggctccctgccttcctccagatgtctgctcaacgccaacctttcagagatactccaaccttactgcctatctaaaaaagcacccccatcactctctatctacctcatcttcttatgagtacttattttttgttgttttttatgtttgtctctcttcttctacaaaatgtagatttcatgagaaagtggccttggattagttgagccatctatcgccagcacccaagacaatgcctggcccagagcaggtgctagatgggctagcacagggggcattttcatatttttccctcatattacttcccatcttctaacttcagacagacctgactatattaatgaacactttaggatcatggttgctacatatttcatcaggtgtgaagctacaagtgatctctcctgcctggttcttacgttctgtgcacttcccctccctagctggcttccgccgcagcatgcgcctttgtcgcaggaagtctcacctcagcccgctgcatgccagtgtgtgctgcaccggcagctgctacagtgcagtgggtgccccttacgaggaggtggtgaggtaccagcgacgcccttcagacaagtaccgcctcatagtgctcatgggtatgtcccagcatgcactgtctctcctcctccttgagaagtcttccttctagattcaggtgtcttgcattgggaataatggtgaaagtagaactctttatggacccccatacaaataccttttttaaaaaacaaagccattgtacatgtgtgtttataagtaacattttattgtatcaagctttttaaaaaatctacaagtgaatgtgttatgacatggtgtccatgaactatataaccagtattacgatgtcattatgactgagattttttttttgcctgcttagaattgttctgtaaacatagatgagtgtttccccagacagatcattaacctgtatcctgaaaataaattcttaaggtccatttccctgagaaatatgttaaattcttaaagtccattcccctaagaaatttgtaactacttcctttagaaaagtatctaacatcttctggactgtatctttggtgctttataaagatcatggcaaagatagtgcaggagtgacctgcttttgtgaccatgacttttgcaaagttggtccctgtagcagtagcaacttgtatcctactgccttcgtgtctgcctgtttagcttcatgagcaaggcaggtccctgtagagcagaacgatgtgccttacagctgggaccagcaatatcatttgcaggccccattgtaaaatgcaaatgcaagggccccttgttaaaaaattatcaaagatttcaagatgcaatagtagagaattcatccaagcacagtatccttctaagcatgtgccctgtgtaactgcacaggttctatacccatgaagtcggccctgcctccggccggacatgggggtgctgatcgatcatctgtcaggaatgtgcccctgaattctgtaagtcacagaacctataattgttgatgctggtttctggctgtcacttgataaaaacctcatttgaagaagaaaggcagagctctctgattctctaaaatgagaccagctaattctcatggcattcaacattagatgaagtttgctgggggtcaggttcctgtgattccttacctcattcctgaatgttgaaacaatgtggattactccatgggtcactagaaaaattcccaagagttttctggggttcttccaatttatgagaaaggaagttacataatttccctaaaaatatttgctctcaagtttcttcagtagaaggactaaaatgataattccatcacataattatatttatccacatctgatgatttctgtgtgtgactttttgtgtttaggaccctctggtgttggagtaaatgagctcagaagacaacttattgaatttaatcccagccattttcaaagtgctgtgccacgtatgtttagttctgctttcataatggtttgtgttttggtaaaactttctttgctgatctcatttaactatgtcattccatctttgttgtaaaagtatacaacaccagggatagttcttaagtatttctaaccatatttattttaataaggaaaactgacttattggaatgtaggcagctggcttttaaaagggcttttttctttttttaattattattatattttaagttttagggtacatgtgcacaacgtgcaggtttgttacatatgtatacatatgccatgttggtgtgctgcaccgattaactcgtcatttagcattaggtatatctcctaatgctatccctccccactccccctaccccacaacagtctaaaatggcttttttctatttcttaacattatagggatggcctttcaggcaaactaatagttagcaataatagttaacatacacccagtgcttactatctaaaaattgatatatgcctatacaactttatataaatttatgagtatgattataaaatacacagctttttaaaaaatggtgttttctggctgggcacggtggctcactcctgtaatcccagcattttgggaggctgaagtgggtggatcatctgaggtcaggagttcaagaccagcttggccaacatggtgaaaccccgtctctacttaaaatacaaaaattagctgggtgtggtgctgcatgcctgtaatcccagctactcaggaggctgagacagataatcgcttaaacctgggaggcggaggttgcagtgagccgagattgcaccattgcactccagtctgggcgagaaagtgagattctgactcgaaaaaaaaaaaagtgttttcttatttccttttactcgtaactcctttatttctcctaagctccccctttactactaccagctccaaagcaactcctaaaacgtaatcttccagacttttctctatatagagttgtgtgagttttttacccatttagagttgttatatgaagtttttttttaagctttaacatttgagagctacaattctaaaaatagaaggaattatttgtttcatactgagattcatcgttcaaaaaaaacctttaaaatcactctaagacaacctgttttattgtaaaaatagaaaagatcaagacttgagatagaattcctgatttcaacaaaatagaaagttcataataatgcatgtttataataatgtataataatgcatcgtttctaatatgtgtaaaagaaagttaaaattttgactgaggcactaagatgcacatctgtaacgaggaatgtgaaaacaagttaaactcttcacacacctcgagggtataaaaggcttggggagggagattcatggggctttttggggaggcttttattggagagagcggtgctgggtgttcccgacccactgagtgtgggaagagtgtgtgggtgtgcttgcttccccctcccctcaaggcaagacagaggaacctaggggaaccacttggagagcttcctatgtgtcttctgcactttgggggacacagaagaatggtgtccgaattacacctgaaaaatccaaaggagaagagcttacaggaagtggccaatggctataatttgggaagtagctgtccttgtagggtccatcacagctagacttgtgatgttccccaaggaccagatctgggcaggtaatgtataagacagtcagcccagggttatatgattcctgcccaggaggaagcctgaggagaaaaaggccaaaagtggattcccaaatatatcaggctttggaaggaatcacagatgacaaactggaataggaatggacttgagaggccttgtgttggtgagatagggtttgcaaaataacccaatatatcatttaggagagaaagagccggatttaaggatctgccaaatctaaagaaagccaatagcagccagaatcagtatttgccaaaccagaaccttccttcctgctttcctctccctccctgcactctagccttagagagttctaaaccagtggaagtgagatctatcgggggcagagagaagcaggagcagtagaaatatggtgaaaggaaagagaagtgactcatactctcgtctggctctcgtctggcttctctgagcgcaggcttccctggtgcagcaaatttgagccagatgtgtggagaagcagcctaaaatctaagtgaagtttataattttgatgattatgtgagaatggaattttaattagtcagttgagactggatgatgaaaatgaaattgtggcatgagtgatgatagacttttaaaattaaacctgagtgaaagagtcatggaaaccgctagtgttttttgttttgttttgttttgttttaagacggagtcttgctctgtcgcccaggctggagtgcagtggtgtgatcttggctcactggaacctctgccccatgagttcaagtgattctcctgcctcagcctcccgagtagctgagattacaggcacccaccaccatgcccagctaatttttgtagttttagtagagatggggtttcaccatgttggtctgtctgttctccaactcctgaactcaagtgatctgcccacctcagcctcccaaagtgctggaattataggcatgagccaccacacccggccaggaaactgctagaattttgtgcaggggctggggaagatcttgcctcacataagggctgtgggagaccaagaagttgctttatgatcgcatgctataggctgtgctttctgaagtactgctttcatgtacaggaatgtgcattaatctgaaaagcaaaaactaccaaagaaatcaacattttccttttctttctttttttttttctgtttgttttgttttgtttgagatggagtctcactgcattgcccaggctggagtgccgtggtgttatctcggctcactacaacctcacctcctgggttcaagcaattctcctgcctcagcctcctgagtagttgggattacaggtgtacgtcaccatgcctagctaatttttgtatttttagtagagatggggtttcaccatgttggctaggctggtcttgtactcctgaccccaggtgatccacccgccttggcctcccaaagtgctgggattacaggcgtgagccactgtgcccggccaaaatcaccatttttcgatagtctgaataaaaataaaatgcccacagaatatagaagaattttaagaatatcaacgtagatttttaatcattcaaagtgagaaaatactgctcatattttgctttttaaattgaggttttaagcttaaaatggatacctcgagttatacatcaattcacagactttaacctaccatataaatattagtccagtggaagcaaaggaggagtcatcttgggtttagattgacataattcactatcacctgagagctataaggttttactagaattttgttttaagtaggaagctatgggagatgtgatgtaactgtaggaactctaaggatctgatgagaggcttgaataaggaaaaaacaaaaatgaccccaagatgacatttgcttttagacccccttgaaggttggtaactcctttgataatttaaggccggtttctagcttctacttgatcatttccatgtattgatatcatcagatgttgatctatttcatccttaaactttgtcagatgcaaatacacaaattctgtatgaataaggggaactaatggtaatatagattaagggactagctttacagtatataggatgcagagttgaaactgtcttactcatctttgtgttttcagaacctaacatgatacctggaacatagtaggcactcagtacacactagttgaataaatgaatgagcagacaacaaataacttttagatatttgatgaactcctatattctatacaacctggcactatttaagttgaagagtctgtaatcaaagtggccatatcaaagaatcagactgaatctagactcagctaatctttccctcctagagatccctaaaacgaatcaccactcggttgggtattaatgcatctggtcaagattgcagaatgtcatgggctttctccatttcaaatttgagaatctattgttgtaaaaaacactcatctagaggagtcagaacacgtaggttctaatttcaacttcgcttttcatcagtcttatgaatgtgagcaagtttctccaaaagcttttcttatgagtaaaatatagatattaacagtttacctaaggtaagagtgtggaagatgaaatgagatcatgggaaatgcactatccaaatgtaagatattattggtattgctacctgggagctttcaggcatctaaaggttcacacataattcactagcacttattttgaagtaataacaggtgttcccttaggtctttcttatgctggcttaatacctagtgcattctttttcataccataagcactcagtaaaggtttatagactaactgattttgatacgagaacttatcaccaattcaggcttcttctttttagttctagcattttatctccttgattatatattcatttatttattttgattagatatctttattcaaatgcatattggtaatcaaagaattctgaagacactgaaacctttcattccctttttctgatagacactactcgtactaaaaagagttacgaaatgaatgggcgtgagtatcactatgtgtccaaggaaacatttgaaaacctcatatatagtcacaggtaaagtagaggttcagaagctgattcttacctcttgttgttttacatttgaaatagattccctatttttatgtattttccaaatctcctgggtaattccttttgtttctgaggagttaagcaagaaatgtacatcgatatacagcacaccaactcactgggtttagaaagggagcagaatggagtctgcaaaccttggagaacttgaggaaatacataaactctagatatgctcattttgttcacctcttgaatatctattcattctttctgtgttaataaagtccacatatttatattcaactctagtgcagtttatcctcatgttactactaataatattttccttgtagaaagtgttctgttttgtttggcctgctcttgcaggatgctggagtatggtgagtacaaaggccacctgtatggcactagtgtggatgctgttcaaacagtccttgtcgaaggaaagatctgtgtcatggacctagagcctcaggtgggtccatggtggaatatttatgtccccaaacaatgaatgcgtatcatccattttttgtgcacatgctgtaggttatagttgagacatttattctgttagccttttaagaataaggccatttcccatatataagatcttacttaacgtgtcaattgacaacattttacttttagttgggaaagaagtcttgcttctcagacagaaaagcagaactgattgagtggtcacaaagagaagcaagaatctttcttgctttaaccttgatcacaaaggcatcagagtaacttcttgtggagtgaataagatgttgctttgtacaaggaggtgaggtttctatgttgtcatatctgtggctaccttcctgagaccacatgtagaatggagcaggggtgagcaagttaaggtaagataaacagcatgcaatccgtaggcccaatttttatgaactttgtattttcttcgtgtgtgtgtgtgtgtctgtgtgtgtgtctgtgtttgttttgttttttgagacaaggccctgctctgtcatccagactagagcgcagtggcatgatctccgctcactgcaacctccgcttcccgggttcaagcaattctcgtgcctcagcctcccgagtagctaggactacaagcacaagccaccatgcctggttaatttttgtatttttagtagagacagggtttcgccatgtttgccaggctggtctggcaatggaactcctgggctcaagtgatccacctgcctcagcctcccaaagtgctgggattataggcatgagctactgcgcccagccatgttttcttagtcatttagaaatatactttgtgtgctagagaatcagaggaaaacagatggtagtagtatccaatgtgagataatagcaagaggaaagggaagtgaaggtgaaacagagctgatccaccttgagagtctgtctttgtctttgtcatatgagatcatgtatagaatcctactctcagtaaatgagattctctcatgtatagactcttactctgctagtaagatttcaattgctagtcatagctaataagagtcaggatctgaccttaattttgattctaaaactacatcttcaaatttttaaaatgttcatttgttttttagaattgaggagttgagggtacatgagactatactctaaaaataattgctaatttctggtcttagaaattttgagaagcttcatgttcactctagaaagctaggacttctgtttttaaatgtgcatttagatcaggtgcagtggctcatgcctataatcccttggaaagccgagatgggaggatttcttgaggccaggtgtttgagaccagtctgggcaacatagtgaaaccccatctctactaaaaatacaaaaattagctgggtgtggtggcacacgcctataatcccagctactagagaggctgaggcacaagaattgcttgaactgggaaggcggtagttgcagtgagcagagatcccacccctgcgctccagcctgggcaacagaatgagactcaaaaacaaaataaaacaaaacaaaatagctgggcatggtggcacatgcctgtggtcccagctacttgggaggctgagatgggtggatcgtttgagcctgggaagctgaggctacagtgaactgtgattgcaccacagcactccagcctgggtgacagagcaagaccatgtctcaaaacaaaacaaacaaaaaataaatgtgcatttaaattttctgtgtaggatattcaaggggttcgaacccatgaactgaagccctatgtcatatttataaagccatcgaatatgaggtgtatgaaacaatctcggaaaaatgccaaggttattactgactactatgtggacatgaagttcaaggtaagagcaagtcaaaaactactgtattgctttcagtggcttctgcgtgggagagatctgggttgggctgggccaaggatctctgatctcattgtcctcctcctcctttttgaccccctctccaaaaggccctcaataaaatggtttactatggttttatttaaaaaaaaaattaaaactgtattgtttctacaggatctgtgttagagaatgtaatttttgtttctaatggataatgcccttacgatttatccttttggatggacatcacttacagatataaagtttaataaatgttatgatgctacccttattttttactttcttatttttttgggtctagcttaaaaaaaaatccttgagccgtagtttgcaaagccaaacagaaattgggcatgtatgagcctggtgtttgtattttaaacagaatatcttttacttaaaagcttactttaaaaatgctcagtgagtatatctcatctgtaaaatgatgatggtaataatagagggggcaagccaagtgaaattaatcagtgatctcatcctagaacaggtgattttttttccggttgcgtacatatattttacattaaatatgctttaaatattgtgtcataacatacattcagtaaggtgtacagagtgtacagtttaatgaatttttatgtgtgtatgcacccagataaccatcacccacatcaagatattacagccacttgtgtgtgtgtgtatatgtgtggtaaaaatacataaaactcaccatattaaccgttttaagtgtacagttcagtgttagtatttagtgttaagtatattcacattgtgtgaaacagagctctagaatttatttacctggcaaaattgaaactaaaaatatgaatgattcactaaatatttgtatgtcatgcttgtacaagggccatgctaatctctgcattgtttcagttttagtctgtgtgctaccaaagcaagcacaggtatctttaaattatcctttctcttattatttttattttcatattttttgcaatgactatggaggtctgattttccagtttgccttgtgaacagtggagtccatgaatgtatttgctgagtcttatgggcatttaaaattgttctcatttttatggcagtctaaacaaattaacaaaattgtttctggatcatatgtatggtcactttgtaaagccacaagattttggtgcctgcatttgtgtttcagattgtattggtgacaagttgtactattttcatgaactaataagaaaataacagcaatgaatttaatgcattagtgccaagtgaatgccaaattaccttcattaaatgaacatttcacaatagtagaaacataatataactggcttataccatcctcatgttgaaagtggccattttgtatctttaatgttatccctatcagattaatgttcacttgaaatttatgtttaaattttatttaaactggtacattttctttggttttatgttgtatatggttaaaaagtttcaagtgtttaggtaagagtaagataagttcacacgggaagttgaggggagtaatctgtctgcaaactatgactaaattttgcaaaacatgacgagacattaagactaaagattaaaacataagttttgtagtttagaagacatttattggacctcattttttaaaataaaaacttcagtcttttattatttaaaaaaacttccaaattaaaatttctttatctcagtaatacatttctaagaaataaaggatgacatactgtggatagtgatatacttttcccagctttgcttatgcttcacattaatttagaaggatatgtttatacctgttataataattatattttctctacaaaaattagctgggcatgatggcatgtgcctatagtcccagctacttgggaggcctaggtgggaggatcacttgagcctgggaggcagaggctgcagtgagctgagatgatcctactgcatgccagcctgggacagagtgggaccctgtctaaaaaaaaaaaaaattattttatctatacttagccacattatttcaataacagagggcaaaaaaattactattttctagtttgctggttttgtagaattttgaaaaaatatttttgaaactttattgaaaatcatctgtgcaaaattttcggaccttactgtttttatacatagtttcacaactgaatgtgacagcataacaaactgtattttttccatttgtccaattaagtctgtactatccatatttttctatttctcctaaaggatgaagacctacaagagatggaaaatttagcccaaagaatggaaactcagtttggccaattttttgatcatgtgattgtgaatgacagcttgcacgatgcatgtgcccagttgttgtctgccatacagaaggctcaggaggagcctcagtgggtaccagcaacatggatttcctcagatactgagtctcaatgagacttcttgtttaatgctggagttttaacactgtacccttgatacagcgatccatagttgcaatctaaaacaacagtatttgacccattttaatgtgtacaactttaaaagtgcagcaatttattaattaatcttatttgaaaaaaatttttattgtatggttatgtggttacctattttaacttaattttttttcctttacctcatatgcagctgtggtagaaatatgaataatgttaagtcactgagtatgagaacctttcgcagatttcacatgatctttttaagatttaaataaagagctttcctaaataaaataagcaatagttaactttagaaactgtactctatgaaacgtgttttatgaaaacatcttttacaaaaagtgcttacttgactaactcagcaagaaaggtttaatgtacacatttcacatctaaaatcaaaacctacaagaaactgcactgccttcactatttacaaatcggcctacaaggaaaaaattattctcatgagaggtgtgacaaacactaattttccttaacagccaatatctacatgcaggcctaaattagaaaaaggcaatggattaatcccagagacctatatatagaaaatcacaagagtgaaaccgtgtctcagagttaaagaaaccagggactaacagaaattcttgagcatgcaggacggcagataaaaaacaacttgctaaataaaacgcctaaacttcttccattgtgagattaaaaaacaaaacaaaacaaaacaaagcaaactggctgaaagtggttagtactaacacggatggctacctggagtctgtacaaaatgagcttgctggcgtcacagcttgaatctttccccatgtttcacactgactccctccaaaatttgcacatgcgacccatgaagggacatgaagaggtaactgcgaacgccagaggattttccagatggcttctttccttccaccaatcacctactaatcccagaatccaccccctaaacgttttctaataaaaatactgtcttaaagccaacacagggagacagattagagctatactcctgtctccttgttagctgactcacaatgaaaacttttctcaaaaaatcagcgccataatattggcttctgtgcgtatagggcaacaagccccgtttgtttggtaacaagattaggatgccattacaaagtgctgtttctctttctttccccagatttgagatttccaggcgctttccctgtccctgtatctgttcatcttctgcatcattctcttctccatatccacaccattcttccatctttcccatttctttcttaactgtaaaacagaatgcatgattcaaaatatttgtagttctctgttacttaaagtgaaagttatctttaaaaaaaaacaaacccaaccaaaccaaacgatgcaaatcaggtagtttgtagtgatatttatgtgaggttggatttgattttaaggttgagaaaaagtttttccaaatttgatttacacagttgtgggatgaagggtaagcaatcggagaaaatgtgagaattgcctatattaatacacatccacacacccaggcctgcacagactcgttggtcctggagagtaaacgcattcctcccaaacccagcagcgcctggcaggacagaggcgggcggggacctggctcagggggcggctgcctcgccaggcgccacgaagccccggcgtcccacaggtcccggaggccgctgcgtcgcggggagctgggctcgggccgccggcggttgcgccggggcagccccgcggggagagcaccatgaggactgactcgggggctcggctggaggagggccacctggtgagcggcgaggggcgcgtcggcctcgagaggtggcgggtaaacagctacacttggcagtgggggtgggtgtgtgtgggggggcgccaacgagctgggaatcactaagggagggccttgctcgtggggtgcgcgcatccgcccctccagtgttcacaggaatgggacggagacgcaggcgaggccgggaccgaactcccggagtgggagagagaggcctggcatgaagtttgcggggacctgagcccgcgttgccacgacgacgcctcactcatctgaggcccggggcccggcgggtgccggggcttccagccaggcctctcctagactcctccgaggagaggtctgtagctgcccagaagagatctgttcgcctgcggagtcctttaattaaggtcttccgtcacgccccgcttcccgcaaacaaatcaccgccaccacttaggaaaccacgggaaagctgtgattgcagcgccacggtcgccagatttctgctcctgggcacattacccccaactccgaggccccctttttggcagggctagtctggactggccaatccaggtccctgcacgcctctcaccgcaacatccccgcagggcgctgcgcgcggggtactagccaggcggcgcggcccgatgacgcattgcgcctgcgcgcgcgaccgagccgggaggggtggggcgccaggtgcttgggggccggcggccgccgaggccggctaaacgcagaatggggaagaatcctgtggtaagcgagccttagctacttttaattgttaggatttttgtcttcagttgagccgtcctacttttgaggattagaggttgggtctctgggtgggtggaacgtcatttttgcgggacttttgaaatcagttacgtgaacagagccctgggatcgatcgcgcgcgcttcgtagcatctttagaacaatagcgcgttcctgtgactgtcattcttctccaattgtaattttgactactggatggtattacggcagcttgcctcgtcctaatcttgtagtacttgcattaatctactgttcgaacgaatggattgctaaatgggacaaactacaagagtgtctaaaatttaacccttttgaataaatgtcttatgcaagcagcatgagatacttggaacattaaattggcttctaggcatttctgttactatatgattctaaaatacttctcaactgtaatgctgtctgaactacaaacacttttcttattcatgtaaatgagggtttagaagggttccccccacctttctttctgccctaaaacgcattcttcccagtgtatgcaactggcctttttaaaaattgtgttagtatgtggtttaaaacctccatttgtttcccattgaattaaaacaaaatccaaacttcccttggtctgcaaggccctaactaatctggctcctgcctacctctccttggtaattgtgcggcagccttgctgtccttttacctgaaacattccaagcccaatttaacctaaaaatatttgcatttgttccggttgctgctttctcattcaggtctcagctcaaactcagagaaactttccctaacaaaagtagcactcagtctccttcattcattacgttttgtgtgtgtgtatcttgtgtatatatatatatatgcacacacgatatgtatacaagatatgtcttaaatatagcatataaatatattttatcgtacatgctgcatataatatatagtatatattatcatatatatatttttaacattgtttctaatactcaaccactagaatgtaagtttcataagagcagagttctctccattgtgttcattagtgtattcctaatgcttagaaaagggcctggcctagagatggaaaggaatgtaggaaggaaggaattttatatgaaatttaggatgggagaacaaattttaaattgcccatgtttctcatcagtacctcccaggtttcactgatgaacaagattatcaagagatttgaagatcctagtctgatccattatatttttctgtcatgtctgaacaacagacttttgaaagaattgctttggccgggcgtagtggctcactcctataatcccaccactttcagaggccaaggtgggcggatttcctgaggtcaggagttcaagaccagcctggccaacatggtgaaaccccgtctctactaaaaatacaaaaattagccgggcatggtggtgggtgcctgtaatcccagctacttgggaggctgaggcaggggaattgcttgaacccaggagatggaagctgcagtgagccaagatcgtgccgttgcactccagcctgggccacacagcaatactccatctcaaaaaaaaaaaaatagcgtgatggtatttgaagtaaagatgctctaggcttttacttacaagcaaatttattttttccgccacagcgtcctccacgagctcttccacctgtgccaaggtaaaaataatttacagtaatttcattattgagctttaaaaatggaaaatgaagacagtggaaaaattgactagtatcattgcaaaattacaatgattcaggaaactcttctgaaaaatttagggattttctgaaattttaaaggtgaaaaatccttgaattttaagaataacagttataatggaatgttatatttaaaagcctgaatatcaacatggtaggataatggatccattccctttctaactgttttggtgtctttttttttttaaatcagaattctggtcttttgtgagaatagtttcctcagagtttaagctgattttaatcagtcacaagtaagagttcttaatctgcttaatccattttattaatagacagtagggaatatgtatatgtaggttcagaaaatattgacattattttattagcagtgttattaaaccacttaattataaacagtaaactagtttgtaaactagctattatgtgaaagctaattttattttaaatttgtaatgatttaagtcaattttcactgtgaatattaacaggtttctaattaattgtttcttttttgtctttgtcctgctgattaaatttgtttggtgttatatgacgtgttagtcaaggtgagttagtttaatgtaaatataatatttggtgttcaaaaattagtttgattccttggtttgtttctcttaaaactgagtctgaatggtgtaatttgtaattctacaatatgtttttgtgaaataatctcccatgactaccatttaaaaattgtcattgatacatagcactagatgacctttccattataaaagcacttcatccctgaatggggtcacccagcacataactgttggctaatttgtagctctataatgaggactgcaccttcctttgtctcatttagtcagggtagacaaggttatactatactaaaacccccaaatctcagtgacttagtgtcacacagggttatttctaattaatacaaagtctgctatggcaaaaatgggggaccattacctttcactacctttttactattgatatagcaatctaggctacttttttttttcttttgttttgagacagagtctcactctgttgcccaggctggagtgcagtggtgtgatctcggctcactgcaatctctgcctcctgggttcaagtcattctcctgcctcagcctcctgagtagttgggattacaggcgtgtgccaccatgcccagctactttttgtattttcagtagagacagggttttgccatgttggccaggctggtgtcgaactcctgagctcaagtgatctgcctgtcttggcctcccaaagtgttgggattacaggtgtgagccactgcgcctggtctgcaatctaggctacttctgtgctgtggtcccaccatcttaacatgaggcttcctcagtcaccacaacaagggaagagaaagctggaagattactcactggctctttcaacgtttggctctgaaatgacacagatcacttctgctcacagcctataggccagaaccagtcatagactacacctatgtgcaaggaggctgggaaatataggggatcagatgaatatttgttgaacccactttctgtgtcatggtttctaacattactgacatgcagtgtgctactggtaccacactgtgggctctctctgatcttctcaatttcttgccttcttcccctaatctataaacgtttgccaggcccagggaagagagggagaattcttccctgtttaaaagttctcttctgactgttctctgcattgaattttaggcacccttttctgttgacgttttttcttgctttatagatgatattccacttagtcgtcctaagaaaaagaagcccagaacaaaaaacacaccaggtaagacgttattctttgttgtgtgggatcacaagttttcccaggacctcaggcgtagtaaacatcacagataagggagaattaaggccccagcagccccgaatctccacttcattgaggatagaattaaggccagtttgaagcagtggaattcctggtggtggtgaggtacagggcagtgggcagcctgaggagtatctggacgcattcatggaatagaaggtggtgccatctaagctcctatttccatgatattcctggactctttaaggtcttttatccccagacaacatacatggttttaagctatgattgattccagacccttgaacaagatactgaatttagaaacacagagttcttaaatctcacttcaatcagaatatctctacattacagcatgagtctgaaggcatggccacatcatcatttaaatagtaaagcttcagtcatgagcagaactcgtttttgtcttagtcatccactgataatcctggaagttgcatccgtaactctaaactcagcacatctagaatccatcgttgcctttaagaataaataatttttttacgtctcatgattttctgttaatggaacctaccattttcccagccctcaggcctgaaacctcaagattatctttacctgatcctttaacttcactctttacttgagacctctcacactcctaaaaggtttctgtggttgctgctccttttttaaaacaaacaaacaacaacaaaaacataaaaggaatcatacatactatctttgtttcttaatacatagagttctatgtattcttaaacagtgacttcattgtattacatgataagaatgtaccataatcactgctctgttatttatttaggttatttccaatttttcactccaacaatgttgcagttctgcataaaatagtgggtggtagggaagaagtacttctgtaggatggattgctagcagtggaattgctaggtgcaggatgtgtgcattattagtatgactgactctgctaaattaccttaaggaagctttagttattatcttgctacctgtagagtctgagagtgtctcattctctaaatccttaacaacattggacaataatcaatctttaaaatttttttgttaatttagtgggggaaaagtagcttattttagtttacatttctctatgtactactgaggttaaacattttcatttgtttattgatacatttctattttttttttttttttttgagacggagtcttgctctgttgcccaggctggagtgcaatggtgtgatcttggctccctgcaacctccacctcctgggttcaagcgattctcctgcctcggcctccttgagtagctgggactacaggcgcatgccactacacccggctaatttttgtatttttagtagagagggagttttgccatgttggtcaggctggtttcgaactcttgacctcatgtgatccgcctgctttggcctcccaaagtgctgggattccaggcatgagccactgcacccagtgcaatttctatttcttttgtgaagaagacaagcaaggaagggaatgcagtcaggtatgtgttaaaattcttttaaaagatttcatgagggaagaagttgaagtgaatgaccaaatgaagagacttataaattacctgctaactccaattatccatgatgactttattattctttaacttattaatgaaggactttactatatagaggctgatgaaaattcttaaggcaagaggcaagtaagagaattctctatggtatcagtttttattatgttttccacctttttcaaagttctaaatgttctgaagcaatttctcctcctcctgtcttttgctcttctttttagccccctcgttttttcttcctcagcctttcttattccttcatttatttcttttcctaacttaaagcccaaagttacaggtgaggaggaaggaaagatttgggggataattagttctgaaagagatggggttattctataggaaacattctagttaccttttcctccatctttttaagattcagtgatctttgctcaagtaatctcatttttttctactctgtttttctatagcaagtgcttctttggaaggccttgctcagactgctggtcgaaggccctctgagggcaatgagccatcaactaaagaactcaaagagcacccagaggctcctgttcaaagaagacagaaaaagacaaggctacctcttggtatgtgaagaaaccaaggttaagttgtgatagcacttgtgattttgatgacatgataaaaacctctctgctttcatttctttccccctatccatatcccacaggtggtttcttgcttttatgtttaaaatatttaccactagaataactccaatggcttaagccaagaatactttacaggtctcttttgatcatatatgtatagattatgagaggagggcaacaaatacaggactaaacagaaagttcagatctcagtgcatagaaaaatctagtaaatgatgaaatggacatttcagattagtggggaaatggtagattctgtactaacaataatatagtgaaacaacagctaacatttgtttagtctttctatgtcccaggcagttcacaaggtaaataaaatactataccattttttggcctatcaaattggcaatgcttttttcaaattataaaatccaatattgatgggaaatgggtgcactcatgctttgctcataggagcatagatacagcctgtctggatttctgggaatagtagtaaattcaatagctgcagtaattaaaggatgttaactgcagcgttatttataagagtagaaattggtaatgacccagatatttaacggtgtgatactggctaaataaatcatacttcatccataaataggaaccaggtacccattaaaaggattgttagggtgacacagataatcatcagttgtgtattattaaatcaaagaacaaaggttataaaatagtatgtattggaggatcccatttttgtaaaatatactatgttaatttcttagggttgccataacaaattaccacaaactgtgtgacttcaaacaacagtttattttttcatagttcttaggtgagaagtccaaaatcaagttgtctgcaggactatgctccctctgaagtctctagaaaagaatccttccttgtttcttcgagcctctttttttttttttttaagatggagtttcactcttatagcccaggctggagtgcaatggtgcgatctcagctcactggaacttctgcctcccgggtacaagcgattctcctgcctcggcctcctgagtagctgggattacaggcatttgccatgatgctcggctaattttgtattttttagtagagacagggttttgccatgttggccaggcttgtcttgaactcctgacctcaggtgatccgcccacctcggcctcccaaagtgctgggattacaggtgtgagccaccgcgcctggccatttcttctagcttcttatggttgttgacagtccttggcattgtttgacttgtggtggcataatgccaatctctgcttccatcttcacatttttccttgtgtgtctgtgtccacatttccctcttataaggatatcagttgttggatttagggcccattccaatctagcatgacctcatcttaacttgatttcatctgcaaagactcttgtttccaaataaggttacactcacaggtattatgagttaggacttgaacatatctctttttggagcacagttcaacccagaacgtaaatatgtacatacatctacatagtaaaaagaatggaagaatatagcagtgttacagtggtagaagttttagaaggaggaagtatgatttttaaaattttcttccttcatttattttactaattttttatattttgagcattatgacttttataataattagaaaaatgacaaagagttgtattggagcaaaactcagggaaggaacaaagatggggagattagtgctctcctattaacatcagcccttattaataatttattataattttcctaattacttgtccttctagaaaacggcgtgtcttgattggatggaagaattataggagtagaagggcaggaactagaaaagtcaggagaatggagcataattttggaaggcaagttgaagtgggatgccacagtgcctgggggcactgagggtctatgagaacgaaggggcggatgatggcagaagaaggaaaagagacag

SEQ ID NO: 13 - DNA, 2614 bp, Homo sapiens
gcagagattttatcgggagcagtgaggtgactttggcagctaacaggccactagtatcctactaaagcttttgtctggataggagcaacatgcatgtttacagtcttgcagtgtgctgagagctggtggccagtgggactgagtgagctgtgtgccgtgtattgacccgcttcctagtcctgaattcctttcagaagctccggcagggaggatgatacagtcagacaaaggagcagatccaccagacaagaaggacatgaagctttctacagccaccaatccacagaatggcctctcccagatcctgaggcttgtgctgcaagagctgagtctgttctacagcagagatgtgaatggagtgtgtctcttgtacgatctcctccactcgccgtggcttcaggctctgctaaagatttatgactgcctccaggaatttaaagaaaagaaactagttcctgccacaccacatgcacaggtgttatcctatgaggtagtggagttattacgtgaaacccctacttcccctgagatccaagagctgagacaaatgctccaggctccacacttcaaggccttgctcagtgcccatgacacgatagctcagaaagattttgaaccccttctccctccactgccagacaatatccctgagagtgaggaagcaatgaggattgtttgtttagtgaaaaaccaacagcccctgggagccaccatcaagcgccacgagatgacaggggacatcttggtggccaggatcatccacggtgggctggcggagagaagtgggttgctatatgctggagacaaactggtagaagtgaatggagtttcagttgagggactggaccctgaacaagtgatccatattctggccatgtctcgaggcacaatcatgttcaaggtggttccagtctctgaccctcctgtgaatagccagcagatggtgtacgtccgtgccatgactgagtactggccccaggaggatcccgacatcccctgcatggacgctggattgcctttccagaagggggacatcctccagattgtggaccagaatgatgccctctggtggcaggcccgaaaaatctcagaccctgctacctgcgctgggcttgtcccttctaaccaccttctgaagaggaagcaacgggaattctggtggtctcagccgtaccagcctcacacctgcctcaagtcaaccctatctttctatactcttttatagaagatgacatgaagattgatgagaaatgtgtggaagcagatgaagaaacatttgaatctggtaaacaaggaggagtttgttggctacggtcagaagttctttatagctggcttccgccgcagcatgcgcctttgtcgcaggaagtctcacctcagcccgctgcatgccagtgtgtgctgcaccggcagctgctacagtgcagtgggtgccccttacgaggaggtggtgaggtaccagcgacgcccttcagacaagtaccgcctcatagtgctcatgggaccctctggtgttggagtaaatgagctcagaagacaacttattgaatttaatcccagccattttcaaagtgctgtgccacacactactcgtactaaaaagagttacgaaatgaatgggcgtgagtatcactatgtgtccaaggaaacatttgaaaacctcatatatagtcacaggatgctggagtatggtgagtacaaaggccacctgtatggcactagtgtggatgctgttcaaacagtccttgtcgaaggaaagatctgtgtcatggacctagagcctcaggatattcaaggggttcgaacccatgaactgaagccctatgtcatatttataaagccatcgaatatgaggtgtatgaaacaatctcggaaaaatgccaaggttattactgactactatgtggacatgaagttcaaggatgaagacctacaagagatggaaaatttagcccaaagaatggaaactcagtttggccaattttttgatcatgtgattgtgaatgacagcttgcacgatgcatgtgcccagttgttgtctgccatacagaaggctcaggaggagcctcagtgggtaccagcaacatggatttcctcagatactgagtctcaatgagacttcttgtttaatgctggagttttaacactgtacccttgatacagcgatccatagttgcaatctaaaacaacagtatttgacccattttaatgtgtacaactttaaaagtgcagcaatttattaattaatcttatttgaaaaaaatttttattgtatggttatgtggttacctattttaacttaattttttttcctttacctcatatgcagctgtggtagaaatatgaataatgttaagtcactgagtatgagaacctttcgcagatttcacatgatctttttaagatttaaataaagagctttcctaaataaaataagcaatagttaactttagaaactgtactctatgaaacgtgttttatgaaaacatcttttacaaaaagtgcttacttgactaactcagcaagaaaggtttaatgtacacatttcacatctaaaatcaaaacctacaagaaactgcactgccttcactatttacaaatcggcctacaagga

SEQ ID NO: 14 - protein, 337 aa, Homo sapiens [sequence omitted]

SEQ ID NO: 15 - DNA, 2498 bp, Homo sapiens
gcagagattttatcgggagcagtgaggtgactttggcagctaacaggccactagtatcctactaaagcttttgtctggataggagcaacatgcatgtttacagtcttgcagtgtgctgagagctggtggccagtgggactgagtgagctgtgtgccgtgtattgacccgcttcctagtcctgaattcctttcagaagctccggcagggaggatgatacagtcagacaaaggagcagatccaccagacaagaaggacatgaagctttctacagccaccaatccacagaatggcctctcccagatcctgaggcttgtgctgcaagagctgagtctgttctacagcagagatgtgaatggagtgtgtctcttgtacgatctcctccactcgccgtggcttcaggctctgctaaagatttatgactgcctccaggaatttaaagaaaagaaactagttcctgccacaccacatgcacaggtgttatcctatgaggtagtggagttattacgtgaaacccctacttcccctgagatccaagagctgagacaaatgctccaggctccacacttcaaggcaagccttgctcagtgcccatgacacgatagctcagaaagattttgaaccccttctccctccactgccagacaatatccctgagagtgaggaagcaatgaggattgtttgtttagtgaaaaaccaacagcccctgggagccaccatcaagcgccacgagatgacaggggacatcttggtggccaggatcatccacggtgggctggcggagagaagtgggttgctatatgctggagacaaactggtagaagtgaatggagtttcagttgagggactggaccctgaacaagtgatccatattctggccatgtctcgaggcacaatcatgttcaaggtggttccagtctctgaccctcctgtgaatagccagcagatggaggatcccgacatcccctgcatggacgctggattgcctttccagaagggggacatcctccagattgtggaccagaatgatgccctctggtggcaggcccgaaaaatctcagaccctgctacctgcgctgggcttgtcccttctaaccaccttctgaagaggaagcaacgggaattctggtggtctcagccgtaccagcctcacacctgcctcaagtcaaccctatacaaggaggagtttgttggctacggtcagaagttctttatagctggcttccgccgcagcatgcgcctttgtcgcaggaagtctcacctcagcccgctgcatgccagtgtgtgctgcaccggcagctgctacagtgcagtgggtgccccttacgaggaggtggtgaggtaccagcgacgcccttcagacaagtaccgcctcatagtgctcatgggaccctctggtgttggagtaaatgagctcagaagacaacttattgaatttaatcccagccattttcaaagtgctgtgccacacactactcgtactaaaaagagttacgaaatgaatgggcgtgagtatcactatgtgtccaaggaaacatttgaaaacctcatatatagtcacaggatgctggagtatggtgagtacaaaggccacctgtatggcactagtgtggatgctgttcaaacagtccttgtcgaaggaaagatctgtgtcatggacctagagcctcaggatattcaaggggttcgaacccatgaactgaagccctatgtcatatttataaagccatcgaatatgaggtgtatgaaacaatctcggaaaaatgccaaggttattactgactactatgtggacatgaagttcaaggatgaagacctacaagagatggaaaatttagcccaaagaatggaaactcagtttggccaattttttgatcatgtgattgtgaatgacagcttgcacgatgcatgtgcccagttgttgtctgccatacagaaggctcaggaggagcctcagtgggtaccagcaacatggatttcctcagatactgagtctcaatgagacttcttgtttaatgctggagttttaacactgtacccttgatacagcgatccatagttgcaatctaaaacaacagtatttgacccattttaatgtgtacaactttaaaagtgcagcaatttattaattaatcttatttgaaaaaaatttttattgtatggttatgtggttacctattttaacttaattttttttcctttacctcatatgcagctgtggtagaaatatgaataatgttaagtcactgagtatgagaacctttcgcagatttcacatgatctttttaagatttaaataaagagctttcctaaataaaataagcaatagttaactttagaaactgtactctatgaaacgtgttttatgaaaacatcttttacaaaaagtgcttacttgactaactcagcaagaaaggtttaatgtacacatttcacatctaaaatcaaaacctacaagaaactgcactgccttcactatttacaaatcggcctacaagga

SEQ ID NO: 16 - protein, 439 aa, Homo sapiens
MRIVCLVKNQQPLGATIKRHEMTGDILVARIIHGGLAERSGLLYAGDKLVEVNGVSVEGLDPEQVIHILAMSRGTIMFKVVPVSDPPVNSQQMEDPDIPCMDAGLPFQKGDILQIVDQNDALWWQARKISDPATCAGLVPSNHLLKRKQREFWWSQPYQPHTCLKSTLYKEEFVGYGQKFFIAGFRRSMRLCRRKSHLSPLHASVCCTGSCAVGAPYEEVVRYQRRPSDKYRLIVLMGPSGVGVNELRRQLIEFNPSHFQSAVPHTTRTKKSYEMNGREYHYVSKETFENLIYSHRMLEYGEYKGHLYGTSVDAVQTVLVEGKICVMDLEPQDIQGVRTHELKPYVIFIKPSNMRCMKQSRKNAKVITDYYVDMKFKDEDLQEMENLAQRMQFGQFFDHVIVNDSLHDACAQLLSAIQKAQEEPQWVPATWISSDTESQ

SEQ ID NO: 17 - DNA, 2609 bp, Homo sapiens
gcagagattttatcgggagcagtgaggtgactttggcagctaacaggccactagtatcctactaaagcttttgtctggataggagcaacatgcatgtttacagtcttgcagtgtgctgagagctggtggccagtgggactgagtgagctgtgtgccgtgtattgacccgcttcctagtcctgaattcctttcagaagctccggcagggaggatgatacagtcagacaaaggagcagatccaccagacaagaaggacatgaagctttctacagccaccaatccacagaatggcctctcccagatcctgaggcttgtgctgcaagagctgagtctgttctacagcagagatgtgaatggagtgtgtctcttgtacgatctcctccactcgccgtggcttcaggctctgctaaagatttatgactgcctccaggaatttaaagaaaagaaactagttcctgccacaccacatgcacaggtgttatcctatgaggtagtggagttattacgtgaaacccctacttcccctgagatccaagagctgagacaaatgctccaggctccacacttcaaggcaagccttgctcagtgcccatgacacgatagctcagaaagattttgaaccccttctccctccactgccagacaatatccctgagagtgaggaagcaatgaggattgtttgtttagtgaaaaaccaacagcccctgggagccaccatcaagcgccacgagatgacaggggacatcttggtggccaggatcatccacggtgggctggcggagagaagtgggttgctatatgctggagacaaactggtagaagtgaatggagtttcagttgagggactggaccctgaacaagtgatccatattctggccatgtctcgaggcacaatcatgttcaaggtggttccagtctctgaccctcctgtgaatagccagcagatggtgtacgtccgtgccatgactgagtactggccccaggaggatcccgacatcccctgcatggacgctggattgcctttccagaagggggacatcctccagattgtggaccagaatgatgccctctggtggcaggcccgaaaaatctcagaccctgctacctgcgctgggcttgtcccttctaaccaccttctgaagaggaagcaacgggaattctggtggtctcagccgtaccagcctcacacctgcctcaagtcaaccctataagatgacatgaagattgatgagaaatgtgtggaagcagatgaagaaacatttgaatctgaggaactttcagaagacaaggaggagtttgttggctacggtcagaagttctttatagctggcttccgccgcagcatgcgcctttgtcgcaggaagtctcacctcagcccgctgcatgccagtgtgtgctgcaccggcagctgctacagtgcagtgggtgccccttacgaggaggtggtgaggtaccagcgacgcccttcagacaagtaccgcctcatagtgctcatgggaccctctggtgttggagtaaatgagctcagaagacaacttattgaatttaatcccagccattttcaaagtgctgtgccacacactactcgtactaaaaagagttacgaaatgaatgggcgtgagtatcactatgtgtccaaggaaacatttgaaaacctcatatatagtcacaggatgctggagtatggtgagtacaaaggccacctgtatggcactagtgtggatgctgttcaaacagtccttgtcgaaggaaagatctgtgtcatggacctagagcctcaggatattcaaggggttcgaacccatgaactgaagccctatgtcatatttataaagccatcgaatatgaggtgtatgaaacaatctcggaaaaatgccaaggttattactgactactatgtggacatgaagttcaaggatgaagacctacaagagatggaaaatttagcccaaagaatggaaactcagtttggccaattttttgatcatgtgattgtgaatgacagcttgcacgatgcatgtgcccagttgttgtctgccatacagaaggctcaggaggagcctcagtgggtaccagcaacatggatttcctcagatactgagtctcaatgagacttcttgtttaatgctggagttttaacactgtacccttgatacagcgatccatagttgcaatctaaaacaacagtatttgacccattttaatgtgtacaactttaaaagtgcagcaatttattaattaatcttatttgaaaaaaatttttattgtatggttatgtggttacctattttaacttaattttttttcctttacctcatatgcagctgtggtagaaatatgaataatgttaagtcactgagtatgagaacctttcgcagatttcacatgatctttttaagatttaaataaagagctttcctaaataaaataagcaatagttaactttagaaactgtactctatgaaacgtgttttatgaaaacatcttttacaaaaagtgcttacttgactaactcagcaagaaaggtttaatgtacacatttcacatctaaaatcaaaacctacaagaaactgcactgccttcactatttacaaatcggcctacaagga

SEQ ID NO: 18 - protein, 293 aa, Homo sapiens
MKIDEKCVEADEETFESEELSEDKEEFVGYGQKFFIAGFRRSMRLCRRKSHLSPLHASVCCTGSCAVGAPYEEVVRYQRRPSDKYRLIVLMGPSGVGVNELRRQLIEFNPSHFQSAVPHTTRTKKSYEMNGREYHYVSKETFENLIYSHRMLEYGEYKGHLYGTSVDAVQTVLVEGKICVMDLEPQDIQGVRTHELKPYVIFIKPSNMRCMKQSRKNAKVITDYYVDMKFKDEDLQEMENLAQRMQFGQFFDHVIVNDSLHDACAQLLSAIQKAQEEPQWVPATWISSDTESQ

SEQ ID NO: 19 - DNA, 1978 bp, Homo sapiens
gcagagattttatcgggagcagtgaggtgactttggcagctaacaggccactagtatcctactaaagcttttgtctggataggagcaacatgcatgtttacagtcttgcagtgtgctgagagctggtggccagtgggactgagtgagctgtgtgccgtgtattgacccgcttcctagtcctgaattcctttcagaagctccggcagggaggatgatacagtcagacaaaggagcagatccaccagacaagaaggacatgaagctttctacagccaccaatccacagaatggcctctcccagatcctgaggcttgtgctgcaagagctgagtctgttctacagcagagatgtgaatggagtgtgtctcttgtacgatctcctccactcgccgtggcttcaggctctgctaaagatttatgactgcctccaggaatttaaagaaaagaaactagttcctgccacaccacatgcacaggtgttatcctatgaggtagtggagttattacgtgaaacccctacttcccctgagatccaagagctgagacaaatgctccaggctccacacttcaaggcaaccaccatcaagcgccacgagatgacaggggacatcttggtggccaggatcatccacggtgggctggcggagagaagtgggttgctatatgctggagacaaactggtagaagtgaatggagtttcagttgagggactggaccctgaacaagtgatccatattctggccatgtctcgaggcacaatcatgttcaaggtggttccagtctctgaccctcctgtgaatagccagcagatggtgtacgtccgtgccatgactgagtactggccccaggaggatcccgacatcccctgcatggacgctggattgcctttccagaagggggacatcctccagattgtggaccagaatgatgccctctggtggcaggcccgaaaaatctcagaccctgctacctgcgctgggcttgtcccttctaaccaccttctgaagaggaagcaacgggaattctggtggtctcagccgtaccagcctcacacctgcctcaagtcaaccctatctttctatactcttttatagaagatgacatgaagattgatgagaaatgtgtggaagcagatgaagaaacatttgaatctggtaaacaaggaggagtttgttggctacggtcagaagttctttatagctggcttccgccgcagcatgcgcctttgtcgcaggaagtctcacctcagcccgctgcatgccagtgtgtgctgcaccggcagctgctacagtgcagtgggtgccccttacgaggaggtggtgaggtaccagcgacgcccttcagacaagtaccgcctcatagtgctcatgggaccctctggtgttggagtaaatgagctcagaagacaacttattgaatttaatcccagccattttcaaagtgctgtgccacacactactcgtactaaaaagagttacgaaatgaatgggcgtgagtatcactatgtgtccaaggaaacatttgaaaacctcatatatagtcacaggatgctggagtatggtgagtacaaaggccacctgtatggcactagtgtggatgctgttcaaacagtccttgtcgaaggaaagatctgtgtcatggacctagagcctcaggatattcaaggggttcgaacccatgaactgaagccctatgtcatatttataaagccatcgaatatgaggtgtatgaaacaatctcggaaaaatgccaaggttattactgactactatgtggacatgaagttcaagttttagtctgtgtgctaccaaagcaagcacaggatgaagacctacaagagatggaaaatttagcccaaagaatggaaactcagtttggccaattttttgatcatgtgattgtgaatgacagcttgcacgatgcatgtgcccagttgttgtctgccatacagaaggctcaggaggagcctcagtgggtac

SEQ ID NO: 20 - protein, 293 aa, Homo sapiens [sequence omitted]

SEQ ID NO: 21 - DNA, 102779 bp, Mus musculus
  misc_feature (1)...(102779): n = A,T,C or G
cgggccgtccgcgtcgctgccccgggcccggtagagcgcgacaggcggggccgccgcgggggccatgaccgtggagcagaatgtgctgcagcagagcgcggcgcagaaggtgaggcgcgggctggtcgccgctcctcgacgggccgcgtggcctcccggccggccgggccactccgggagcgtcgcgctcggtcccgcggggctgcgtgcggagcggggtgtgcagtagtgagaggcttcgcgtccactcccttctgcggattgctctcccagaaccgacggcgccgcgtccccagagtgacccccgcattcctccagtactcactctgccaggctttgtaattaaactttcttctccttcgcttccttttccagtcccttttcttctgcaagaatgtcacttgtcaccccttttggacagtttctctttcggaggtcttattgtgccaggcctgctgttctggggaaaaaaaaaccggacctccccaaaacgaattacctgtcttccagggcaggtacatcgcatcgacccagggtggaatctgtacaagtagagtgtttggttggttattctttcttttctttattttattctctcttggatctagaaagtatctcgcgcgtaaggagacctttatggctgttactcaaatcttttgtcccctaagtttgaccttgctctcttgttcgttctttactctagcatcagtttcacgcagagttaggggggtcatcacatattgtttctcgaacagtatcttgctagttctaggttttactttaagaatctttaaaagctccagcatagcttgctccatgtcctgaagagcagacggtcattacttgttctgccctcccccctccccccttattggtgtgaaaagcattttgagcaccggggaaatgttggcttagttgaattctaattgtaggagcaattaggtatacagtgaacagccagagcctcctttggctcatcggtgtgagtaatggatgccacaccctgctgtagttttgacactaggtacttgctgtaaagcctacctgtgcttgtctttaaagtgaggcctgttgtactaaaaaatagaccaataccttcaaacagcccccccccccccgtttttttctttttgtcattaaaatagttttagcattttatgttccttgagataaccaaagatgtcagagaatgttggaaagtagggatagtgcattgttattttagacactttggttaaagttggttttggagcctattttagtctatgcttcttgcacattgagacgattatggtgaactgtgatgtagtttgtaatgtggcagaagaattcaagactgaataacaataacgaagaaaacagttggcctcccaattctgtatgttgttcctagaacactataatctttagatgttgatgttgaatgtgtgctgtagttttggttggaaggtcatgggatctttggcatgttaagcaataggctcagtagcattttctttatactcattttgcattttaaaacgtctttatctcaaagtgggaaaagttgctgtcttttttgcttctcttaaacttcaagattgcaaggactttatgggttttgtctttcgttttgactaaaccacttctttgcatagtcagataactaccttgatggctcagaactgtatacataagtctgtagaatcaagaatcaaattactgaaagttaactttgttttctagtccaatattcatgcttaataagcctcctctcccctaagagaatattctctaattcaaaatattaacattgtgatgctgtttttagcatgtgttgagtatgttaaatcatttcactgataattggtgaatgcttttagagcaacatcatatatttttgtacacccagaatatttacttttaatggtgttggggactgaacctagggcctcatcatgctagccaagaactctaccaactgaactacatttgtagttttttaaatgtgttcctttgccttgttaatacactgttattttgtgaccagtattagaacagggccaaacagtatggttttaaattcttttgaaacaatgtaactcaaagttgaagttttaaaatgacgctagaaactagggctaggactttgccttaagaagtaggaagtgaactctatacttaagaaacaaaagtgaaactaatttcacttagaagcttcaaagactgtcagggaaaggaagggctatcaggagcaggctgctgtgtagatagaatttttgcagttttcttttcttttcttttttttttctcctctctaaaaagtgtgcagatctgttgacaaattttaagtaaatggccattatagttgttgaaatgattttctgttttcaagatttttcttcctttttattgtaaagagctgtaagattagtatctttttaaagcaacagtacacaaaactttgtgtttcttttctttcttttttcttttttcttttcttttcttttctttttttttaaatctaagtaaggtgcaacaatgtaattcgaaggggcagtgtcttcccttcctgtagtctctgcttaattcctgaagtttgccaaaccaggagttaggaaaagttggaaacctgcagagagagcgtttgagaggtttgagatgttatacgagagggtttggcaatgtgtggagtacaggtaaacttgcggttattgttttcttggccctctatcttcatcctttgtgcttgctatttaccttgctgtcggatcattatatcttagaagaaactagatacatacattcacattccaaatcccagttcattagggaaggattggtaacttcctcccaggaatcaaggtgacttagagttgagcccttcaccaggaaagcagcctcgtgagtgagttacctgttcggctgcacaagaggacttagaactgttcttgtcccatagtaggactcagtcaatagttaatgtgaatggttgttggagggaaagcaagtagagtgactccttagatccctaagtaagaactgacatttggttcctgagaaacaaagagggcttgacaagcatccaggaaagtaagtggtagaaggaacgagacaggacgtggattagatcaaaattgcgctctgtgaccttgggcaactcatgaaatgtctctaagtcttcttagaaaactttacactttgtagacacgagaaacttcttcagatctgagtgtttaacgggtctaagtgggcatttattattatttttaaatgtagtatgaggatatatagaggcataaatatcctcttcaattgaaaagagtcaagacaacagattattcaaaaagtgctatcattgtttgctctgtgtataaatacaaaaacagtagtcagaaaaaaaaatcttattagttttgccataagtatccaggtatgtccatcactgagcaagctggggcagaaatgttctcattttaggccagctggctacatagcaagttaaactgtagtagtcttgagaggagtaggggagagggagaaggaggaggggaaaaggaaaaaaagatatttataattttttataatggttaccaatcatattttctagacacaccatgccacaattcaaaagcagtaaaacagttccctaaaaaaatactgccttgggggccaaagagctaggccagccactaaaatgtcctttgcccaaacatgagaacctgtgtttggtctccagcacccatgtaagaagcagacatagcagcacccatttggaaagatggagtgagcatcacgtccagtgagagtctccaagtctacgggagaaagtgactaaggaacgcatccagcattggccactagcttactgtttattacacgagcaagtgtgcacatgatacgtgtgtgtgaacgcaggcacacctgtcccaacaagttttgaaggtcagaggacaactttgtagtcacctctctcctttcacctttgcgagaggttctggaaatgcaatccaggtcccctggcttgaaaggcaagcgctcttacctgctcagctacccagctgacccgttgcctgtttgatcagttccaacagtccccagggctcagtgcagaggagatatgctttcagcagcaactggagtttgaattcttttcccaggctaggattctggtgtggggatatgtctgtcattcgatgtgggacagcagcagtgaaccgtagctcaccgtctgtcactcaaaaggaaatgagctgctctttgctattgacttttggatacagatattaagttatgtgagatattcagcaccgtattgtagagcaccatttagactgggggcgatttttttctgattgaagaacagatttaagtggtttgagcacggtaagctatgatttagggttgattagtttgggcaaatcttggtttttcacctggatccacagactattttttaatgttttgtttttgctattaaaatgtttttgagcttcaaacatcttccgtatttcagtttgtttctgaatatttccatggctgtggcaacatagagacatcagtatatttctggttcttcctagtttttcattaggaattttttgttttatacacatatatatatatatatatacatatatatgtgtgtgtgtatatatattacatgttacaaaaattcatatatatatatatatatatatatatatatatatatatataaataaaatcaaatttgtcagcaactctttgagtaggcaggcaaatctgtatttgtttggacaaatacataggagtagaaatgttaaaataaactctcaaattgtgacccagactgccatactttctttcagaaaagtctagttggtttataatttcctcaagacttgctcttgctagtctttgatgctttagccacttttaatggaaactcatattggtttgtgtttccttttgactaacagtttttgaggccttctatgggtgattatgttctgaataacttttaaatatcacttttaatatagtacccagttttcccttgacataggtagtagcaacagctgactatttttcccaactgaaatgttaaaaatgttattagagctaaataataagtataaatgtgtttgtaaaatgaagccgcacaatccattttatttcttaagagacttatctgattaaaaaaaaaagcatcagtgctgaaaactaggaaccattttctttgtcatgcctcaggtcaaatattcaatttatctctttaattattgataggacatatactctagaaatcttcataatgcatattttattaccagtgtctaaaatattttcacagtggatgtactgccacaggtacgcagtctcaggaccagtctaggttacatagtgagagcctcttttaaactaccattgtcaaaaacaaacaaaaagccacttgttctgatttagttggtgaagaagttttggaaacaatgaagtttggaggaaaatggtagatacaggatgagtttagatgattgactcgaactgtaagccctcccccgccccactgcgtctgttggtattttcagtggaaaaggattggaaacatgaagggctttagtcatcagggaggaactgtctgcagaactgagagctaagttcccaccgaagcaggatagatatatacaggaatatgtagagaaggatcaggaaagactggatgctctgttaacaccaatggggacagcgattgcacagaggtgtatgtaaaacctagtgcttaatttcatgacagtgtacatgcagaatcagatgccttagatccttaaggtagtgctgtaaaaaccagcttgggctggagctcctagctttctgtatcctcctctgatgctgggtctggagatttcagctaaaaagtctggcaagtctttccctgaagccttgaggggaagggggaggggtggtggtaggggaggaggtgggggcgctggaagggagaaagggaggatgttgggggctcggggagggggaggggaaggagttggaggctcagggagggggaagggcaatgctatttgaaatgtaaataaataaaataattaataaaaataagaaagtggaacagtaagatctgagaaagaggatgaaaagtaaactagaaacagctttaatgattgtgtctttggaaggaagctgcagctcagcttagtttgcctagagtcagcagacattgtgcaccaagcagagtctctaaactaacattcattccagtttcccacctagtggagcatcagctacaggataatgatagcactgcagaactagaagggttgccttggtgccttgggtggctggcattagagggacaacagcagcgagcctgagcttctagagagctgtcactaggcaggtgtaaacaggtcacttggtggccaaccttagctgtggactgcctgtgttgtgagacagggacaggactctctttggtcacatggtcctgtcctatgtgatgtggctccagggtagctagtcggatcttaccattagcttatgttgcgcttccttggggctggcttgggcaaagctcatgatctgcagatctggagggaaaaggatgttgcattcccggtgaaaggctttgtaggtagtgtgtcttgtactccttccttgcctggggaagcaggtagaggtttgcaagcttatatccaaagacaaccggaagcttgcaaagcttgcccacttctttctctctcccttttcctccttacttcctgcgaacattctagtcgccaatttctttctacatgtatcttaatttaatctctctctctctctctctctctctctctctctctctctctctctctgtgtgtgtgtgtgtgtgtgtgtgtgtgtgtgtgtgtaggcacacatgtcatgaggaagccagaagacaatttgcaggcgtggttgcctcttcttgtccgtattctggggacagaacttaggttcccaggcttagggacaagcgtctgtgcctgctgagccatctccttgtccccttgtcaaattgttcactcatttattttctattttcttaattgggacttaagaatcctttgcctattttctgtattttcctagacgtgactgaccatttaattttcttaccaatttctttgaattaaaaatatttaaattttgatgttctattttatttatgtcatttcccttagattagcccttttaactatgtttcctttttccggttctccacttccaagtttagttttagcctggatgttttctataacctatttgaagttgtttgtatgtgtgctctgaggtatataaaattgaatgtatgtttgaaatttagtaaaatttgtatgactaatatttggtacaaacacagaatttcaaggctaacttcatgtggatgtgtgattgacccagtacctttgtgtgaaaggataacagttgatattgagttgaggttagttgaccatcgacgaggaggtttgatagtctcacctgccttcattctgttcttattctatataatgtcacaagcactgtgttttaaggacatattttgaaataggttggggaagttcttcggcattcttttttgttgaaagaatgtcttggctgttcttgctgtttttttgcatttccatgagaaattctaatgttctttgtacagttgagccgaaatgaaggtaggagttttgagtaggaatgtgttgattatagagatcaattctgagtgcatagacccgtttaatctaacaacattctacagttcctcgttaatttagattttaatttcttaatagcatatcatttctagatcctggtgtatcatttattagtgttgacttttttgatattattctagagggcattttttttgttgttgctatttaggtttgtgttttgtttttttggcagatagattataattgatttttgcataacctatgtcctgtgaccttgctaaatgatctcctagtgctaatagagtctatactttatcccttcctatctcctgtctcccccctctctgtctctctttctgtctctctccgtctctctctgtctctgttctctctttctctccgtgtgtgtgtgtgtgtgtgtgtgtgtgtgtgtgtgtgtgtgtgcttgtgtgtttgtgattatttttcttccttgctattgttttattgtcctctcgggaatctcctgaaaacattgacttggaattcttgcactcttcctcattatattccgggaatgctttgtcttgtactaaatgtaatctttgccacagtttttttgaaagatatatttcgtaaggttggaaatgttttcttcagttcttagcctgtgaaagttttggtgagaccgtggtcatccttttgtgtttcaggagatactgaagcttaatgatctatttgcttatctttgccagtgcttattgagcgttctgattcttgcttgtaaaattcttcttcttcatcttctctttattttcttctgatttcaaggtgttccttgtagtccagcatttacgcgtgcttgttttcttttgctctaaccgaataacgccaagcacatgaaaagaagggcaggtttggccggcccctctatggagttcatggttggttggccctattgcttttgggcttgtgcacatcatggtagagtgcctgttaaaggcagccactcagattatggtgggcagaaaagaagagaaagagagtggaagaagttaggtccttttccaggcatctcatccctagagtctgccttcctcttgtccctgcctttttcccttccctccccttccctcccctcnnnnnnnnnnnnnnnnnnnnnnnnnnnnnnnnnnnnnnnnnnnnnnnnnnnnnnnnnnnnnnnnnnnnnnnnnnnnnnnnnnnnnnnnnnnnnnnnnnnnnnnnnnnnnnnnnnnnnnnnnnnnnnnnnnnnnnnnnnnnnnnnnnnnnnnnnnnnnnnnnnnnnnnnnnnnnnnnnnnnnnnnnnnnnnnnnnnnnnnnnnnnnnnnnnnnnnnnnnnnnnnnnnnnnnnnnnnnnnnnnnnnnnnnnnnnnnnnnnnnnnnnnnnnnnnnnnnnnnnnnnnnnnnnnnnnnnnnnnnnnnnnnnnnnnnnnnnnnnnnnnnnnnnnnnnnnnnnnnnnnnnnnnnnnnnnnnnnnnnnnnnnnnnnnnnnnnnnnnnnnnnnnnnnnnnnnnnnnnnnnnnnnnnnnnnnnnnnnnnnnnnnnnnnnnnnnnnnnnnnnnnnnnnnnnnctacataagaattcactatgtagatcaggttgactggccaggaaccctcaaagatctgcctgcctctgcctccccagtggtgggattatagacatgtgttaccatgccctagcactgagccttctcattagcatcctgagcctttttattctctttatagtgaaagttcaaggattaaagtttctaggggattgttgtttttctcaatatgaataactgaggaagaaaacagcaaaaaaggttcttagctctttgataggaatttggtgagcctgtaaagtgtgtgtgtgtgtgtgtgtgtgtgcgcgcgcgcgcgtgcgcatgtgtgtgtatttctgttcattacattcctaaaatttaatctttctgcttcctactttgtggtttccatcttagagaccttttgtattttacagtttaggcccacggcttccaagtctctatattcaaaatgaacttcacgctacatcttcagctcagttctggattccagttggatgcctgctttgtgcataagtatacaattatcagtcagtgtcatgactgccttcatttcttcctcctctgttttatgcagatgaaaaacgtgtagtctgtgggggtgtgagcccaaatgataagccaaaggctaagggaaaatggaggagacagcactcagggcttgaagtggagggaacgttataaatatgtgagagagctccattgttagagagaagagcaaggacaaagaaacctgaattgatctgatattatttgtttactacaaatagctggactagaactgtggcagaataatgaacaaatattctgtcttttctcttgctttctggcacagagtcctgaaaactctttgaattgacttttttttttctaaccttaggaagatgactcatggtgcttgaagagtctggattgcttcaggatgggagttgcctgggaaaaactaaccagtgtcactcgagggtgggacatttggtatatcactgcaacctccagggaaggacaggaggatgcaggctgagttccgtcactagtggtcaatgattgcattacctggtcctttataaagctcagcccatgtctattttgaatcgagtgcctaatagtactgtaggagagtgctcaacctacatggttagattgtaaccttctgtttgtttttgtttgtttgtttgttgagacagggtttctctgtgtagccctggctgtcctgtgactcactctgtagaccaggctggcctcaaactcagaaatcctcctgcctctccctcccaagtgccgggattaaaggcgtgcgccaccacgcccagcagattgtaaccttcttagattgtgtttcccagagacatttgttctctcaagggtaaatcttcccctcctaattgttttgagatctattttcttagaaaatatataacaatagattttaataattaaaaaaactgtcaggaacattttctagttaagggccaaccaggacaaaaaaaaaaggagagagaacacaaaaattatagtaaggaaggctttatataattcaccaagaacagatgtttgatcaagagtaactgaaggaggagatagggctcatggaatgggcctgtaagaccagctaagcagggcgtgggccaggagcaggacacctgcctgggctacagattcatttgaagatcagcataggcagcttagtgagaccctgttgcaacactgaaaagagatgctgcggagaagactcactggctaagagtatggagtgctttcaggggcggcttcagttcacagcacctcaagtgcggcttagaacttcagtcccaggagatccagcaccctctgctgtaggctgcaaaatgttagtgcaaatttctgggttgcagcttttctcttaacccagatagctcccaaataattgaaatgactattagatttatttaacaggtttaaggcacaacaactgagcagtagtaatctattttatttctccaaactaatctggttacctcccagccaaaatattcgagatacttgcgttttagtatcgatctggctctctctgttccaggtgaattctcacagtgtctcctggaccttctcctcctcggggatccccacttcctgtgtctccctcctgctcccctggctggaatagtccagccctattctctcctctgctcagtcactgactgacaagtttctttattgataagtcagggagtaattgggagcaaagcttacacaacactgagacaagagattctcagaataaggattgcaatgagatgtttggttttttttgggggggagggcatggtggtcatagaaatcagcctttggataatacaaggataatctttacacagtgcacagtaacatgcctgtacatagttagccattatgtcattaataggaccaaaagttggatttgctttaaggaattgttttgtgacattaagctgtgaggaattatgagacccttttaatttgaaagttctgctttgaaaatagtgttggttagttttgatttcaacttgacataatctgtaatcacccggaaagagagtttcactgagagttgacctgttggacatgtctttggggtggtgataatctttattcctttgagatgggtgagaaaggtccacacattatgagtcacagaattccctgtgtttgggccttggactgtgtacgaggggagaaagcatatctatgcatccattttctctccctcctcctgactctggatgtgaccacctccctgcttcaaatgcctactcttttgacttgcccaccataatagaagataacctggacttgtgagctaaaataagctcctttctccttaacttgcttttgatgggatattttctcacaggaagaggaagaacaactagggcaagggttttgattaacaaattgattcttcactttgtgtgtccgtgtgtgaagcctagacaattattattgagctatcgtcctgtgtttctacttaatttcctgaggcaggtctcttactgactgctcttggctggctggctggctggccaccccagggattctcctccctggcactaggtccaggtccctgcatcgcctttgtggtgggtacttgaccaccaagcttaggtcctcatgcttaggtggcaaggattaggccctgaaccctctctcagtgtccaaagcatgtttatttcattagtataagggactttacttttgcactgaaaattaattatgaaaatgtaatgcagaaattagagatacaagccgggcagtggtggcacatagcttttaatcccagccctgtagagacagaggcagaggcaggcagatctcttgatttcgggtcatcttggtctactgagttaagttctagtacagccagggctacaaagagtaacctgcctcgaaaaaccagaaacaagaaaaacaaaaccaaccaaccaaaaaaaaccaaaccaagcaaacaaaacaaaacaaaacaaaccaagaaaacaacaatgaaccaaacacagaaagaaatttgaagtacatacataacaggagaactttatttacatcagaactagctaaatgcttattttatttaaaccacagatatggaaggtaaaatatatgacttgattctccaaattttgtttacctatgtgtcttctagaatgtaagtactctaatttaaaatcacagtgtatactaaaagactttgccagtttggtttttagaactgaatatgaatgatgttcccatagaaaccatgtttgttcctgtagggttcgtatttggcctcaaaatgtacctaaattccgtaggagttttggttctagcgctgtgtaataacagtgactgggagacttgtactgacagtgccggcttacgattgttttatctgtggcctagtaggggtggagagtttctgaaatgctgtggagtattgcagataggactgagggactgggtgacaggtgcggataagaattcttgggtgagaaggatggaaacttacatttatctaggactagctatgttcctgacttcttgttggtgttggtgatttcctataggtcaactcatctcttttcttggtgtttgttttatttctgctgttccacaagtgcttcccagcctactgtcagatttctgtgtgaaggcatggctgaagggctgcaggagacacagcattaccaccagaatcccattatggaggtttgcagttatcagcagatgcagaatgcatttgaagaggagatgcactcaggttccgtaccctaaagtggcagagttgaggggtctgtagagcagaagctagaagcctcccactcagtggctggcctgtaatctgaggtttgagtctttattctcagaaaacctgaagacttgtttttttctactggtcattttaaagtttgctggccgcagccacctttgaggggacactgacctgtgagttccttttctttgtacctgaattttctttattttggaaactgagttgacaaacgcagtggctgactaaagagtcactcaagtgttagtacaatccctttcctgccatagtctgtattgctttttatcttatcattatcttatcattgagtatttcacgtgagcataactagtgaacataattagtttaagctcagagtcttcatttttcacatcattgctaatgactgaggggagaaagatctggaaaagacagtagctattgaatttccaagacctgtttttattcctgtgtctgcatctgttaatctcttgaagagacttcagggagcttccgtgagaataacttcttggggaagagagcacatgctaagtttatgaaccggaggcatttagaaaccaatattttgtctaacaagggcacagtgaacaatttacccaccccctctgccgctagccattcccacttttgcattctcagcagttatcttgatgttaactaaggtgtctttaagttactggggagctgactggggccaccctactctgcctgcctagatgtgagcagtgaagagagacttttctagtgataattgtccctagcccttgagtacccaagaccagcatagtctacactggtagactataaaccctgagagctagctagggcttattgaacccaaaggctttaaacccaacgggttttgttttgttttttttttttttcttaattttaaaaatgcaggttggaggcttgcagttctggtttagccacgagtggctccaacatttgacagctgctgtaatccttcgttttcagctgcagtgagcggagcgagcagacaccagaaggcagttcctgccagtgtgagaactctcgggtgggctgtgcatggtgggtcctcaggccccgaataggctcccgttacagcaccgagacctatggtcttgggacccttggatgttgactgctggtagtgttccagccctcgggctcccggtgttgggattcttgactcctaaagcttccatgtccttggaatcccgccagtgagcagagactgcactgcggcttgtcttggcctcttctgctcacttagtttctgtccctggctgctctctggaactctgcagccgaccttctcgtgctgccaccacattgtgttagcggctcaaagagaaccactgccctgagaactccagccctgttaagtgctctcaagccacaccagctggtagcagcagagagggactcactcaggaaggcagccaggaagcctacttattatctgctggccctctgtagcaaggtgttcgccccactcaggatgctgtgcttcctgcaagtgcaagttgacatctgtgttaatcaagctgtctgcttacgatccctccctggtttgaatgaaaatggctctggggtcagtgcctgagttaacagaaggcttgttttgcagagagtgctgctttctgaggctagggcagactggggtgctcatacctggagcaggtctgcagcagtggctgtattggtcacactgcagctgttgtcgtgttctcagagtaatcgtaaaacgcccagaaaagctgggctgctgtgacaccatctatctggtttctaagagccaaggcttcttggctgatggttcttgagactgataaccctaagggaggcttctgcctttctggtctcttctctgtagtttgactcattcaaagagcatcaaatggatatttacagcagagatgtaactaagtaaagcttaacacagaactacgagtcctacaagcatgttccaatccatacttagtaatatttaaccagtgtctattgcccttctcttctggcccccgtattccatataggtaggttccaggggtgattccactttttttctgaaacattaagaaaaaagcctggcattccctagtctactggtgaggtaaaggatttgtgctgaaacccacttgcttccttatcctggaactgcttgctatattttgcagttgtagaaaagcaggatgtcattgtgcagtggaaataaaggacagagcttgaaggtgtgtgtgcattttggcatctttgcttattgatttttgtggcgtccacaaaccaccaaatctattgaattctgttttgctctttggcccggcggtgggaacaaacagaagccgctatgttctgctctatagcacctaagaaatccatacagaggaggccactgggactcaacaataggctccagaaataggcaattggagcgagtccaccttgcatctgaacttgctagggaagcagaggttcctatgcaggatgcttgtagtgaggagaagagtttatcagagacaaatctgggaagtgtgaagtgtctgagttacctgccttgctgcttcatcaaaacataaggcaggggctggggggttcttttggctcacagcattcagaggttcagttcatcatggcagaggaggtctggtgacaaggagaggagttgattggtcacatgtgtccacagtcagatgcccagcttcctgtctcgttcttagatttagtctaagaccctaacccatggaatggtacccactgaccatttaaggtgagtctttccacctcctttaagttaatctggaaaatatttcgctgacatcccagatttagtttccatggtgattctaaagccagtcaggctgacagaaaagattaactctcacacgaaggaaggtccaggccttaccagacaaaccaggatcatgatcactgcagaaatatcagcaatatggacagagctacagaagatgagagcacagcttgtgggctaatgacaaagaggacagtgttgcaaccaggcgacttctcctggagttttctctgttgtatcccccacccccacccccccgatctcttctctatttcttgtcagtttagctaagaaccttgtctgtagctttttttctcacctccttccccttttccagtgtccccacccccttatctcctcttcactcccagtcaaaatttgtgaaaacatgaatcatggtagaacagggttctttggcagtgtgtcagactgactgctcattaaaaaaaaaaaagaaaacactgaacatttatgatatacagcaaaagtcctctgcatgatttctctgcattttttaatgaactctgtgtcagccaactagtaccataaaaatcaccttagtatttggttgcataccaagacggtgctatcatgatcactgatttacaggcaggctgaatggctcttttctacgtctgccccatttggcagggggtgggtggcgggtgggcttaagtgggctccccgaatcttctagtgaggcatctgtggaaccataaggcacttccaaccctccaaatacatcccatttctgcttgtgtgttgccctcgatcgtaccactgttgaacgtctatcttctttgccatagggaaataagtctttagaggaaggaaggaaggaaggagtaccaccaaggtgtttatgtactgtttgggatgggcccttcctagcatctttgtattgcatttgttattaaaataaaagcgcgtttgccttgttcatactgcatctaggttgatttgcataaagtcatttgaggcacatttttcctggaatcagtctccggtgggatgttggtctttataatgtcccatgcgtatttggtcatctcgttaacattaatgtgtgacagccgctttcttggttcaaggacatgaacatttctacaaaataattaaatttccttgggatgttcaataatttttctgagatgcatgattaaataatttgccattaaaaaaataatgtaaataaaatattgaggttgtaggccctgtacattgcaaataggcttgtggcattttcttagcatgttatagtgactaaactaagttttacattatagaaaagagtcctgtatgttttttaaaaatatatacttaatttctaatctttggtattgattccactgtcagttttactccagtttttcaaatacaaatcaataggagaggtttaaagagaaatatgacttttcttattgcaacctgtagattgtccatttgatgctttcatgaaacttctgtgtacttcctggcctttacatacttttcttttgtatcttaacatctattgtattattaggtgctgccgtcttggttccttaataaggtttttatgggaatgaagttcttagatggcgtgagtaatccaccattgcctaacagtatctgctgtagtgctgcttctctttgctgagttttctcttttctttgaaagaattcatacatctctgatttcacttttataatggattttgcctaccagaaaattattttctgaactcctgaatgggtgagtggcttgacactttaatctgcacagaccttaagcagaagaagtctttttttgtttgtttgttttgttttgttttgttttgttttgttttgttttgtttttgacacagggtttctctgtgtagccctggctgtcctggaactcactctctagaccaggctggccttgaactcagaaatccacctgcctctgcctcccgagtgctggggttaaagtcatgtgccaccactgctcggcaagcagaagaagtcttaaagaactttttaatgtcaggctgggttttctagaactcttatgggaaattagatttggagatattaatgcaaagaacttccatggctttttttttttttttttaacggaagcatctgagaatctcctgtgggtggcgtacactttgaccactctgtcacttaaacatttcaagggtattttctaaggaagatgatgttcccctactataatccaattcaggaacgtgactaatatgttgtcatccactgagcagcttcctttgcttctccagtcacctgcactgacactctgcagggcacccagcctctcttgttgcgttgtggggcaatacttctggatttcccttctggaagagactcaccctttgtttttggtggtctaggcatcttaatgatgaccgaacaactcacttgctctggatggcttgcttgaggttgtctggtcagtcttcaagattaaattcaggttttgtacttgtgtcaaacctgcacagctccaggctgcagtgtgtcagcaggtgcatgctgccatttttgtcttgtcaccagtcatagtaacttagatgtcctggttaaggagggggcttgctagtttccagtacagagctaatttttctctttattcattgtagattgaaattttgtaaatactccttttctcagcatactctcgaccagtagttaattaagactacccgcaaattcccctcagatttggtaaaggggaaaggagaaaccattttgaagtaataaatcaagagacccacgttattgtagcaatgaggcttgctttctgtcttactttttctgtactttagttcatagtgctgttccacagtttgtgagaatcaggttttaagaaataaaatagaagggcatgcagtgggaattgctgattgaagatctttgcaagcactggtagtagaatcttgtgccgtccaggttatgaaattccctagtctcacacactgtggagggaagtgactgaagtggaccaaaccagttctactgaggctgttttatggcagtgaggttggaggatcagggggtcttcttgtcattggctgcatccttggaccctgagatgtactcgctggtttcataggcagcctgtgacatacacgcacatctcctaaccatcccaggagtgcgcccagctcaaacaggttcagattcttgcagaggcatgatctgagacgatgaagacaggttgaaaactgtgagctcggaagctgcttgggaaactctggaagctgggaatgaaaaacgagagtccaggcgtggtggcactcacctctaatcccaggtggatgcctgggagttcaaggtctgccctgatcttcaccgagttccaggtcaaccagggctacatagtaatgccctgtcttaaagaaggcagctgtagagaaacgtcagagttgcggcagggctccctgatatgtggtgtctttccttgttcaaaagagtggtgtttttattctgtgtcttccaaggcttacctcttctcttctctcctctttctttttctctttttcttaaaaaagaaaaacaaaataggttcattgtttctactgtaataattctgatttcttctctgccctctagcaccagcagacatttttgaatcagctgagagaaattactgggattaatgacgcccagatactccaacaagccctgaaggtatggccttagcttacagcttacatctgcggcgtacttttctctctcttgtgtactgtattagttaaaccatatatttgtagagacgggaaagcagtctcttataaagcgagagcctcattttgtgtgttgcaattgtaaacaagtaattcctgctaccttggagtggtgtgtagcccctctatagcagatactttttctgcagaatggtagggcataatttcagtgctcatgaataatgtttttcaaccatgatttagtatatgactgcggttcagtgtatgggttaaaatacaatgtgaagaaggaacacaaattagagaagcaatagggcccacagcttacctctttttctttctgagactgagaaatatatattgctttcacctatcatgttgctcatgataacttcatttagttaagcatgctgtaaggatattccacctcaaatttcagtagcgtgtgcatcaaagccaacgtgccatttggttgtatcctagatacactctcatttccttatggagctgctcagatgagtcaaatcccgtggctagctcacagggagaaggatgaagccaatgaagtgtatgcttgaaatagaactgtagtttgagctcatttgtatggaacatttttatcaccttagtcacaggcatagatgggagcctttgtaactcatcgatgagagaaaaagtcaaaacggtccctgattctgagctagagagctttaatttccagagatagtttacgattttaaagtttttgatggttatgagcaaatatcaccaatgatagcaacaacctgcgtttcagttcctcatgtgggtttgttcatttagtcttatatttccaagagataaatacttccatttccccactttgaaaatgacgaaacctaaaccgttaagtaacccactccaaatcacacagcggcgtgtggagaggctggaaacaggagctacagcagccatcggccggtgcctgactaaggctgtgtctgctgctctggtgggagctgctgctttgtcctgtttgccagaaggatgctggcaggagtttatacagagctgtgcatcttgtcattggaggaagcagcactgtgcagtccctcagttcttaggagcacgtctttctttcattctgataaatacctgaccaacccactcctttcccaggagatcaccgaggatggagggtggagggtgagggtgagggtgtagcccatcacttggctatgtgcatttggaggagaccccctccctgttttacatttgagaaatatagatcaattaagtcttgtccacattccttaagtgtaagcggtttttcttcttcacaaacttacatttcaagttaggtgatagagtaaataggacatttaaaccccaactgatagcctttctgatttctcaagggatttagtaatgaattgattctcttaccaagaagtcccttgtgttgggaaccacagctactgacttcatcactgtaagctgaacatgctactagctacttcccttaaccctgcccaaatacctgacaagtggaacttgggatggctggagaagtggctcaaggcgatgagcattggctgctcttgcataggactgcattttggttcctaacacattattggctttctccatctctactgggtcagatctcctcttctggcctctgcaggcactgcactcctgtacacataaacacacatacacagacacacacagacacacacacacacacacacacacatagcttttaaaaagccaagagaggagggtggattcgtttcggctcagtttcggctcagtttacgagtgctgtctcgtggtggggattcacagtggcaggagcgtgagggtgcctgctcacacctcagcagacctgaaagcagagctgggagaccctccccgtccacacttccctgagtttacacagcctgactcctgagaaagtcactcagcctccccaatgttgccatcagctgggtactggtcttccaactcaggagcctgtgaattacattttagatccaaaccataacaagaatctatacttagttatacaggctgaatagccaccaggttgtaaaatccctgctgtgtttgggttgaagcacttagcaggtttcttgacacacagtaaatacttcctcagtcttcactgcagttcctttggtgagcagtgtacttgcctgacagtggcctctcttaaaggtgcctcttggaagagtcacttagtctcataatgtacataaaggcgtcacacagtgaagctgtgttgttgccttcccaccaccctctcctcagctccctgctagaatgagtctgcggcaggaattgcttcttcattcttttgcctgttggttattttgcaattatcttcatcccagaattctctcttctccttaataggttagcagggatttctcagactttgcttccatagttttctttttaatgcatagccaacacaagctttttaccatgaacatcatacgatgtccaaagtgttctactgcctttaaaagcaaaacaaaacaaacaaccctgtgaggtttttacattctagcttctgatacagagatgacttgatttatctctgagttcattgtgctgcctcagttagctgccttgggatagtattacattttacctatcattagtcctttagagattctgaagacaaaactgagcaaccctcctctccttgctttttcgaattctaaatgaacatttgcatattttgattagctgtgcttttgatgagcagtgacatgtgtgtgaatgtttgtgtgtgtgtgtgtgtgtgtgtgtgtgtgcgcgcgtgtgtgtgtgtgtgtgtgcatagttgtcatcttgatggcagtaaccatttctgcctagcaattctccctgcctctccatcctatcaagttctaaacctctgctgtcctatgaatccttggcattttgctccagtttgttcctagctgtgtgtccagtatccgtgtgagagaagctgtattttaacaagtcacttttcactcttatggaaccccccccccccggggggggggtgcaatctagattactcatttgtttcactttggaagctcatgatttgacttttctaaatggataggaaagtaatagaaaactaagaaaatagacaattgattttagggctgtattagatgtcttaataacgaatatcataaattatggataataaaatattactattaagttagagttgtattaaaataatttcaaatcaaaatgatttttgccacaaaacattatggataaaattatgtacattttgtgtgattatatatcattattcgaaattcattgcgtgttcctttattgatatttgaaggatagtaacggaaacttggaattagcagtagccttcctcactgcaaagaatgccaagacccccccacaggaggagacaggctattaccagacagcgcttccaggcaacgacaggtacatcagcgtgggaagccaggcagatgcaagtaagtttttcttctcaatgttttattgatacgaattaaacttttttggttgtcaatgtattagttttattcactaagtgaggtgaagcataactacaaaaataaatgaatataaatttttattagtgtttttttctaggttaaagacaaataattttatttatgttatctattatgttttgaatatctcatatagtctacatgcctttgaaatatgaaagaactgtgtgaatcatattcatttaaagtatagaattttaggagggcagtcatttacatttttcagctttcagtagaagctgagtattgcgttgagactatgtttatattatatgagaatatgtttagtgtattataaaactttcctccctcactccacattaaaataaagatttgcagagaagctcatcatgttgtaatcaagatccttcattatccagaatgaaaggcacagtaaagcttgagcgagttgttgggagaccccatccactctgaagtgcaccttcagtgacttcagtgacgcatgaaagagtcaccctttcactttcacacttaagtcaaggtgcatgagagactttgcccaaggctctagcctatcccgatcatgtgcatattgtcatgtagcactcacagtttccagtgtatactcatattcccaaagccttgctattgttcaataactgtggtactggtggtatggttaaagtatgtgcttgactgtggttttattattaggctccccaaagcacaaagctggtgtatataaaatgtaggcatttattctcatgcgttctaggtttgagacacgagatcactagcatgtgtgaggagcacttctggtttcattctggggcagtaataattaggaacgcagcaggagagcccatctctcacttcctttccatgcagctaacaggcaataggagccgtactgcttgcatgagtgaggtgctctggcttatgtcaagttccggacagactttgccccacttcatctctggtctctgcttctccccttcctttacactctgacaatgactcaacctgagttgaagtcacagcacccacaccggagccactttgtctctcagggtaagctcttgctgtttccacagttaggaagcgtcttcaacctttctctctctataggttattttcatcttagagttcagcagctacctggtcgagaacgttttctcagtcctcttgcttggaacaactgtgtttcctgcatccagggtgtgcttcatttggaaaccacttggacgaacagtggtgctactacattttgtgtagaaaaatctcaagactaagaaaaggaataaacttgagaaacctatcaatgttagaagagacggggaggaggagagaagatagggttctaagtatgggaaggctgtgtggttgagactaatatccagttctatggggccaaaaggagctaattacttagtttttaaaaaagaaaaaaaaatggaaggaagagaaaaacatctggttttgactgaaggcaatagttagagatgcaaactggcaggtagtccagtttcgtgctgtaattggggaggtaaggttttttagaaggacacttgtgtactcttgctgttaatgttatgtttatgaaacaaagctcaatggacaaaggggcaaaagtggaatcctgagactgccataaataatggaaggcttatttgctgtgcaagaggagaaagtactacataagctgagcagtaacacctgttcaagacatttgtcaagggccagtgcaaacgctgtgggacaccaatggtgacctgcataggttcccttagagagaacacagcccacattcacaaggctgatgtctcctgataaagcacctactccaagccccactgtatatgtataaccctagaaaaatattgtgtgacttggagtaaaaggtaggtgattgaagtttctggttatcattttgaatgccttgtttgaactgtggtttcattataaaacgcaccgtgttaagttggaagctcaccgggtagtgtggccattgccnnnnnnnnnnnnnnnnnnnnnnnnnnnnnnnnnnnnnnnnnnnnnnnnnnnnnnnnnnnnnnnnnnnnnnnnnnnnnnnnnnnnnnnnnnnnnnnnnnnnnnnnnnnnnnnnnnnnnnnnnnnnnnnnnnnnnnnnnnnnnnnnnnnnnnnnnnnnnnnnnnnnnnnnnnnnnnnnnngtgcttgcacaatgaccctagtagtaatattcgtttgtactctgttttgtaaacttattgaaagcatagctcttattgaaagcatagctcttaattcagtgaacttagtgagatttttgagctatgtaaagatatacttatgtttgactctgaatttattgctgagaagtgaagggtctttgtgtgtgtgtctgtgtctgtttgtctatttatggagtggaagcttatgcatgaaagaaaagatacacgactggaaattgttccaaatgagagcctgagtgcagacttctctgagtgaggaatttctcaggcattgatgtggaccgaactgcttcactcttgagcatgttctcaattttctttgcagtacattggcatctgaaactctcccatagtttgttttaaatatggaagttttattttcagtaaattattactttcttccttctccttagccaaagcttgagtgtaaatgaagtcatgttcccagcctactggcctcagtactggcaaacattttttttttactctgtattaaatactcctatgttcaacgcacatgttactgccttgatacaagtgcacatataaccacttgtgctctatccctcctttagagaagaagaaacagtgatgctttctagccaggccacttggtgctacgattgagttttcagttatgcatcttttgacaaacaaaggcaattagaagttatgttccttgatatgaagaacaattatatttgggtccatttctgttatactgaagaattaatttaccttttcaattcttttaaaagtggacccatctcatagttctagttttactttttatatttgagtgaaaaaaattataatttcaaggacacttgtactctgaacttcagagttactgaactgggtgcccattggtagcatttgctattgtaatttaaaactgtggtgtattccgggagaaggctcaagttatttgccatataattagcaaaaactctagacctattcataacttggataatcctgacctacgttagcatgcacaatgtcaaaggaatgcctccagctttcagcttacattgggaatgaaattccatgagatcatggcagtatcatctactgctgcagagtatactgcccaggtatgggggtccgagtttgaaatccctaaatccacatagaaagcttgtgtaattccagtgctgtggaaggcagagacaagaggatcactggtccttgttggcttccagcctagatcagtttaatgatagaccctgtcttagggactagcctgggatggaattggcgagtatacctgacatgtgcctctgaccctcccacatagccaactaaattagactaaactacagtgcacagtattggctattataattgtacgtaagagtcaaaagagtaactgtcatggttttgggtcttggcacatactgttttagccatgacttttacaaagggttttgcccagcttgaaacttaatattaacacttttataccacacctattaaattgttttaaactttttcaaaataggacaaaatcagtatatgtccaccagagcaagatgcaccacagttgagcaatcaaaatgtggatcaaaagataagagggatttgggtaggtaatcattccgtagaaagtaatatggctttatttacctttagagaaactgacacaatgctttgacacaggttctaattaagtactatactagactcttcaaacacttgaattgctataggtgtcctccctttatgtaagcggaactgtgtaccctggaacttagggaactgtcggttgcttggccaaggttgcttatagcttagatggtggtgggagcagagtttgtgttctcacctctaaggatacttaccttttcccattcctcacagttgtaaaaaagcaactttaggtaggaaaacaagaaatcaattcaatggaagttacaactcttgtctagaagtttccgttgcatgaaactatattggctattcaccgacagccaaagttagagataggttaggatggtctgaagatgtagctgatgagatccaccagggcgtggagagccagttaggtaatagatgtggactgtggaatggcctggataactttctaaattcattgcattcttttgcaagtgcagcttctgttttctaggcctgtgcagtgctcaagcactacagtgcattaccgtaatacttacagtagcactacagtgcattaccgtaatacttacagtagggaggaactggagagtgtatgtctgtttatataaaagtagtttgtaaatgtgttgctttttctgtcctctttgtagaagatgggaacatatactcatatcttattaccgtcactacacatagcccacttttaaaattcagtttcatatttgggtgttaaatttcatatgttttggtacatacatacagattttcaataattttaggggcctttgtaagccgttgaaagatacaatgtctgcttgtggagggtagtgcggaaggggaatgcgaggtctcagaagttgacaaagaacagaattgccgggccaggatggcgacatgggtgtggctgtggttgggaccaggagctgctattttaggctctgtccttagagaaggcttcttgggtgaggtgacatttgaacagagacctgagggaggcgaggaagggagtcacagggctgtgtgaggaaagtgagtgccagcccagcctgtnnnnnnnnnnnnnnnnnnnntgccagcccagcctgtgacaagaatggggtttggctctcggcatgaccagtgacagcaggtgctgaagctggacttgggagattccccgaggtctcatctgtgccttcccgtcttagggggctccggtccttggggttccccgaaaacaagcggtgcaatgtacagttctggttttgcattccaacttgttgcttcaactctcctcggattcattatctccttctttcctctcagtcctggggatgaaaccccaggccttagtacatgtgaggcagccttctaacagcctttggatcacccaggtctcctcaagttcctgttcagggttttcctactcaactgtcccccttgagcctaggagtctttattggtgacaaatataaaattcatttatcacacaaaatacaacattcccctggacttaacttcatgtagataaagacataatgaaaacattcatttctcctttgcagattaaaatctttgcattgtcattcaactagactttgggttaaatgatgtacttgtaaacaaacttaattttttgttttgttttgttttttcgagacagggtttctctgtatagctcaggttgtcctggaactcactttgtagaccaggctggcctggaactcagaaatccgcctgcctctgcctccagagtgctgggattaaaggcatatgccaccacgcccggctacaaacttaaattttagaatgtattttcatgatgaagtgaattacaaaccattcaaggactgaaagtgtgtgtaaaaccccataggatacatgtatttgggatgcagagaaacatatatgtatatataatatgtatatcaatttcatggtagtttcttagagagtaaacatttataaatgagaggatcatgtgctgtacttctgacttatgaaattattttaatttagacaatcttacaaatgggtatacctgctcagaagatgatgtaatctactcaagtggtatccagccagcctgtctactaagtagccttgtcctcacagtggtagtacagggagagtaggtagctgaagagtttgcaatgtttttctgaaatcttagcatggcacacatataagggtataatgtactggtatttggatggatttttttccccaaggctatcaattttaaacttacttctgccaattaccaattgtttatagccaaattaattctgagctcttttttataaccatatggaaaatgctagttttcattctacaactgatagctctagcatttaatatactcgctgtgctattaattcctgaaaaggaagttcagtgaggcccgagactggatttctcagctgttcatcagtatatgccagaattcaaaagaagtaggcttcgatgccagtgaaggagtaggtgtgctagcaagggcaagagcaagagcaagcaggcagaggagtaggcttccttcttccatgtctgttataataggctgccggcagaaggtgtggcccagattaaagatgagtcattccatctcaaagtggatcttctcgattcaaatgatttaattaagaaaaataaaaatcctcacaggtgtcccagcctctttggtttgttttagttaattccagatgtagtaatattgataaccaaaaatagccatcacaaaagaaaaaaaaactatgcatgaattatagaaaaagttgtattttacttactaatttcttattaaataaaatgatacttaaaatctagataattcggtatgtacttaggtcataaaaaaattcattatgaccacagtgttggaaaaccatgggagaagacaagcggctttatggagagtcatgggaacaccatgaagaatattgtcattacagtggctttacaaatgagaacttttcctttgctggaagaaaatgtttcagcaaaggcctggtggtatctgatctcagctaaccctttccatcattaaaatgttctcttgcctaataccaggcgaggcaggctccagttcccgtctgggttacagttgttcctatttgtccaacccctggaggagtagagatgtggtgatagagaagggtagcaagaagcactgagcctggtcctgggagctcaggcaggttttgcctttgataccaatggaaggaacaagtgtcttttgtttgtgatgctgtcagggcaaggcagacagtatgcatgtgtgtagacaagaatgagaaagcaggacacactgggttgggccacagtgtggaggacatgagcgtcgatccagagctgctgcacacagggcacagaggtgactggcacagagggcttgtagcaacatttgctgacgttcaccaggtgactgcacttgatcttgtctcaactcagttgtaaaagccagattacaaaagctcccaccctatccagccaaaaatattggaggacatgtttgtatttaataacgcggcacacgtttgatctcaggactcctagaaactcacaaatttatggtgcacttccaagtgcttttgttgaaatagactattttctgagttaaaacttaaaattcagagaagcttaggaaattaatttttacccaaatagcaacctattatgtttctataaacattttgtataaagtatatttctgaaacaaattagtgggagggtacatgctttcctctgttgaaagtgtctctatgtatggtgttggagaagagctgggatctcaggccgggttggagggactgcattctgcattctttatgtgaggaaagcctggttttatgcagatgttcatttggaaaagggaagaggttttaactgattattcaaatagtaacggatattttgtttactatcccaaaactcggtggttcttaatttttgaagggtgagttgtggtgtgaatgattaattgctttccctctggtgctgttctatattacagtctacccctaccgtcctacttgaatggatctcttacccatacatgattctggaagactgaatggataattgcacgtctgtctgtattatgagagactactatgttaaaataccaaattgttagcaggttatgaactggccttagcagaaaagcctttagactctgagacactatcagaattatactaattgaaacatatttttgtttcaaaattctgagcttggatgaaagtttcttctcagttattgacaacagttaaagttactgtgtgtcacgggggaaattgaagtttggcattcataccttgtagtatgtcatttgttctttcagctaaaaatggtatgaagaatactaagtttgcaactccagccttggacaggctcttagagcaggctttcacatacatgctctgaatttttagtcattaacaatttaagaaccttgtaaattaagactcaatgtttagtaaaactacctttttttttggatcaaagttataactcgtaagagaagctgatttttttttaaaagaatcaactgtgtttatttataacccaataaagggaatttcgcattggttctggtgccgtgatttgtgctaagatgcaatcctttgctcctagcattctgcgtcagcaatgcacatatcaagagcagcagagggattgcacatccatattattatgatcatagtctttaccctcatctcttcttgaaagtctgttaggatgaatagatcaggcctgaagaattgattgtggggaaagagggatggaagaaatgaaagacttagaattggagcctgtgtaccactcttatccttacacttatggcataggtctaacggtgctgtcctttccgatggcttacttttgtgttaattcaactccaattcatagatcatgaagagagcacgtgtaagttagtgcctttctaagtagtcttctagtcagctagccatgaaaccgccaatatgctctataattttagagaaggaatttaatccaagtgacctaaaaacatctcgcatgcaattgagggaggggtcttgtgctcggctttaggcagggactgcagatcattgtaggactgaccctcgcagtgcttctaagtcctttgccacaccaggagaacaacctggagggtggctctgatcgagtgcatacttcttagtacatagctttggcttagtgaatagaaagctcgatgcttaacctccgagtggcttcaactggatattggaatgctaagaaaatactggtttcactctgtgagtgagctttatacagtaagacattggctactggagtgctactatagagcaacatctacacatccattaaagattggaaaaagcagcagcactaagatcatggtcactctgttgcttctacctccatagtctcctgttagtaatggtattgatgtgacctgaattctattcataatcttctttacaagtgaatatggaagacaggtttgtttgttttctgagggaaacacaatagaagtatgggggaatggaatccatgcactaattgatcctgttcctagagcttggctttctactttcctatttcaaatttatttcctccccatcactctccgggttctagccattttaattactgcgatggctcttgttttgtgatgcatttcataccacctacaaccttccccccaaccccatccctttgtctccattattgagtctggactgggaagcttgaccttcttatagctctggcctcttatagctccatcttctttatagcaccattctccacatagctcctctttacagccacagcctccttagctgtgtcctgaggaccatgtgctcagtcacatgaaaccatgtacttgatggcatgtgagaggtcccatcattccaggtactgtaccccgggactctgtactgtatgcttcacctatcttcccagctgtgattaaatacggtgtagcagaacttactgtcttttatgaggtttcattgtatatgaggtcatttaaagaaccctttctacagcaactatgtctaatattttaaaagttcttgtgtgctcctcttggagaaaaagtggtaggtaacaataaaaagagatttttgtaattgttaaaatgcagtgataaaattaaggcagcttttcccatttttttctcttctttttcttttttcttttctttttcttgtgtaatattttaaacatacttaaggtttaaggaatatgaatatatattatgtccaaaacatgaaaacaattctgattacccattctttttctcattggacggatttattttactgcttaaattgtaataacagtatccatcatcagcgtcgtctctgtcgaggaaactgaccagtacacatcacagaactgcactgagcatattctactgaagttgataaaagctgcaggttttagtcattggatgtagaagtagaacttgtaatgttcaagttctcttaagaaatgggggagacagccagggccacacagaggaaccctgtctcaaaaaaccaaaaaagaaaaaaaaaaaggaaaaaaaaaaaaagaaatgggggaaatatgttcatttgcatatgtctgtgtaagtaaaattcttgttttcaatgaaaggaaggatttatgtcctaatgtaatcacacggtactgaagtgtaaagaatgaagtggcagtgccttacagctccctctcctacatttctcactagagataacgacttttgagagtatagcttattctcagactaaagaacacacacactcacacacacacacacacacacacacacacacacacacacacacacacacacacgcgtgcgcgcgcgcacacacacactcctatgctgttctcagtcagtgtaataaatacatgaatcagagagcaccagtgtaaagttttctagtgcttgctctgctctttattgataagccatactcccagcagtctttctgcttatttgcttttaataagagattgcatagttaatcaacaaataccaaggcttttctagatttttctagaagaaactatgaagttaccgagagtagttaatagtagctatgtttggattattagatatatgcatacttacaaaattagacaattaccttgcttctggcttttagcctgccaaggtttattacgcatgacgtctctgtgataggggttcatttttatttgtttgacttaattttgagaaagatcattttcttttcagatgtaattgatctcactggagatgacaaagatgatcttcagagagcgattgccttgagtttggcggagtcaaacagggcattcagggagacgggcataaccgatgaagagcaggccatcagtaggtaaggacagtttgtgccaagcctgagtgtgtgactacttctatattccagaaaaaaagataaactttaactttaagatcaataagatatactttattctgaataaatcattaacatgtgcctgtgttctttctatgctttatataataaaacattatttggttatgaaactttaatttattttgtaattgtgaaacacataattttgtcacaaatttatttttttataatttttttcgttttcttctgtagttggttgaatctactttccagttcacttttagaaatgtagtaaatgagatgaggtttttgcttttttgtttttgcttttttttatttttttatgagccaatggtaaatattttgaacatatggtatgtaattatgttgggtagtgatactctttaatgcctctgtatgcatgtaagccatggtcatatgtatctgtgtgcggaggctaaaggccnnnnnnnnnnnnnnnnnnnnnnnnnnnnnnnnnnnnnnnnnnnnnnnnnnnnnnnnnnnnnnnnnnnnnnnnnnnnnnnnnnnnnnnnnnnnnnnnnnnnnnnnnnnnnnnnnnnnnnnnnnnnnnnnnnnnnnnnnnnnnnnnnnnnnnnnnnnnnnnnnnnnnnnnnnnnnnnnnnnnnnnnnnnnnnnnnnnnnnnnnnnnnnnnnnnnnnnnnnnnnnnnnnnnnnnnnnnatacgttataaaataaaaagttatacttgccaaaaaatgcaatgaaaagtgcacataaacttttgtttatattagcatatgaatatgaaactatctagaattttatatcccagatttttgtcctgaaaatgtctgcatgtttattgggttcatatttacattgcctccatgcaaatgcatattactaaggtatgctttttctttccacttggaatccctgctgcttctttacatgtttatttcatgaaaattttgagacagggtctgattgtgtatccaatgttgccttgaacttctccgacctctccttatgagtgtgtatatctgagtgacagtctctgtctgtctgtctgtctgtctatcacctatctatgtattggggaactgagggtgaaaaccatgtcactgagcatgtcagtacttcctcttaccaacgaaacgacgctatccttgcagcctctgtcagtgttttctaactaatacaatataatcttattgaagttacaaactgtttggctttgggatagttctaagaaaggggtgaatagacaatttcatcagaatgtgattacaaaaacctagatgtcatgtcttaggttaacaacagctccagcccttgatgcaggcaagagacaaacctgagacttccagtctgccagattactgtggcattcattttacagtatgccgtgtagtgagttgggatactttaaaatgatgggcatatagtagtagcatattgaaagtataaatgcggtgtcgtagatgctgagtgctgagagcatagttgctccagctgtctataattgcagttgctgtagttttaaggactggagtacagtaagtttgtttatactgtgtcatcacacaaacatgcctagtgttaggctgtaacacagtggttacaaggccactaggcaaaggaaatttcatctgcattgtactctcttagaaccacagtggcatatgtagactaatcttcaccacgtgtgtgtgtgtgtgtgtgtctgtgtctgtgtctgtgtttaggtaattgtgattatattgctagtctgattgagacattatatttgaatcttcttaggaaataatctttacttcacttgatgtattggttattgccactgccatgttcttaatcacgtccaacggctacttgagcaatgtcattatcacatatcacttcattgaacatattagagctgtgtaacaaatccatcgcatgctgctgctttgaggggtctgtaatagcatagctctttttcaacaccatgttttcatttcttaagagttcttgaagccagcatagcagaaaataaagcatgcttgaagagaacacctatagaagtttggagggattctcgaaacccctatgacagaaaaagacaagagaaagctccagtcggtctgaagaatgtcggcaacacctgctggtttagtgcagttattcaggtaagggtggagctctgactctcagtcagggggcctaaggagcgcctgaggggcggggtgggatgtttcttgttacatttcaagtagaaactcaggcagggttttcatagatgtggcataaagtagtttgattttagtatcccctagaccgtcttgtctttaaaattcccagtgtgtcttttgttgttgtcctttttttggtttgtgtttgtctttatttcctgttctttgttttagactggttcttgttctatagcgcagactagcctagaacataagacctgctacttcagctttggagtgccggggttataggtatgacatctggctaaagaaagatttcattgttttaaaaagatttttttttttaaatttaattttcaaacaagatctttctatttagcccaggctggcctcagtactgaggttacagggtgcatagcacaatacctgccatgaagtttccaatatgtacaacataagttatttccttccagttatataagattaatttctactggcttcttgctgttaggaattggtgcagttttattgattcccgaagaggtagaaagaagataatcttgttggtatatctattctgaaagtatagagaataattataaccaaggtaggaaattagagttaactttttgtgactcagatcagacttatttatatataagggaaatagtcatatttttacatgactacatatttacataattacaaattgattctttaaagagacattttgtttgaagctggtgttgatgtacaaatatatcactggacatatgcgagaattctaaaaagaataaacattgataaatcaagattaacacattttatttttaccttagaaaattcttgtggtatgttttattagctttctctaaaataggagatgtttgtaaatacacatacccattatcttctcaacaaggaataattttttgtaatatatttagtgtgatctctgatttccaactttttatgtagtaatgatgattgccataattctttcattctctgttggtataaatagtttaatttcaaatttaagtgactattctctagatattttgttaaatttcataagtttcataggagagttagaatggtttgatttactattcctaattagaatcattgggcctatgtgccctttggttttgatgctcaaaaagactattttgcagcttcctgagtctgttttgtttttatgattgcttcagcttgcacacggtgagtgtcagaagtatttcacatcgttcattttctgctagtttgtctgtcattgctaggcgactcatctgtgattttaatgtttgtttgtttgtttgtttgtttgtttgttttttcatttctacaaagtgtagtataggtttcatgccccaccccctttgcttgtggcacacgtgcaatttaggtagattccttttggttttctggacttaacgcctcattctcattgtgctggaatagacactgataaagaaaacggctcatcacttgcttttctaatgcattagcagtctaagaaatatctggatatctatgcatgtgtagcaattctttgaccgtaggctgcactctgaatttttcattcatgtgtgtccaaagcaatagttaacatttacttgatcctctggagtcctgtagacattacaagctgtttaggataagctagtctttagagatggcttctcttctcctgtctagcagtggcatagtttagaagaacagatgtaaagctgtggtctgagtgttcctgaaagtgctggcctgccggcatgccttctacacagcactgtgcgcactaatgctcgtgactccgtggtcaggccattttcactgagacggtcaaggagaggaagtcctccaagcagcattcgttagctagataaatgctgttcacttctgacaatattcatggaaatttccatttattcccatttgaagtaataaattaacagagacaaggaaactctatctttcctattctttttctatttcagtttaatgtgacaaagaaaccatccacctaccctaagttcactagatgaccaaggttatgtgtgtgtttaaaaagtgactcatttttccttcatagaaagtagtaattttattagttttaatattttatttaagtttagtagtgactatacccacgatagcaaatttagctacttaagaatatttgatttctctagcagaagcctaaactccccatacagataattttctaccttgagaaggttaggttgtcacaacctaataaaagtgacttttaggaaaaatataaatcttcacactggaaatctgtgtagggagttaattccacaagttcacataaagttgtatttttaactgtattttcaatgttcaccattattttgaggggctttttattttgatgtttaggaattttaatctttaatttttctttttctgatattgcttaattcttaggtgtgagctgagatgtaattccttacttataaatataactctcagttaaaattgcctccactgacattcaaagctctaattggaatttacaaagtccgtgggaattccttcaaactgataagtgctccgcagtttcagttcccaacatctcagggttggagctcactcagcttgcagttatgtgagaggatgaaggtggatgtgtccctgctgcagctcagcacacagcagccgctgcttcccgggtgataggccctttaacaggctaggagaaggaaccggccagcttcaagtctttccttaggaaatgtttataaaatggagagaacgcagtttcttttacacccactccaaaggaagttcaaagcacagcactggggttctcattgttctttggcagtgtcctcacaattccgcacgagtggttcatacctccaccttaagcttttccatagcgttcttcttctactgtttctcaagaccgccatcttggtgtccccttagacagagcgtgctatcattccaaatctctctactcttgaactgtcccagcaagttcctgtaccggtcttccactctgtttgcggaaggtcccgatgctcgatgctcgcccttttctccttggatgtcctgcacatctgaaagcttggctttcccgttttccccttgctgcttcattgccttactcttgctactacacccaaaacctttttatttgtttaaactctggcgttaaacttcttcctttctgcttcggttctgacctgaggctcttttcctttcctctctgatccatgcgcctcctgtcacccatttagtccacagttgcatggtgatccacctcatgtaagacgaggtgcccttccttctttgccctgtagcactcataaagccatgggtattctgtaagtatttattaaatgtatggaaaaacaacataggcacaatgctcctgggctcccatttttttcaatggtccactcagacgaatcattagagtttagtacttagagccatcctgggtggcatgcaagaccccttttcagaggaacaaaaataacaagaatagaaaatgaattattttatgtgctcataatatgtaattaaaacatcttggctggaagctgggggatggtggctcatgcccttaattctagcactgggaggcagaggcaggcagatctgttgaggtcaaggccactctcttggctataattagagttccaggacagctagggctatacagtaaaaaaaaaaaaaaaaaaaaaaaaaaaaaaatcaaaaccaaagcaaaacagaacagcaataaaccaaaaaaaccacacacaacaataacacaacttgcctgggcattggttgtacagggctttatctcagcactcaggaggcagaaacgcgtggatctctttgaattcaaatgcagcctgtctcagaccagcctgggctatgcagtacaaacttccacaaaacaaaaacaaacaaagaaccaaggaaagaggagtgaggttgcaagttgtgacagatccacagatcccgtctggtgtcccataggctctgctggaaagtgctttcggcccttcgtcccaggcttcccagggcttctatttgcccaactcctggtttttctttcattctgttgttgtttttgttgtgttttgttttatttttgtctttatgtttttacgcaagtggtgaaccaggtttaccaaaatttatctacttaaaataatttgtaatcattgatttgtgatgctacttttatgctctataaagtaatccaatttatatctcctaaaagttaatacattgttgctgatcgtgtcagtttatatgctgtatcaaatgtgactcagaaagaagtacacttacactgtattccctgaaactctcattcaaaattattttttaaatgagaatattattttagaatatataaagaagacttttctcatgaaaaaagacatccttgtgctaattgcaacagatctttttataagtagtagaattgtcaagaatgagccttgagaacattgatattcacaattccattaatagaatttttctcttaggtatcttaaattgttctttttcagtcattattcaatcttttggagtttagaagattagttctgaattacaagcctccatcaaatgctcaagatttaccccgaaaccaaaaggtaaaattataaaagattttaaaagctaagtgttacggtcctcatgctcttttctaagtattttggaagatcttctttattaaatctgaaactgttcacattttcatgttatgccatttatctccattacattaacttcctatccccttttctgtatcatgaatgtgaagcgtctcctcctgtgtgtcacagtagcacagcagttccagatgctcaggttaggaccccttcgctttcaggctgtcaaatgagaagacattcagaggtgacctgctccaatctaggtctttccttaattgactcctcagtcctctcatcagcatcagcgtttcttttcacctcatcatccagaaccatcctttgaaccggggttgtgtgctctttgccagggcacaggtatccctcgtgaatgggaaggtagtgttgagcagctgaggctgactaagagagcagactccagggtctgattgcttgggctttagctatggccctaaagcaagtcaggctacttttctgggagctccttctctgtagcgttgacagtaacaacagaggcgctgagcacattaatcaagaaacatgtgaagcacttacaatttgtcagccatttgttaagaaagttttaattttataaatttaattttaataaaaattggactgatttgtatgcatacattcctacttaatgagtaaaaaccttgtgtagggggttgatttagtttggtgcaggtatcaggtaacctccagtgaggagccttaacgacaccggctctagagacaaaggagatgaagttttaggtttcagtgatgtaatgaactttgtgtgacccgttgttacagtgataaattatttagttacattttccttttagtgtttaatttttaaaaccatttatttctgcaaatacatggaatatttataatgcacaccagaggacagaaagcctgaggtgaggccagctgttaagctgtaatttctgggtcggcgcaggccaaagaacaactgctttttaaaggggaaccagaacggtttgtcaggtccattctactagagaactgaagcaaagctcttcaagtgttaatagctttgaagggaactcttggactgctgcctgtccgtatcacgttagtctcatccattctcccttctcgagtcccggtagaaggcgtgcataatttatatatcattagttagaattacttgcaactgtagatgtgtgtgtgtgtgtgatgtttaccttttatttctttcattttactgtgatgtggaacttcagtctcttatttttcagtttgaataaaaccaagcacactaggtaacttgatttaaaagctaggcattcttagtgtttctatagcagaggtcttttgggccactcagcacatgctatgggcatgcggcctgagcacacgctacacgagtgtgaaggagcccatctgagagaagtttatttcttgcagtggaaggagagttacagtttccattctttgaaacacgcttatgcagaaaaccagtgtcaaaattatggtgaattgtcagtcatagatttatgttaacttaatttgagataatgaaagatatttttttgctttaaaggtttccatataacattagccattttctttaaatagtgaatttgcattgaccacatgacaggttgatattacattgaacctaaagaccaatttgttaaaatacagaatatacctgggattggtttaatcttattacagagatatcattaatatgcactggtaaaatgatctttttaagaaaataaagcttcctacaaactttgtgtacattttaaataagagacaggattcattaagagtcagttcatattttagataaaggttagaatagatttgtatactgttactttagctgttgataagtttccggtatagaatacttggtatctgaaaattgatggatcgtcgtctcacatagagaaagtctttgagctgacaatatcccaaggccccaaagttttttttataatagaatgaaagtgtgtgtcttcacaagaattttcacattattttaagcagcagctaaacagcatcttgggtaaaattgtatttaaacttcagagcaacaccactggcttgtgctagctcacacacaatacaagcctgtttacaaaagtaaataaaaagagtgttgaactttttatgtgtgcttggtttttcataatttagtcaattatattgtgtgatgtgatgccttttgatagtcagatttttctagctgcagttatgggctgagacaaatgtttcataatattttactttccaaataatcttggcaggatgtcttttgattaataaaatgttgcttccatccatatactttataagggttgccttcatttgtcataggtggaatgataatggagaagtcaagaaacagggtattctgggaaattattgggtagattaaattttatagtatttatacttttaaaagttaacttatatagtgcagttgttgaaagagttaaaagtaatacaggaagctggattaagttttcatgtgcgcgtgttgccttttattactgctgatggaacgaacatactatatttaagtacgtgttatttgcagttctttataggtcagaaatggtatttcagcattagtgattagcactatgtgagaatgcttcagtggtgtgtatagtttggagattaagtaaatctttgaatttctacttgtttctcaggactcccctcgtagtgcattgagagaacaatggtttctatgtaggttttattactctgactgtcagttatataaaattatctatgttgatattgttaaagaaataccaattatgcaaactaaaaaccttcccatatttaatagtattttaagatttatcctaaacttactgttataaaaactattattatgagagctgaatttctgccctgaagcattaataaaatcatttcaagaatggtttccttttttttgttttgctttaaaataaatactgactaaaagctttttgtcccagaaggtttgatgtaaccaaccagttagagttgggaacctgctttgtgtggaaaaaaaaaaaaaaaagaaaaggaaagaaaagatatattgaaatcatcgagaagtgtgtaatcataatgagaataaaattaagatttcaagttcgggtttgatctggctaatgcttttgctaacattatacgtgctaaacatttaaattgaaaaaaaatgcagtaattaaaatacatttactctaaatcttataatttccaaaataaatctataaaataattttattaataaatctaaaatagtatatataaataggtattcgtatttattaggacattacataaggactagacagagccttaacactagttcagtgatcagggtcattgtatgactagtggaggttggtcgtcctttttagagcactagttccatgcaatgtgtttggaggctctgctgcctggcgagtctggagcgctccagcatgagcagggtcctttgtttcagtgggattcctggagcccagagctcagggctcagatggtgcctggtgtgctgagctctctctgaacactgacacactcttcttgtccccttgtcagaagcagctgcaccctgatgaatggaagagtctaaagagcagacctaaatgaggtggatattcttggctgcgtagtgacataattcgctatgaatatgtgacatttatgcagaaattgtgaggctagcttgaggtcctctgtcatagctctttgaggtttgtcgctgatagtttttttttaatgagacagagggcctaataggtgccctttaacttcccgcctcctgttgaagtattggttgatgagtggagagtttgctgtttttattgggttgcttttcatttcttcttttttcttccttctgcaggaacatcggaatttgccttttatgcgggaactgaggtatctgtttgcacttcttgttggtaccaagaggaagtatgttgatccgtccagagcagttgagattctgaaggatgccttcaaatccaatgactcacagcaggtagcttcctggctcttcctgttttcacgtaaccttataaatcttcgtcctcttttccaagggtgtcggctgagttaggatggcattactaaactttaacttgaagccattgaatcattgttttattattgggggaaaaatctaaattaagcaaagagtgaacaaattggaggtaataagataagtgtatgggagccgggcagtggtggtgcacgcctttaatcctagcacctgggaggcagaggcaggcagatttctgagttcgaggccagcctggttcagagtgaagttccagaacagccaggactacacagagaaaccttgtctcgaaaaaataaataaataaataaataaataaataaataagtgcatgggtaatttgtagaatgatgggagttgatgaggaaaactaatgaacaaaattaagaatattcatataattaaaaattagttaaaattttatgtgacaggagtttgtgttgcatgtgttctgtgtgtctggaggctagaggtgcactgggtctcctggatccttacagatggttcagagccactgtgtaagtgttgggaatcgaatctgggtcctctgcaagagtagagagtactcaacttctgagtcatctctccagttccataagtagcaagttaaacaaacttgtaataatctagatgtaataatctacaattatatatgattttcttgaccctgatttagctaatagagagtagttttctttaattacctataaaagatttttctttgaaaatactgctttatttttcttgtttttaatggtaatatcatagtccctttttattaacatttggtataaacaatgtttgagatttttttcttctaaaatacaatcagtataaactagcattgctaattgaagagtctcagagaccaagaacacaagtaggagcacacatcgttgtagaaaagaataaatattgaaaaagatgatagcactcaagtgctccaatgagtaccgcgttctgcctggaagtagtgaggctcctctgtgcctgggggtagtgaggtcccgccctgcctgggggtagtgaggctccgccctgcctgagggtagtgaggccccgccctgcctgggggtagtgaggctccgccctgcctgggggtagtgaggctttgccctgcctgggggggagggggggggagagtagtgagctttgttacttgggttcatgaaatggaagtttagagcaggattcatgaaaaataatgtgtttattaccgttttcttttttgtttttaaatttttaccttgtatataaaatatatgcggacacagaacattttcaattgtgctgtttcctcttaaaaattttctccaaacagccaagtgctctaagtattttccaaaccctttggtaggaacaaacttatttcttcttactacagcaatactaacacaagctaaaataattagaatagtattccccgattcccaaactgccagttttagaacagtacttctgcttccagatgtcttgtcttcatttacccatttctaacttatttctctagccttctctttgggaatggatggcagtcctttctagttgctgctctgtgtacaaattaattttgcccaagctcactaccgttctttgccaggttttcttctatatgctttcgaaatttactttttttctgctttctacagaagcctcccatctttttgtcggttaccacttaaaggtggaacagaggtggagctctttctggataggcaaagtcctcaagaagatggcttgggctttgctgctctgtgcttgtaaatgctatagtgtgtgtgaatgcctttcctttgggtgtatagaatagttgtatggttgttgctttttttttttccctagaggtctttaaaagtagatgcttaccagttactttggtataggtgtgattttctgacattcacattagtgagtggataaaatatgtacttatattattaatattatgattagtttttaattaccttggacttgttttacattctcccagaatatgacatgtctggaatggtgacccagtcttaagggcgtgtctttgatgagtgggtttctgtgaattgtacccattgtcccttctctgcagctgacaatgctttatgacagcgaagacctcacttgtttatcagaaggaactttgctaaacctttgtaactgttactgtaattgtaaattttagattgattacataaaagtacagggaataattctttgcaagactcacaataaatagaaaatggtggttctttttagctacaatcttcaagattaaaattgtttaaaaaggtgaacatttacaaatcaatttaaatctctaggctcaggaacaatgggaaatgatttgcagacccagaggtcatgggcttggagttaaaatgcttaccagagccgtgctctcagacacagtgtcctccctgcctctggtcctgttctggtattcttggcccaaaaaggctagttttgatctctgtctatactcaagtgtgtccttgtttctcttgttctgtgccccacatagatggccatccttggattgggggtcacttaaatctgagcttaagtcaccatgaggtgaattttgcaaagccccataatcagttaaagtcactttttgaggttctaagtgagtaaaatgttcttttgctgccatttttctcaaggagatacaactagatttttgtcctgacattagtcttgtttgactatataacactagagtgttaagagcaacacttcctagaccttaagagcaacacttcctagaccttaagagcaacacttagtaggtgaaagaaagtgttcatttcattgattcatgtcagagtatataactaattatttttataaactcatttgttacatttgagtgtgtgtatttcctaaaacagaaccttgtggttataatactgtgtcctggttaaattatggaaatgcattgcattttatgagacagccacatgactttcctgaggcgtgactacctggaagtgttcatttacagcctctaggatctttgctagtaggatcaagtaccaatcaacctttttttctttccacagcaagatgtgagtgagtttacacacaagttattggactggttggaagatgccttccaaatgaaagctgaagaggaaacgtaagtcactgatgtttacggatggtgaagtgagtaagcgacagtcgttttcttctcttggtacggtacaaatgtgcaaccgagagagacttttgggagtcccagtattatctgtattattaaaaggctgtttagaagccgcggtaacaagtttcaggtggctgtcagtttctactgtcaggcttgatgtaagatttaaaactcaactcccgaaagtactaatcttgcagccttgtgtttttcctgcattcgggatttcttgagggagaaggggttagttgggcataaatttaaaaatattttacttcatattaagtcctttctgtgaccccgaggacaggatgaacaattccacctccagaatcctgttgttcattcgtcatgtaagcacaaagccttggctgttttgtgtgtgtggggactaggaccggtcagtgggatgttggtgctcaggtttgtgtgtgtatggggactaggaccggtcagtgggatgttggtgctcaggcgccattcacttactttcagaaaggaagatttctcatcagcttggagtttgctgagcctcctgcggccacactcctgatcttttatgtgtttttctatgatttttttcttttaagattttttatgcttatttaatgtgtatgagtgctttgtctgcatgtatgtatgtgtagcacatatgtctgcctgcctgtagaggccagaggaaggtatcagattccctggaattagagtctgaggtggtttgtagtagccgggtgcattctaggaactaaatctaggctctctgcaagggcagcaggcactgctatctctccagctccatctttgtgtattcgcttacacaaccacttagactgctactcaaaggctctctcatgagatctgcagcatgctttaaacaatacgtagaacgcaggtggaaatgctaggctcaaaatattaccttccttccattcttccgaaaataactgccttctattaatttgttttgtttaaactttttcagcctcatgttaccatggtttgcagtgaacttaaattgtttgaaatatctcattgatcttttaaggaaaaactcaaaggagttatacccggaaatttaagactgaataatttaaataatccatttagattacgttgccttgtgtatacaaatcaattaataatactaaaagcaaggtcccagccctttagtgtccgtgggctccatggtaacctcacctgcagcggtggacggccacttagacacctgtgatgctctagcggtgctgatgctgcgcggaggatgctttgttttcgatttcagaagttgacgagggcacatccacagtgagcaccagcacagagccttcgacatttactcaatttaatgtaattctaccttaagttgttttcagagtaatggcagaaatgtagggtgaagcataagctaaaaaaacccctaatggttttggttctgcagaatggcagcaagtaacagtgcgttgcttgcagaccactgtctgttaatggaaagcaagctcagagaaacttatccagagtttaattaaacttcagggccaagtttaatcagaagcttcctactgctgtaggtagtgattaactgggcagtgtgttaggacttagagataatgaagttctcagcactaagtgggagagctataccactcttcaaggttcatttcacagcatagaaggaagaggtccagagaatgagagatgctcagcacaaaaggcactttcttacacagcagagcctttgcacccaagaactcaaggtagctgtttatctgtacaaggttgggcccatcaacatttcattgtggatttgctgtgggaattgagggactttgggcacttaacatttgttagggacagggcatcattttcttcactgtagcatctgctaatttgctttcttcaataaataacctcttagtcatgctctggcaggaaactgtagttatccacaggggctcacacacagaaacatgccttgaatgttggaagtgacctaagtgagaagtgaaaaagtaaaattcattatataagtacataaaattataaaaaattgaaattaaaaaggaaatagtcaatatttgtatttctaataaaaacatacaaccaattaaaataaagaagtaaaattaacttaccaccaaatatgtagtatttgatggaaaaaattaaacattttgcaaactgtttcaggtataggcatttgaaagctgctttctttttggtgtgtgtagaagtgtaagacactgactaccctgtcgtcaggtgtccctttctgcccatccagactcttagtgtgcatttttcttctgaggtcatttgacgctgagatcatcagaacacagctgaacagattgtaagaacccctttctgactgagactgtctctcggaatgtgttctgctacgtaactgctaagacctgtagacagactcgtttctgttttagcttcatcttagctatgcatccaaatcttcctatgaaagttcagcactgaatctgctcttgatgtttctgagacctaagacctagcatccagtggagataatgcctttgcagtacgattctggacttactttggggtgtcccaagtcttgaatatatttcttaatgctgtatctttttttttctaagtgacttatgtgtatgaatgttttaaatgaatgtatgcatataccgtgtaaaggcccaatgcctgtgtaggccaaaagacattgttgaaatcctgaggcttgagttgcaggttgttgttagattctatgaggatgctgggaagcaaacctatggcttctataggaacagaagaagcattcttaaacactgagccatcttcagcctcttgatgttgcatcttttgaagtgtcatatacctgtgtgtgtgtgtttgtgtgtgtctgtcccattccttctcttaggaccttatgatggttagttttaaagttcaacccaaaacaacttagattctgctaaggagagcaccttgactgaagaagtatctagagcagttgctgtgtgagcaggtgtggggatctcttattcatcaaggtgggaaaatctaccctgaatgtgggcagcaccatagcatggactgagccctagttgtgtaacagtgaagaaagctagctaatgtaaacgggcacatgagggcagtaggttttctgtggatatgatgggagcagctatatgaagctcctgccttggtcactattctgaaatgttgggctgttactcaggattataagccaaatcaagtttttctcccattctcataagctgctttttggtctgggtattttatcacatcaacagaaatgaacataacataaaacagaaggcttgagttaaattgtagtgttttagatatcgtcttcctgtttgtttactctttgccttttacatttgctgtcgttcaaatgtcttcctctggtgacaccttgattggttccttgaagggaagattagtgaaagctgagttggcttctctgtattgtccctcattcttgtttcattctttgtccagtcatgtcctggaatagatgggctggtccatcagatcatggtgttcccaagtgtgagatcattccatgcccatgttccctcagagtttgtttctgtcttaggaaatcttatgtttcttgccctgtaagctagccttccaatgccccaaagtagttgaatataaagttaactgagttgagcagtcactgaacctcattgtaaaccattgctcttggaggttctctgtactatgatgcctaccctgaacgtcccagttttcctctcaggtaaccatcatagaacatatctgaaagcacgctgcttgatcacctttcatctattataaccttctaccttccactgtccagtttgcttaaccattcttttgcctactaaatttttattacatttttttgatcctactcatggtttctaaactaatgtccaagtttgtcttttttctaaaacgttcagaaaacaggtttttttcccctcccagtttcttgtttacatcttaaattttattggaaatatatcctcatttccttttgagtagtttaaaattctttctggtgatgttaacctgatttgagatgctttgctgtgcccatcatgaagaacattctctgtttttgccaataaagccagcttttaagtacatagaggagtgatcctgtttctcctttgatgagaaactaacctattctcccacaattctacatacattatctttgaggcagaggccacaaacacttagcaagatactcaccagagcttcccaaccattgactcacctgctctagaacatggtgttcttctgtggtagcctctctgttatagcgtcattcattctccaatgatagtcttagtgttttctccagccaagtttcttttccctttgcctttggtagtaagttttatttcctcgaccttcctactttgtattccttcttggtttcctttcagttgtgtttctcctgtttctactgaagtgagcacagtctgaggtcctttatctgaggcttagagtaaagagcatctgggaggatgtgacgaagaccacagtagagaatttctgaaatcccataccagggaaagccgtggaatccttcagtgcagagcatggcagaattcacacacacagtttggaacaagtaataagcattcagaattagtatagccattcactcctagctacttctgcaaaattatgaagtcaaagtcatcagataggtcattactctttctaagaggtaatttgtgtgactggaaaggagagaggcctagaatattgattttctacatgaaaatggctatgcatgttagtaattatatccaaagagtcagagttttttattttaaaatattttcttctgtgtcaaatcagtctccagaaactttgattgccacacttcaaatatttattataaaggtgtctagagagtaagtcattgtggtatataaacacctctagtttatcagctgttagctggtggggctatataattgtgtgggtgacaactaccaaactaatgacttctattattccctttcatgcccccagtatgtaagtcagagtccttactctacttattcagggctgcagagcaacagaaacctctgctaggcataagttcaccatgtcaacctggcagtgaaaattaacactaactctcaagatttctgcccagcaaggtctcttgccacatttgcctccattgtattggtgaaagcaagttatataacatgccttgttgtggattgcatcagaccacttctcacccttgtggcagctgaaataaatgataccaagcaatgtggcgtcagggtctttgtacaatgttgatataagaaatcgtatagcaggccaagagcatactgtgatagttctctaaaagattaaaagaagagtctaaatctgcatcttaacttgtaggcatgtgtactaataagttgaaaacagagtctgaagaagtatttgtatacccatgctacaaaagttgtttacccattggccaaatctccactgattaagtgaacaaaatggtgtattatccagcttccagtaaaaggaatattctgatgcttcacgggtgggccttgaagtcacattaagtgaagttaaattaatcatggaacagacaaataccaggtcatttacatatgaggcatcaagttgtcaccctcagacacagaagcacatagaggatgggattgcagtgaggcctgagggagtgagccttacatgggtctaaggatcttgtgatgacatgtgtcacacgtggagcaagaacctgatggttgtttctctcattgaaagtagagcttcacaagccagtttgattaatttaaacacaaatttaaaatttcatatagttgtgagtacatctcaatattttatatagaccaggaaaatagcgtcttttaaagatgcttactataggtactaaaagataatgtaaagactgctggtcttcaaacaagtagggaactatctcatgcggggcagcttgggacaactgtctgaccgtagaaagggacacccacactgtggtcctctgcttcagagtcacggcattaggttcctcactggtgacagttgctgctgcagtttctatgacttctctatgtaaatgtggggaaagacttagctccttttccagaaacctctttggattaagcaatctcttctcttcccagtacggccagtgccatagaggcctgaacgtctgagatggaaatagacagcgataacaggatgagcagagctggtttctcttctgtgctggtcccctgcagtaactcattcagctctcatatctatcctgtgccctcaatgactgtaattatccttagctgacaggtgaagacactgaagaatacatttaggagctgtgcccagggtgacacagtaaatagcagagctgtgtgcatgatagccatgcaaatgacatcatcttgccatatattgttccatgtaatggttactttgatgcattcccaattatttagagatctgaaagtgataagcatcgttctatcttttacacctgctttagggatgaagagaagccaaagaaccctatggtagagctgttctatggaagattcctagccatgggagtgcttgaaggtaaagtcacccgtttgctttcattacaagtcaggatgtttcctcttgggtcttctgtatttgcctgtgtgtactgctgctctttatctttaactgggtctactctcctagtagctgctgcttcattaacatccctgcaaagcatccttggcacttgggcatttggaggatgtcactcctggtgacctgacttttgctcctctcaggccttttccgttcgcactccccttacctcctgctgtccattaagatcactcgtacagacccctaattctgcctttcgcccacctctctgactgttgtgaaactcttccctgcccctctcctgatactgagtacctgagtgttgctgagttcacaaaaggatagttgtaatgctttgtgtgtaagaactctgaaccatgaggagaaggaaggagctctatgtacctgcgctacaaaactgcaaaactatagtctgttctccagttctctctctctctctctctctctctctctctctctcagagggattttcatggaattattttgaagcctgcaatgtctacccaacactctgtattgaattccaacatcttaatttctttttagaagaatgtaattccctctgtatgtgagcagcagatttcattagctctatccatgcactccttcaccacattctttccatctttccctttaggacctaagaatgcggaagggccatcccttcctgctcttagagtctgggcctcatggtcttacgtagctttagttcattcccttccctttctgagcccttaacttctttctctcccttgtagtccacctcagtgtttctatgtgttctgctacttcatattacagaaagtaaaaagataagcactaattcattcctaataaaaagtgtgtatgccccttgtagtgaggacatggtttcacttgattgctctatatattttacacaccttggtttagtagctggctccatgattcagacaaaggtagatcttgagaagttattgatttttctacctatgagcaaactcattaaatccagtttagttcttatcgatctattaatgcattagggattgactctttctcctcttatttatcttgcctcttcctgaaaaagaaagttctctggcctcaatacattcattttagaaagtgtgtgtgtgtgtgtgtgtgtgtgtgtgtgtgtgtgtgtgtgtgtgtgtgtatacacagccatgcatgcttgtgcatgtttcttattgtatgtgaaggtgggtttctcagggcttcatctgatctccctttcttttctacagttccctaggcagtcatattccccactgggatattgcactactaggaagcaaggagttagggaagagtcatcctcaactcttgaaatggaaatctcctgatcactctgaatcagtgacttttactgctgcacaacagtgagggaaagtagtcctagactcatgtgttcagtccctagaaaccatgcattgtccatgggagccatatggaactctctaatcttcaatttcatgttacgctgtttgcatcctgcatataacccagctacgtagccctgtccatgctccattttatgtgtgtctgtgtgtgtgtatgtatgtatatatattatatagtgtgtttgtgtgtgtgtgtgtgtgtgtgtgtgtgtgtgtgtttctaccaaagccagcttccgggcttctgagtccataccttcatggatatgattgttctgtaagaaaatataagcaagactgaaagacattataaatcttgccctccccacctgactacatcacatctccaagatgtgcttagctttctttggttccttaaacatgccaagttttggagtcttaatattatgactttgctgttccttagccaagaagagtccacagcccaacaacctggcctagttaccttctactcactcttcaagttcaaatctccgtttaaatgtcaacttcctgtgggagtttttactgccctactgtctgttcctaacagtatgttagctcttttattctctcatccataaccattgtcgtactgaatcatcagttggcttatggcaaatggatgttgtgatgtcttcccgtgaggctcaactacacacctacccacacacccatgcacatacacacatttatgtgtgcatataaacacacatacagtgttagcacaatgtcttatctttagagcttatatacatatgagttataattactgtctgtggctaggtttgaaggaatccacatacattatatgttatgccagtggaaagctctactaacccattatcacacatgcataaaaatgcatgcatgttactctctctctctctctctccctctccctgtgtgtgtggaggtaggaaagttttactcacccattattctctggagcaccatcactggtactctttcaggtttgggaaagaatccatatatctcatatatatacatttactttttgtaattgaaaagctaagttgaagaacattaattaacttctcccaccatcttataggaaaaaaatttgagaacactgaaatgttcggtcagtatccacttcaggtgaacgggttcaaagacctgcatgagtgcctggaggccgccatgatcgaaggggagatcgaatccttacactccgataactcaggaaagtcaggccaggaggtgagtgctccgtgtctatcctcctcctccttcctgttctcttttccatggcctaatgcaagtataaggttctgatcacatagctgggaatgacggacagaatactcaaaaatgtatttgcatttaattatagtaatctaagacatatttgtgaaacttgtatagaatatctgatatataatttatgttagattttaatctcaaaatttttaatctcctctttactctttgtctctttgtctatcttcaggacatcgtttcatgttttatgatttcccattaaggtagtggtcattagcagcatggtagttaacttaaaatggaaataacctggttagtttttacctaagcacatgttcgctcgcaatcacatgttcctgggatttgtctgcttctgtagagcaagccaggctcctacaaagcacacatgtctgttcttaggagattgctatttgattgcataaggtacaatggaagatcctactttttttgtgaaagaactgactttaatacaccccaaacctgtttatctacattgctgatttaatttccaaagccaagagtttccttctctctttgatagcatccatgtatcaatccatgtgcatccagctgttggagaaggcgcacactactgtagagaccagcacagatcattgtcttccaaatcagtcactgtgaagcgattgctgactgacatctggacatacgctccatgtagcaggatatataaatcttcagtgttatttcctgttacatttttagtggataggacagggacaactgcaaattgaatgacatagtttatataagatttctcagactctagcaaaacaatttgcagtgattgatcagccgcttaagaagtacaaagtgatactgagctgttggtgcatgcttttaatccccatattacaaaggatgaggcagaaagatcactagttcaaggctagcttggggtccatgcagggttcaagacagcctggtctttgagaccttttgaccacttctccttcccatacccaacccccaaagaagcattacatgataatgttaatttatattaatgagaaattgacacttgtttctttgggaataaattaatatattgtgctgaaaaatattctatttatatgctactatacttaaaatactaatagttcagggctaggtacacaactaatgattccttaaagtgaatttaggaaatgtctttatatattattttattattattattattattattattaattatttaatcttgtccccatgagctgtagacagagataatgaaatcttttcacctaatagtagaacagaagtggctgttgctgatagagaaaatgcattcccaatgcaggcctgctacctaatgttctgtgagcatcctttcgtgagttacagaaactgtgcggaagactccttatcatagttcgggtcacctcacttttctcagccactgtaggttctcatcaattaaaatgtgtctcacattagttgtaaagatgatatttaacgtattgaggtaaaataaggaagtaactcttctaaaactctttttgcctgtttgattatcacaaaatggtgcagggactattatcctaaggaatcaatcagaggtttgtttatgagatatcagagacaatgttttaatttttatctaactttagatatggtaaagaagtatagggtaggggcgggagagatgtctgaaaagaaaggagcatgcgcccctcttccagttgtgagttcagtgccaggctcccacgtcaggagactccatctccagggactcaatccaggattttctgatggaccataggccccatgtcagacacagacatggacaaagacatgaacagggtcaaagacacagacacacgcacataattaaaaatgaaaataagtcttgaaaaagaactatgccacatgctatcatgtgacttttctcgtttgcatctttagatgcttattatattaggttttgttgactcttataaatcatgtttcttatagtttaactgggacaatcttactcatgttcaatttaacccctgcttagccagtaatccttagtgtttggggaggaataaagagccacacctcagcacttagctttagcagcttcactggaagacaggtgccatcgtcaagattccagcccatcccattttcctcagcctgcaatgtttattcctggttttggttcaggttacgtttgtgcgcagtcactgagggatgtgtggtaccagtttttggcactgaaagctatgatacctgtaacatgggattaatagtatcttgttgcaggacttataaatacttaaaaatatttatgattttacacctctgaacttgttggcttttgaatgtatatattcaacctttaaaacaaatagcatccttttgtaaaacttgaacttgttacataaaaacaagctttttgaaaatgttaaatttcgtggttcactaaacaactgtgtgtgtggcgtgagtgggtaggacacactcagagcaataagaaatttaactcattgattgctagtttatatttgaaagcttttacaagtataaactttgttgctgagaaatctttatcatacattaatataatatatagttgtaagattcaaggtaaaagtaggaagaaaaaagagagagaaagggaagataacattttccaattttaggatgagaacagtgcgcatttgttccagacaaagatttgtttccctttgagtcaagtcttcggtttgacaatctgtttggtttcagtaagtgtcactcagcctgcgacagaaggtgaaggagctctgaagtccttccctcctagggagaatttggaatgttacaactgtggacgattagcagtgtgtagataaggtttccctctgtcctctgatgtggacaaaggctatggggacgtcaggctgaagttcagctgtaaggaaaccatcatagtccctctgcttgctgtagtacagtaacgtcagcaccaggatcatttaccgaccttaaaattgtgatggtgaaatctaacaggctgaccaagtgtctgttattgtttctttcagcattggttcactgaattgccgccggtattaacatttgaactgtcaagatttgaatttaaccaggcattgggaagaccagaaaaaattcacaataaactagaatttccccaagttttatatctggacaggtacggtttgtacaagtagtaggtttgtgaaaattgttatttccttgaagctaaggtttattgatgcttgatatttccatcttattatctgttaagggagtatattcattttatcttataaatatatagtaataaatattaagtattaaaatatttttgtgttttatacctgatatcttaaaaaacttcagttgaccttttgtagtaatagttagatttattatcatactagtttccaagatatttggtaacactaatgatggccttttttttttccttaataggtatatgcacagaaatagagaaataacaagaattaaacgtgaagagatcaagagacttaaagattacctcacagtattacaacaaagattagagaggtaattcagccttcatgggcttaagacaggaaggcatgtgcctggtggctaactcgattattaattttcaacatgctttgggtaacttataatgtaacctattataagcatatactatattataatattataagcttataattcattccggattgaattttgattaattacattagactctagattgcatccctactaggctgtagatgattatcttagaaattgaaatgaaagacgtgattatcaccagcttgttttcctggtgcggtaagtggaagtcaggaggctagcgcagagcacggggtgaactggaccgagaggattcgaactcttcccgcccaagcctcccaagcttcacacagtgaatccttcaggaagaagccgggcagcaaagggaggttgcgcagctcatagaagtgtgcatggcgtgagtgggtgctatcacataccagaagggaggggctgagtgtgcctatgctctcacaagtcacagctccatcagatgtggaatgtgatgccatgcaggccggataagcctacaggctgcaatgcagtttgactaaccccagttgtcgacctacaactttctgagttacgtttaatttgctcattaataacatacaatgttgagtgtgaacatgtacttccagggagcttacatcttaataagttccagtacatgtatggaaagtgttcacggggtaaaagatgataaaagtgaggaccttaaccatgaggctagtgcaggattcagagatgagaatgtttgcacatggtcctgggtttgttttcccacgggggcagtttagaacaccgtcttaggtgcggccatacataggacttgcaattttcatcagctttgccgtccttccatttctcaagtgtatattcagtttcaccttctttattagaaaagcaaagtcttattttataaggcttcaagccacaaattattttgacaatataggtaaaacgtgtatattttattaatagatatttaagctatggttccggtcccaaaagattcccattggtagatgttctacagtatgcattggagtttgcctccagtaaacctgtgtgcacttcccccgttgatgacatcgatgctagttcctcagcaagtggccccctaccatcacagtccttaccaaggtaagtgagtcacccttgctccttattcctcatcaattcaggaggtcttgtctatctgttggaatctttatatatttttcgctggtcagaattatacttttcaatgttttggtttgtagtttctgaacgtcatataatatgttgatgatgcttttagagtagaatttgtttctgataatgcaagttggtattagagagagaaagagagacagagagagagagagagagagagagatctttagttagaatatgcattagattttccattacaaagaagaaggcagtcttactttaaagccacgatttcgtccttataagattttagtcctcttgtactaaacgtctcgtctgatatttgatcagtttgtgtgtttcttaagatcatttcctcttgagattgtgaggggcttggatgctatcatctatagagctggcttcagtttggaagtttaaccagtcgcatgtgtgctttgaaaccacagcacaacagaacagcagggaccctgtgcttcagatctgcccggctcctcctcacccgcatcaggtgccgccctgcccttgaggtcagtgattcacaaacccttcactcagtctcggatacctccagatttgcccatgcatccggcaccaaggcacatcacagaggaagaactgtgcgtgctggagagctgtttacatcgctggaggacggaaatagaaaatgacacgcgaggtaagaagctcgctgagtgtggctgctgtcgcttcagatgatgttgtactctgagaaggaaaaatggcttggatttcatttttaaacatgtgtagtttttccttgaaaaaaaaaatcttttctgaaaagattttgtggaagacactgttttttggctgtcccattttttaatttttttatgttcttgcccttcgtgtcagattcacagggaccacaagggtttccccagcttacttagctgattaatgatgtaacagatggtctgatttgccagtttagtgttctaaatttatatcaaactggtattcacagctactccagtggggaaatgtcatagagcctcagaatttgtacttactggttctggactccgtctgatgcttgcataatgaagaggggaaaactgtttttctctaggtataaccatttaaaaagtgaagttttaatttctgtttctacctggacattgaatcatgctagagatgctgaaccccatgtacagcctcattgtttaatctagtctaagagacttacagatccgatccatggacccagtgccagtctataggaaattttcaggaggtatacagcaacataaggatttggtgtgtgggagtgcgtgtggatgaacacatgcattgctgagctatctttctttcttgaaagacactttattttgaattcatttctaactgttaaaatgaactttttcattttaaaaagatacttcacagtagattatattataattatctttacatgtcaaaatatacgttactaactctaaacttcagctatcaggaaaatagaaattgtaattttatattaaaaggttgaggttacattaaatagcactagctgtcttcttttagatagttaagttgccactttatggataagtatgaataaagtccagtttaatagagtagatagttgcattgttagtcttagtaactagagagtttgtgttactattgtgcatatttaaataactttacttatattaattaaacatagtttaatggctaataatagtttattgaatgctgtgtggagtattgaataattcccttctggacatgacagactgtatttgtaattcagaagagtagatgctgataaacttttgacattcaggtactgcacaaagtgagaaaacaaatgaaagtgtttgaaataatatttaaagaaaacagacacatggaggttaatgaccacaggcccgagagaggaatcaagtgggccactgaatttacagtagcacgaatactaaataaaatgtacttcaaatggacaaacgtgtgagtccctgcctggaagacaaagacagcatgatgagatcacagtggtcatttgtgatagatgaacctggggagcattcatgccttaagattctgtgcacatcatactggagatcaggaaagacttacttgggattcttgttttctgtctttaactcctatggatacaacaaactagcattgatttttttttttttatatgattgtgtagtattccaaagcccggataatgtatttaatattcatgtattaactgcagaaaatgttggtctattacatatatatgtatatacattacatatatacatatatgtatagaatattcttaaataaatagagtaggcttcttaagattccatttctcggctaaagtatatagattttaaaatttgaatgttttaaaatagttctgtttggaagagaatactctcaggagactctcagaccctgagtgtattttatttactctggagtagtctggtaggcgataaataacatctcagtgtcttgatttgcctaccattatgatgatagtatttttaaaaatgtcttatttatcttatttttctcttttgtaaacattttgggacagtttaatatataccataaaacaaatatatattacatattccctgtaacaacttgtaaagcgggtctttaacctatttttttttatagtaagcaatttttctagtttttatttcttccaagaaaatgccctcatttagacatgagtctttttgtctatagtgcatgctatcggtattactcttctagtttgtcatttggcctttgtgctggttttttatttgcttttgttagttttttaacttaatttctgtgtgggtgacttgcttccatatatgatggtaatcattgtgtgcagtgcctgtggaggccagaagtgagcatcagaccccctctcagattatgtttaggggagcaatcatgtgtgtgctgggaattgaacctctggaagagcaaccagtgctcttaaccactgagccatctctgcagcacctggcttttgtgttctgatgttgattaaagttttagatgtttgtactcttacatttatttatctcttatggtttcttaattttgtatcagcctaaaattaatctttccagagtttgaagttacttttttgtagtagccttttctggcttcttccagattctttcaactgattaacagaacgttacaattctgtgatattttaatgtatcgataccaacacttaccttattcagatttaaaaattatgaaataatgtagctgtgaacacccagtctttgaagacttttataaaattcttttctactgtaagtagaaataataggaaatggaagttccgttataaatttcacttggctattttagtgtcccagttgcatgcatagttgatttttcctattatctctacatgtatagggaggtgagcgttaacattccttgaaacctttctgtacaaacttgaatgcagtttgattttcttggccctgcatatttcctgagttgttttgttttgttgtatttttaactctctttgttctgaacatctcatttcacatagactgcaataatagcatcttaaagaatagtttagaaaacttttcttcctcaatagtgtgattataaaaaacaaaaaacaaaaaaacaaaaccaaaaaccccttcgtccctctgttactagtctcagtagaaacccaggtgaccgtgtcctccattaagtcccgtcttctatccaggtgaccgtgtcctccattaagtcccgtcttctatccgtagatctgcaggaaagcatatccagaatccatcgaacaattgaactcatgtactcggacaaatccatgatccaagtaagtgagcgctgggctgccggcccctgtcactctgttgccacaccgtgtgctatttgtaaggatttctttttaattctgtgtatgtttgtgtgtgcattggtgccctgggaggccaacgctgtagggtgactttagagccagagttacaggcagttgtggactgctggacatgtgtgccgagaatgttgagttatccttccatcttcaccttcatcctatttatctcacaccaattcttggtacatgttttgtcatacaacttgaatacattttattctaataagcaatatatttggtattatagtataaactaaggagaaaaacattctgataaaattttataacagatttccttcatgttatacctaagttactccttttaaaaaatcttacaataaaatttacaagcagttttccaaacatattcattaagaaaaaaatatgtccatagggaaaatgcatatgaccatttaaaggcaaataattggggtagaaaccctgaagccccgttcaactctaacttctttctgggtgtgggagcaatgcctgtaaccccagcgctcgcgatgctgaggcagggagatatgtttgggaggcaggccaacaggcttgcatagttagaaactgtcttcagagagcaacaagcatgcaagcctactttggatatacattgatcatgcagtctggtgtttttgtcactacaactgtgaagacagagagaaactgtgtgtataaatgtccactgtaactcctttgttcagtacaaagaagtactgggccagccaccaacacgtacaatctattttcagttttgaaaattactttctcttatatgtttgtatatttttagtttaataacttccatagattttctccctgaataattttgcatgttttgtttatttgttctgttgttttcctcaaaacctttaatcccagcgacttttattctatttagaaaatgtgccccagctttccttaaataggtagtttgcagatggccttgggaaatggtttagtagacagtataattcaactttgcatttctttccacgccaggtcccttaccgcctccatgccgtcctagttcatgagggccaggctaatgccggccactactgggcgtacatctttgaccaccgggagagccggtggatgaagtataatgatattgctgtgaccaagtcttcatgggaagagctagtgagggactctttcggtggttatcgaaatgccagtgcatactgcttaatgtacatagacgacaaggcacagttcctaatacaaggtaagacgatgccctgccatcactgctatttccatatctgagtgttttacctgcatgtatgcaagggcactgtgtaagagcctagtgcctgcccccaagaagataggtgtgaacccagagtcagagatggttgttgtgagccatcatgtgggtgttggaaactgaacccaggtattcaagagcagcaaactgctgagctgtgtctccaaccccacagtgtggcatttttgagtaaggatttttctgtcatgatttggctgtgtgatgaattcactgagggtggagaattgcattgagaagtgttcatgaaaagctggaatggggaggtgatacaacctaagctggactccaggaacgggacccacaccaggcagtcacactgtactcagagctaataaccaacataaatccgactgtgctccccatagtgagagctccttagctcctgcagccagccggacactggctgacggttgaccccttagtctagcacagagggcctttgtttctggcctctaagatttgctccagcctcatggcccagtttgaactttatatacttcactgacatttgagcttcatgccatctcctcttgcacagtttttttttgtatacttcccaaaacatcagttcaggttttctcaaaacatatttcggggctggagagatggctcagtggttaataacactgactgctcttccaagatcttgagttcaattgccagcaaccacatggtgactcacaaccatgtttaatgggatccaatgccctcttctggtatatctgaagacggctacggtgtactcacatacataaaataaataaatctttaaaaaaaaccaaaagcatttcttccatcagacaattgtgtggttaggtttgaacactgtaatctctttggctcaaagcccaaatccctgtgaaaatatactgtagtctttttatttctgttgtcctaatgtagtctttgcataaagaaaacacccagtatatcccttctgtctgtagccgtgtaagcttaactaggctgttcatttataactaaagtttaatgttgtaagaaatctttaatctcagtggggtttctatccctgcttttgatcatttagttcccagataaaagacacagacttttatatttctaataagccttcaatgcactacagctgggcaaatctaccttctgatctattagaatccacctctccatcaataactccgagttataactttccatgttccatctaggcagccctcatggccatgtttctgatctacttgtgccatggagtcttctcccctcccccctcctgctcccccctctcccatgctcaaccaggtaactgaaaaacctgcctacccaaatccctccagtaattggctgtagccattttgatttaaccaatagttttaaattaaggaacaaggtttgcataacaaaagcttgtaaacatgattacttactcataagcctagacctttgggtacagaatttagcattacaataaatagccacagagcaaacttcaacagctcactttgactattgaagtactagttgcacattgtttcagaacaccttgctgcattgataagcttcacagtttatgtgattttatgttgtatttaatcccttaacataaaaaacggttttagttctactttgagcttaacatagtcagagattgcttctgactttggtgaaacagttatttcctgcataatcagactttggatattttcttataatagcaaagtgaggttaggctcatgttagaatcaccagacattttaattaattctgtattgcctctccttgctactcttcagactctaggaacttatcagaaaccttcgactcatttttctaatagttatgtctttgtttttctgagcacttttagactttttaagaaaatgtaggtaatgtttgctatggtgactgtatgtaataatgaatagtatatagtttatatgccacttgaaatgcattctattttgaactttgcatttttccgtgacttcttaattttatactagtttttgaaatatgattttcagaggagtttaataaagagactgggcaggcccttgttggaatggaaaccttacctccagacttgagagactttgttgaggaggacaaccagcgctttgagaaggaactggaagaatgggacacgcagcttgcccaacgatcactgcaagaaaagctgctagctgcgccgaaactgcgggaagcagaggcttcggccaccacaggtttgtctgcttattaagttatagtttatagtagggtaatagcatttatttttattgtgttttattataaattgtgctcactgttatacacagtggtaggaccttgtgttctacacccatttaaaaaaaaaaaaggaaagaataatgttagtcaaagtaaacatttaaaactcttccaagcaaatggtatataggccattaatgttggcacatgtaagaaatcaaagcatgaagtttaactacagtcaagtatgaagaagaagtagaagttagcaaacatctaactctcaggatgaccgcaggccacagtttccttaatcactgtagacactaagactcctctctgtgcttggagtcgtctattctccttttgacaggaagctgtaataactgtgattaggaaagacacaaattggcttttctgagtctattaggaaacagctctcaacagacaatattaatatactcacagttattgcataatactggaattaacaattcagttggttttttaaaaaatttgagtttagttcagtatagttagggccatgtgatcaatacctaatgtttaaaaactatagaaggattttagtcaaaaataaacatttaaaataacgtccaagttaaaaattatatatagaccaataaaagtggcaaatgtataaaaagtataaatactagaaaatgtaattcttaaatattacctgataaaaccattaaaatattcaacataagtgataaattcaacacggtgagattttaggaaaattgaagttaaaatatcttttaaccatttttataaaaattaattacaaatttatcttagggccatacattcattgctgtgaaagttccatttttctgaactggatagggaattgaggaagtaaaaagtacacttagataaactctgcaaactaggggggaaaaaagggatacatatgtctgtctgtctgtctctctcgactctgactacaagtttatccctaactcatgccctttgcccaggatctgcgtgctctggtctttgttttaaaggaatcatttggggaaggttgcttgcttaccttcatctttcacagaggtatttcatcgtagnnnnnnnnnnnnnnnnnnnntttgaaataagttgatcagttaatttattgatactgaagaaatatataagttagaggctctaaaagacaaagataaaaatattataccaacaaaaagtccagtatttaggtatgtaagtatcggatgctctgtgtgaccatatagtgctattagtggccagtgagctttgtcatggtgcaggatggtgtctcaatggcttccttgtagaacatatgagcaaggtggatttgcagcattatagtttcagtaactaccaagggatgtcttggctccaatcttttttttttttttttttttttgccagttctattcctttaatttcttccttggtcttttgtataaatcattctaatcatttcctagaacttagccaatttgatttatgcacactccatccacatgtgattattcttcttactattaggaggcaagggctgcatcattgacccaagtgataggatctaagtgtgcaggcacagcgaccctccatttattgacctccaatgtttttcttgattaacctacattttgtgatatcaagacataacatttcagacattttctgcctctgtaaaattagactctaaatttaagggtagcattttattttcatggcaaactatacacatcctgtgttcatcctccagcccacccaccttatacattgtcaccttatctttctccatgacaaacgtcatgtctctgtgatccacgcactgtctttgtgatctttctttcctactaagaacttttgtgtgttttgaaattttagaaattccattttaatttttgaatatgtttctttttaatgtgtaaaatcaacttgataatagtggaggcatattgtttgaggggagtcaaaataacgaatatataaagaatataaatctttagttcacatacatctctgcaggatggggctgaggtttgagaacagctatactgtgagaacaagctttgcatcctgtttaagaagtgtgcattttgtcggagtacaagcaaaatgtgctgcatctataaatgtgaagaataagactgaaaagtttaaacacacacacacacacacacacacacacacacacacacacacacacacacactgatgtttctttttttgagacaaggttttcctcaagtccaggctgatttggaactcagagcaatgagttcacctcatcctctcagggctgggatttactggttttaggcaaatctgtggtgacattattttaatactgtaggagcttattctctgctgcagaggagttcacatataattaaataaggctagtatctcatgccaacttttatctcatcactagttcagaaaatgtaacactgtggccaccttctttttctctttatagttttcaatgtaaataatttgtttagtcctctatgttatttctagaatcggtgtgccctaggattgtgtgtgactaggaggaacaatgacgaaaaagctgtccagataatttacagtgtgatttttctcttccttccttgtgaacttttctcaataaagattcaagacaggagccaattaaaacccatacctacttaaggatattaggatatacaacattaatcaaactactgtttgttgtttcctaaatctagtggtgttatttttccactactattcattgcccacggaagggaaaatgccggacaagcaatgggaaagtgtttcccccataatcctgccactgcagagcaggccaacccaaacactctgctttgattcctaaaagttccttaagtctggaaggaatttcagggaggatctagagtatgcattgtaaaaagccacaggttaattggaagtatagtcttaagcatccgcaggtaactctagtggtccttgtgggtccttcttagcagcctggcataagaaatgggaaggttgaatgtgctcaaagccgagaatctcagaagtgagaaagacaggagtggagccattccctgcccgcctctgcctgctctggagcgcataaccatgacacccactgaggagcatgggtgagggcattgggtcacacggcataacacctggagttccgcactcatgaagtatctagataaccctgcgccttcagccaaggagcttctcttcctgagtatttcttcccaaaataggcttttactcttaagcatccacaggtaactctgaggtgttcctcttaagcatcatagttatatgcggttgtcatctgacccaggattctactgcagagagaaatagttcctgaactaatattcacttattttaatcctcatccagaaaagcatgtcataccttacatgggtaattccgaaattagtattttacttgttttaatccttatcaagaaaagtatttgattccttagaacatgggtaatatacttcaattcaaagcaaagcagaaaaagaaacaaaattacaggtagaaaatgatgcaaaactgtgtcggaagtgtatctcagaggttcataaatgtatgtaaatgtaacagacagagccctctctgggtcatttccataaactcaggcttacaggttcaaaatacaggaagtagaataaggcttgttagaatccaaatgtccctagcattgtcctgttcccatatagcaggatctgggtgttattcattttatatctgcatcattaatttaataaacactacataccagatgggctttgaatcctttctaaattgtatctttcctcgtggaaatttcattaatgtcattgtcagtgctcatccttagtgaaggctttttaacaatttaaaaaaattaccctttcataatttctgacatggatgtaatgtatgtagatcatgtccaacccattcctcacctcttcctccctacactatgtcttcttgttttcataatccactgtgccattagtacttttcatagttgcatgagcgttgagctccatcctctagatattgggcagaataccatgggctgttaaatgttaaactataaccatagagaagtaagctttaaagtacgccaaggggatggagagatggctcagtggttaagaacactaactacttccagaggtcctgagtttaattcccagcaaccacatggtggctcacaaccatttgtaatggaactctttacagaaacaaattatgttagatgaaatatcttaagggagaaaagattgatttcctggcttccttccttgtgtgcctgtggcttgctctaacatcttggtgcatagtacacagggagtacatagctacttattttctgttgatcaggaaaaagaaaagggctcctcactgtagcttttaaaggtgtgctcctgtgagctacttgctgttagaggaccacttcctggactaccagcccaaagcaccatcctcctgtgaacacatctccaacacgggagctgttgggaaacttaacaactaaacaatgatagaaatcaaggaagatttccaagaataaagaaagcaaacccaatcactccaggcccaacaaattgcatcctgaaggatgcattatttttgcccattagattctttgtatttataaggacctacagtagtgtgagtttatgtggtggcatggttaccgacattacgttggaacgtgctatggggtaaagtcaagctttcatcttcttgattgcatgacctgatacagaaattgttcatgtttggcaacatgtggatttcttgaacctttcattattagcaacttagtaaaagaaacaccactgaaaatgtctcttcttatttaagttttaaaatgtgtataaaaccattctttttcttttcattaaaacaaaattattagaatggttatgtcttgaaatagaaaatgccaaaggaaaaaaaatcttagtagtgcctacatttgggtattagaaaacacatttctctttgtctctctctctgtttctgtgtctttctgtctgtctctctctctgagtaccttgtgcattgagtgattctctggtttctattctatggctacaagacactagttagtcccttcttttactgtaactctatcccccaaagctctcacctagaggggactttccgacaacagtgacactgttaacgtgatttatgactttggatgttttaagatactttaaatatcacaaactctctatgaatcctttcaggatcacttcaatttgttttcactgcgatgtttttttattacccttcttaggttgtacttaattttgatttgcttattaccttatttatccttaaaatggtttctataaactatttcttctgcctggatgccccttatttccaaaacaatcttgcctaaaagtctttcaagacacacatcagctgccatatctttcaaaaaaaatctttaataatcaacaccatccgaagagtatatattgagtccataatttattcataggaggctatgaatatcactatatttaatatattataatatacttagattcatcttaatttgtagaaaattaaaatagttggaatatataaatatttatcttagtttttttctagctagagaaagtagttctgtgtgatacttagtcaaaatcatttaatattacccataaagttttttagaatcacatttctatatagaggcacatcttggccttcatgaattatagtggatacttattctcactcttaggcaacttactattcctaagtcttcgactgatagttagaccagtgtctgatcagattttcttttttttttttttttgctcatattgtgttaagctcattattctatcagccattatttttgccatatggtgaaaagaaactgtgccaaacacaggaaaatatggtcctaagctccaagcatgaagcttaaggttcctgcaggaagctatccagagggagatgcctctccagtagactccactatctacaccctctcctcagtagggaaactgaacatatcagtaccaatcaggaaatagttatacatgtagggaaaaaacgtctttcaacttccctccttccttaatacacatcctttaagcggtcttcacttctagtttttcttatagtaaaattcacctctattttcacaattgcccctgataaaacttggaattacctttgtgttcaagttctgattcctaatatggcttacaaactactctttgtatctcatcgcgtctgtgtgcctttgttgctgcctgttattgacagtgtaatcatctcactcagtattcaagtaacttagaatacttggcctcagttccactttctttaattcattattcaaaatgcaacagtataattttctgtatgtgctagagctagatctgagagacttttttttgcatatcagccacactttgcatagcccgtgattttcttctgacagacttgccctgctgctattgtgttagaaccttttcaacctcttggtcaactaaaaacatttatagcattcaagacggttaacgctttgcccactcaccttcttctgttagtacctttgctgtttgctgtgctgtgtgtgatctagctgactctttgtgttttctttgagagaagggagggggagagagaggaaataaagggtaaagagagaagagagagagacacacatacagagagacacatacacacacacacagagagagagagagagagagagagagagagagagagagagaggagagtgcttttaaaacttaaagtctatctaaaatgcctctaaatcttttccaaacagttgcaaaaactgaggatcaaacactcaaatgtatgaatttatgaaggttctcagtcaaattaccctttgttacaatttttacaaattcttcaatttttcatcagtgactttgtccacaatttattctaagagacgacattactgtttattttgtttctccttgagacttactacctagccttgtacccagggcacatgagtttaattaaaatgtattggtgaaatgaatgtccattcgtgtattttgaagttatagtactacattttgaatggaaaacattttaatgataacaataaaatgtccccatatcttcgaggctctttcaacatgtaataaggacacatgctccactatgttcatagcaaccttatttataatagacagaagctggaaagaacccagatgtccctcaacagaggaatggatacagaaaatgtggtacatttacacaatggagtactactcagctattaaaaacaatgaatttatgaaattcttagacaaatggatggatctggaggataccatcttgagtgaggaaacccaatcacaaaagaacacagatgatatgcactcactgataactggatattagcccagaagctcagaatccttcttagaatggggaacaaaataccattggaaggagttacagagacaaagttcagagcagagactgaaggaatgaccatccagagattgtcccacttggggatccatcccatatacaaccaccaaacccagacactatggcagatgccaacaagagcctgctgacaggagtctgatatagctgtctcctgagtgtctctgccagtgcctggcaaatagaagtggatgctcacaatcatccattggacagaacacaaggttcccattaaagagctagagaaagtacccaaggagttgaagaggtctgacgccccataggaacaacaatatgaactaaccagtacccccagagctccatggaactaaaccactaatcaaagaaaacacatggtgggactcatggctctagctgcatatgtagcagaggatggcctagtcggtcatcaatgagaggagagaccctaggtcctgtgaaggttctatgccccagtataggggaaggccaggactgggaatgggagtgggtgggttggggataagggggaggcagggaaggggtaggggattttctgaggggaaacttggaaaggggataacatttgaaatgtaaataaagaaaatacctaataatatatataaaagaaaaaaaaatgttaagtgggggctgcctgtagctctggtctgtctcatggggtagttcttcaatgactcattccttccagtagcagtttggagaatttaccttgtcactcctcatgctcattctttatcagaactgcagattcctttgttgtattaaattatgttcctattcgtgctgggccttggagaattagcaatgcagaagggaaatagcatgcttgctcatgagacttttgcaggtggcaggggatatgagcttcaaataaagtaatcattaagctataattgaggtaaagtcatctttaaaaggcaagtttgtgtgtctgtagaattgggattctcctctgttagtgattttctctttgagcaagagtcatttgcctctatggagccctctgcattttcatattttgggaggggacaaagggattacatcaaggagggatacagtgggtttacaagacaccccctcccccacacatactatagacttattaatactaacaggtaaataatattaattacatgaggtcttaggaactctgctctaaaactgatacttaaataaataagcaagtttccagaaagtgttagaacacataggcggagtatgcaaagctagggcaagcgtctcttagtgtatgcagaagtggtagtgtgcaaagctagggcaagcgtctcttagtgtgtgcagaagtggtagtgtgcaaagctagggcaagcgtctcttagtgtatgcagaagtggtagtgtgctagccattttgagccgaggacacaggatgacataggaggaaaatgctgaaacccagtaaggaaaagctttgcttggatattcagagtagtgttggaactgttaggtggagctcaaaagataggttgagttggaagtgtactttgaattcttttcctgaatgatatttgaagtcacaaattcatattggcatcagtgtgccaacgtggtgtcatttccattcagagagcttacaaggggcggaatcaaaatggagatggtaggattgactcacggttaggatttgttaaatgggaaaacaagcaaacaaccaaccaacttgtactcattgtggaaccctgtaccaaagctgttgtgtcaatacagttctccttttaggcaaaaactagataacttttcaaaaagagactggtccttttcatgtagaaaagtttccttacataaaacatactgtgagtatgttctttagtagttgtatactcttggttctgtttgtcctgtttgggatactgtttgttggtcacttcttggattcatgcagtatttcatgcatttttcattgaaggatgtgttttgacagcaccgaacttagcttggttcctgtataacttcagaattagacataagctcccggtttctgtatagtgccttgtggtttatgttagatacacattgattcttttctctgcagcacaagcaggaggcgcagactatctagagcagccatcaagaagtgacttgtcaaagcactggaaagaagaaacgctccgagtgattgccaaggcgtcacatgatcttgaagataaagggccagagacagttttgcagtcggtaagaacttttcttctggctctcggaacatagccattgcagcgttcccactgtaatggagaagcagcctggctggcagtcagtggacactgggatttggccatgagcatgatctgggagtgcgggctgtcatttcctcagtgtgtgattttaaataaaaccctctcatatgtttcttgtcagaggactaaaaagactcagactacagactaatttttttcatttggctgggaatttaaagagaagcacaaagttcaacagtattttttcccttggtctgtgatgtgtcaatactggagtaactgagaaagtaaggcacagttgccaatgttccatggaaagtctttaacaaaaagtgagaatattaatagaaaagaaatattacgtgaagtttgcgtgtgtcctggagagaaattgtcattatcattttactgtaagtgggcttttcagtttgttttataagaacaaattgaccagagatgtagggttgagtcagtacctgaagaattctgtactgcaccccccacccccatttttgtagttaatacaaacagccccatggaggctgactggagatggaggctgactggagatggaggctgactggagatggaggctgactgaggctccctcaggatgtgaagagtctctccctggagaactgaagatcattggatagttcagacatttacatgacaaaagttgtactttgcaagtgatgctggtctcaacaatagcctcctgttaccttaaactacccattaagcgaagtttccagcaaataaggcatcctacaagttatatctaatgacctaagtaataaccagaaattcttttacttctagcttgaaaaatattattacagtcttcttaatatgaaaattaatttaaatatattttatggttataaatcctgcaaatgtcttagattctataaatacatttaagaacctatgctaatatctataaaccttttgggtaaatactttgtttcatgagtctgaaaactctgtcttgggggccttgggaacaggaaagctcgggaaacaaggactgacagttggcatggggagagagtacttttaccagtacaaaattttaacttgggctcttcataaattggtgctgtgagtcattaaagcctaaaatatatcatgcttttatctgggctcagaaaaccaaaatcataacttgtaatatagaatcatgtttcatctcagttcaactacttaaatgttttaattcatgcagtcatcacataaatttacattccccagattcactggtttgtgtacctttttataaatagcgcaggggactaccgtgggaaggctcttctcctcgttccttgtctcctgaaataatacctgtattgttgcccctgaagtctggacttgtggaagagttgtgagcttctaccatctgatgagtttgtggctcttggtctcaggaccactgcttaggcctctacaaccacttcctgttatcttttttccagttatacttagcatatatgagaaactacagtgagaatcttcagacttcagataccatttccgtgactttggcgtattcacttcatttcttactagaaatgcaatcttgaggaaacttcttacttgactttcaggtttcttcttctttttttttttttttttttctgcaaaattgaagtgcctctgaggttaacgctgaagattttatctggtttgttttattttgatagtgggtgtcagtgtgggggttccttgcttgccctcagccctgggcttctcacagcaccttacgttccagctgtagagtaggcatgacatcccataatacttagacttacagaagatatgagcagccttcaagtgttgaggcagcttgctttcctagagagttgtttaatttctaagtgaacactttaggatatttgtgagtatggaaagcagatggcaagaggaagatgctgtgcctggcttcagttgctggccagtgcataggcactggcaacttggcctacccgttttctatggttttttagaatagagtccctgtatttacttattaaacagggttccatatcagtgccctggtgacatgaaagtgacacctgatgtcaaaataaaacacaaacatactcattaacttcatggttacttcagttttactgaaagaaacagtttaccctggaagggatttctagtcagacgtaagttctgtagtcctgtgactcatgttctcaatcccttccatgagaacattttacaaaatcatacagccagtgagtttcaggctattttaattttttctatcatgctaacggaaaaccttcctaattttgtagcctttgttttatttgtgttaatttgttcactatgcttgaaataataggacattaaaaataagtgtttactttagtacaccttcagctagtttatatgaaaaatatcctgcatgagtttgagttcttttgtgcttccaggattgccagaaccaacatcatgcttttgagactgaacagtagcacaaagggcttgttattaaagggtgtctagggccacctccagacagttcttttacagtgtccctgtagctattttcatgaaggtttttcttttatttcacctttagttctatgtatgtgagtctttgcatgtaggtttgtgcacatgtgagtgcaagtgcctacagaatccagaaaaggacattgggtccctgtgagttggagttggaggttagtgtgagatgcctgatgtgggtgctggaaattgagctcagtttcgctgcaagagcaggatgtgttcttcatcagggagccatgtctccaggcccccctttctgtctttacaataatagattgagctgctagtaagtcaatatcgaagtctcaacatggattgcaacttacgagcttacagttcacttttgttaatggagatcttgcacgttgtctcaaatgctagaagtattaacaattcttaattgtaacaaattcatctctataaaatatgtgagatagtaagattggtttaaaataattacagtataatttttttaatgatttggcaatatctaccagttttacagctgataaacacaagatacttaaatattagctcaagatcacaacaacaaagcagggaatttcctttggagatgatgaaaattgagataagtagagcaccctaaatgtgttacaaaataacactcttaagataaacctttcttttaaaagacaaaatactgttcttgaccattacttctgattccattgtcaaagtctatttggatacgtatttctagagtggaagaaaatgtgcacaacattaaaattcacttatatttcaaataggaataaaacttgtaagtgtccttattcatattttgtatttgaactcatgtctatttttgatgaagaaagttctggtccacattgcaacgactgaagcaagctgcccagatacgccctgcgcttctgccgcctgctgactgagacattgggggcattcaagctctaagcctattggttaaacaagactatgtgaaagccttacccttgcaaactgctgggattagagtaggtcataatcttaacttcatagagttgcaacaaaaagctttctggagtaactaggactgtttgcctcaaatactaccattcaatgtgactctggtctttagtatttttatatacccttaagtctaaaatgctttggtgaaagctacctgaagtatctggtatgcaaaaagaaaggctacagttttgtattacaatttgattaattaacctgcgtctaatatttactttaaagtggtttcattttatatgtagtgaatagagatagtatataaagagattataaacctctgtgtgtaaagagatcgcttccattgttgtctttctaatctgcttgccaatggttttctcctacagaaacctgcaaacaccacgagccaaccaccttctagccagcaaggtgtagaggtggagattccccacttagggaaatttgtgattgaggcaaaagagggagggtacgatgacgaggtaccttggttgcagtgctcggcacggtttgctctcactctttgcagatatgtacaaacaccgtaggcatgactgtacccacacgcttcatgtctgttgctgcataacctacagctttgcctctgatggtgtgaagccttgccagttactaacagaacctggatattaaatataagatgaaagcagcaagcttagagaatagatgaaaagaatgattttttttaacatcagtttactctcaggctgataattagagtaagatttgcttaattatataatgcccatattactttaaaaataactgatattttcctagcagactactaaattacttgtatacttcactttagactttgtccatcatcccctaccaccagaaagccctacagaatggctgcaagatgggtaattgatagtcttgctgctgttgactcatgctgtaacaacaaacaggatgcctggtgggcatcactgaatgcctggcagcgccttcttctctatgggcatcccgtcttcctccttctctgctgattgtcttagctactgagttgttccaccagcctccagctttgttctttctcatggtaaagttctcttccacccagtagtctgcttcatcggactatttatctatcattacttgggatgtattttccccttgaaattctttaggtggttcttttctgtgtttgagagaggacagataagcaattttttaagtaagcgatggggaagcttggatgatttgtggtcagagagataccacagctttttagtggttgtatctttggataagaactgaatgtgtgtgaaatatatttaattcctgaaaaatgtattcctgaattttaattatgattatgtaaaaattaatcatcaaatttggaagtattgtaagacatagtatcactgtgccgttatgagaaagcatgcctactgacaggctagatttaagagagaaggaatgatcaaaggacttcggtaagcagacaatgaatggtggacacgtgcaaccttacatgtatgatccagaataaactatgagggacagtttcagggaactcgagggagtgaccacagactcttaactgcactgagacagcgtcgtgctacttatttctaagacattggaaaggcaagcagctaaggatgagccattttctagaactgtctatagtatatgtaatactgccttacattgttccgtgtttgctctcatacaaactgatccaatttaatgaaagtactcacgtattacaaagcatccagttgcttgttttcagtgtgagctggttttggcatttgtgaaagaattgtgactactctctttattgaatatactacctttggtggggaaatttctgcccttagacctgtatgttttgatgtactctgttggcgtccttgcctaacagtgcatgtgccttgagactcttggttgcttacagatacactggttgcacagttgtacgaagggcctttgcctgggagcaggaatgagattcaactggagttttcaggctattcatttatttactaagtgttggtgccagttttgaaatggttctcttggagaagtattcactttctgctttgtccagaagggggcgccttcttacaattctgcactttagagagaatgctttctgatctttgaacagacaggggcatcctgcaagccagctgggccactgcccagaggactgaatggtgctttgactcatacatcagaaaccatttgctcttttataaacgcatgagtggtagaaaacaaaggcttttaagttgcatgcaagcagcttgtttcattttgttaaaggttttttgcttttgtttctgcattttcctgttaaccgttcagcaagcttcctttcaacccccgtggcaggtcatgatgacccccagtatgcaaggcgttatcatggcgataggtaaatccaggagtgtgtatgacaggtgtggccctgaagcagggttctttaaggtactattaccactttctttttttttttttttttaatgtattgtcttctagcaccttatctctttaaataaatttctcttttcctgtctgaattatgacaatctggtattctaggagctgcttgtgtgtaagaatccaacatttcttttgtttttttttaatgcaaataattaaaaaacaatgagaatatttcacctgagttattgcagtagcgtgtctctccctcgttgccagtaatgtaatcaagacattaagggtacgggaaaacaatgacatgggctgtggaattgcctctggtcacggtttatttcttgtgtagaggtcacactgcaggtcagtattgcaatatgctccctttaattttcccgttgactcaaaactagttctgtttctcaaaattattgattccattcttaggttttgcttcatcttccttgctttgcatctattctgagttttaaatattctcctcaactcaagaaatgggagagcgtcccgttgcttcctttcaccgtcccacgcattcattcccttttaagtgtgtgcactctccagagccttattgtgtgtccttttcattggaaagagaagaaacatcatgtccaaggcattactttctgagatttaccaaagacctcgtgtgtgcatgtgagcgcacacacactcgtttaccaataccctaaagctttcccttcaccttctataggttgtcatcacctctacattgtcatcacctctacattgtcatcacctgctctcttcctcagaagccagaccctctgaacagtgtacagaacagaagcagtgtactaatttgccttctcaataagtccttatggatttgttagaaattatcaattttactgatattccctggcctttttgaatatccaacttgaagtgttaagttgcaactttctgttactatggttaaaggagaaattgagcagccttttaagatcaaatgtaagaacttaaaaaaaaatctcttctttaaaaaaaaaaaagaagaagaaagatgacaaggccaccagaaaaaaagtaaagaaaggagattggagtagcttctgcatgtgttgctagctgtgctccttatgggtggcattatttccttccctccgttggacctttcatttccctctagttgcccccacccatacacttaatatatttgacatcagttcctccctctaccagttgcttgagtcttctcttactttctttttaccaattttaaatgctttttaacttttattttctgtcattcggtattttgcatacatttctgttacattgcattacttcaattgcagctttttattcagtgctcacagaggccagaaaaggacatcagattctcttggaacaggagtcccagatgatggtgacccaacatgtgggtgctgggaattgatcccaggtcctctggaagaacagccagtgctttaaccacggagacctctccagcctgctgttacaattttgtattctcagagcaatagaaacctaggttacctttagccaggcatagctcattgatttgaaacctgttattgttgttaccgtggatattcacttgatgcgttttctatatttcatccattcctcgcctcctcgagtaccaggtacttatgtacaatgaaaggaagagctaagaaagggaatgagaagtgaggttctgaaacagggattggttagacagattgttcgataagttctacctttttaaatacaataaatctgcctttcaaaatatagtgaataccacacttaataatctttgaatcgcagattagtaagaattttcaggaatcattacagaaaactggcagtttgaagactcactagtggctattaacatatgagcctgtgacctttattacatttagaatcctccggtgtctccttcccaacccatgcatccacctctccacaattccctgggactccttaccagctctgcgtgcacacatcacttgtaaggatgagccggcacgtaccaggatgaaaacctagtattggcccatgatggcgtctccaccctacctgtgctccttgaactatatactctacatgttattcttttcagggcctaatagctaataacttgggaggaaaggttattttctctgtatcttaacattatcagaaaaactttaagttgactttatagaacttttttattgtgagagaaataaaatttaactctgagcttgattaagtactttcagctctacttattaatgcgttatcatcagaccaatttttatgttatttactgttagaatgcatgtgtgcgtggcagggtacacacaccttaactcgcatgtagaagtcagaagtcaactttgtggagtctgtcctctctttgtgcctttatgtgggctctgaatggaacccaggatgccaggcttacagcacaagtgcctttatctggtgagacatctcaccacacacattagttttcaaatgatatatttgattggtagtggttaccttatgaattacaggataataggaaattatcctgtgggaatgtcatcttacaagaaataggcttgagtaagtgaactggtatgatttaaccttgacttagagtcacacaaaggccttcccactaaggagtctactgtatgtacgtagtatgaaagagttaataggcaggcagactgggctaaggtattctaccaaatcctttcccaagctgtcttcttttgttaagaccggtttccattttaagaataaaacaaaacacccatggaaggagttacagagacaaagtttggagctgagacataaggatggaccatctagagactgccatacccggggatagatcccattatcagcctccaaacgctgacaccattgcatacactagcaagattttgctataaggacccagattagctgtctcttgtgagactatgccggggcctagcaaacacagaagtggatgctcacagtcagctattggatggatcacagggcccccaatggaggagctagagaaagtaaccaaggagctaaaggggtcttcaaccctataggttgaacaacaatatgaactaaccagtaccccggagctcttgtctctagctgcatatgtatcaaaagatggcctagtcggccatcactggaaagagaggcccattggtcttgcaaactttatatgcctcagtacaggggaacaccagggctaagaagtaggagtagtgggtaggggagtggtggtggggggagggtatgggggacttttgggatagcattggaaatgtaaatgaagaaaatacctaataaaaaattaaaaaccaaaaacaaaacaaacaaataaaaccaaacactgtctggaagaaaatcagtagataagtgtttggtgtgcaagcatgagactctagtgtgatcccgaggaccccatgaaaagtgtagacataaaggtacatacttgtaatgctagcttacaagaatcacaatggggaggcacagacaagtggatccctggagctcatgggccagacaacatagtgaatgaattctagtgaaagatcttgtctcaaaaaaatcaagtagtggtgagggagacaactgggttaatgtctggcttccatacatttgtatacacacacacacacacacacacacacacacacacacacacacacgtgcacaatcacacatgctgcatggaaatgcactcacaaacatacacatgcacatacaaacaaacaaacaaaaaagaataaaacctttaagtgaaatggtttaaagagaaagttccctgaaaaggcaaattaaaattgctccaatgagaaaaattaaaatttaagagatataaaaatcaaagaacagttgtaaaggactggttattattaagtatttgtacatgctggaagcaaagaccatacggtaatatgagaatagctttttattttccttgaaagacataaaacttcttttgtttgtttgtttgtttgtttaaatgaaacagctgtctgtagctcgtacagtcgtatactcagggttttgtgagataagtggacttctgtattatgaaataaggttcttgatagggtatcattgcctcacagtaattattccaagctgataccttccaagctgaaggtcacttccttctacaccttagtacctattaccactgctgcacctttctttaactttgatatggaaagtaaacttattttcatttataaaatgacttaaaagtacagtggtagtaggttacaacccaatagattatcacagaagggacagatgcccatgtaactatcaatcaggccgtgaagtggaactctgaggtgctcctgggtcactcacctgtgctcctccctgtaagcttcttgaccaattgcagccgtgcccttctgttggtagtgttcctgttggtgtgacactgtaccttatatacttgtaatgctttgttcttcattcttcttagtgtgtctcagtagcatgtttagaattctgtatcattgaatgtacctgtagtttgtagtataccatgtggacataatggtattccattgtaaggcacttgattgatttaacggtttataaggcacggcccccaatggaggagctagagaaaagactcaaggaactgaagggctttacagccgcataggaggagcaacaatatgaaccaaccagtacccccagagctctcagggactaaaccaccaatacatggaaagacttcatggctccaactgcagatgtagcagaggatagccttgtgggacatcaataagaggagaggcccttggccttgtgaagactcaatgccacagtgtaggggaatgctcggacagggaagcggaagtgggtgggctagtgagcagggggatgggggtaggatagtaggatttttggaggggaaatgaggaaaggggataacatttgaaatgtaaataaagaaaatatctaataaagcattttgttaaaggaaaaaaaaaaaagacatggccctaaacccagtggataccgttagtatagttttgggttggacttcttcctgagtgaatcttgatttctagtggggaagcaaacatttattaaattgcaatatatgataaaggaaaacggaattaagaagggattacataaaataaaagactgagttggtatctagaaatcttcttagaggaagtaatatttaaacaactaatacatccatggaagtataaactttgaataattttctctgacagctgtttcctccgaatcctttaaatgactgtcgtattactttactttattggaatttagctcattgacagttctatttggtttgtcttaagcatcagtgtctttgcagaaatattttgtgtgctggtatttaacataactgtcgtcgttcattttatattgtggaaatatataaatataaatatatgaataaaaatttattcatgttaagtgagatttgataactcaacagtagatttccagttgtattttgtggtttataatctgtattttatgcttctttgtggtaagaactttaataagtaccttttttataaatataaaagtcttgatgactgctaaaactactgaaatcattcattcctatgatttcatgctttgaaccttgacttagtttataggatttcaactttcttcaaatggaaaactatctaacacttccaaagaactttgtctaatccatcttttaatactgatttaaaatcccacgtttatcatataataattctccattggcaactaggattgtacgtgtttctgtattctactcgtgtattttctaagcaatgaacatattgcctcatgtgttattagtatatttgatgttttatataaaaacacctcatttttattttttataaatgaaatacttcaagaacctttttaagtttttatgattttttagcattaattgttacttccccccccccccgaactcttaatgaatttgagttcatgtgttaatttaagatgaagttggaaattatgttttaataattggattatttttttaaagttacacagatatgacttttcaatctgtcatcctttgctatgtctttttataagttttcatcattttgttaggtaaattgcttatattttacattgttcttaggtgcataaatgttttgttacaaaattgtacatgcaagttaggatgaacaaggataatacattttagaatatttattttattataatcctatgctttttaacaaatttacagtgtagtctcttgattataccattaaactgttctcccaaaagtatctcattactttcataatatctgtttatgtgatataaaaatatctggttttatcatgttgactatagactttagtacatattcttaatgttagagtcatggtaagaaattcatttatttagtaacacattatcaagttcatagtagaaggctttattctattataattagtactagaatgtagacattgggccttttagagtcaaccaggtttattgactactttaatatttcacattataatatgttatattcttgcaatatctgtagtaattatcctaaaatatttctcaatgtagacagctaaaataatgaaaaatataatcagaaacacgatagagactcatttgagacagtttatcatgttcgctttaatccagtggcagttagactctgctagaagaaacagcacagaaatctgtccatttctgttactagttgagaaagtatacatggaaagtgatgtgactggagtcaccttggaaaattaggagactcactgagtaaatccaggagataagcatattaaaatgcaggggcatataactttaatggtgattaggatacattggtttttaaaagtacatgtagctctccttaccaaaaattgaaaaataagatttttaaaagaaatcattgtgaaaactttatatgtgctacttaaatatgcagtaaccctgataatcttaaatgtcaaaatacattttatttttattgtgatctttaagcacagcaataagacttgacagtatatctggagggggaaagtcatttttccccacagggaaagtatttttgaaaatcttattactataaaaaatgaacatcatcttctatttgtaatgctttgttgtgtaggagggactgactaaccttaagtattatttaccataaataaaatatttcaacccatggttttagttattttccctctaaaatatagcaacatagcttataggattacttgaagttataaacaaaaagaaagtgaagggaagaaactaataaacctttttaattgaatgaaatttttgtaatgtgtgttgtatgcaagtatttttatgactagcagagctacaacttagacacaaaaataaagggaaaatttgaatgtgttatttttaatcatgtgggcttcatgggattaattcatcagtattagatatgtgagtctacaaatattcagttatatatcatctagattgtgctcatatgtggaaaaatatattaatattttgtgttattagttctcaagtttgaagcatcttatggttaaagaaacaagtgatactatagcatgtatcatcactattactatcgtcataaaatctaaatactgtaatagcagtcatagtcccttgtggtgactaggccccaaagcaccttcctgtgactgcctgtgaaatagttgtattaatgtaacttctcgcaagagcccgctttcttgtacaggtctgggtgttctaggaatgttcaactcctggaactcttggtatgtaatctagtgtggcaaatgcacacagatgcacaacacagctagtgatgtcccaagagagactttggcaaagctctttcacaaaagtctgaatttcacaaagtgatccacaccatatgcagatacactgcgtcatcgcttctgtgtgtagaaacataaggacatttggaagatgatgggatagtgaagggcctatgtagttgatcattcagaaaattcttttaaagtatggaatttggggacacttaaatgaaccagtttacttacacattaaaagtaaaaatgaacatttaaataattaccattaaaacagtgatgaagtttaagttaattaataataattaataaattctttgctcttgttttctaggcaattaaattagagtattctaggctggttaagttggcccaagaagatactccaccagaaacagattatcgtttacatcatgtcctggtctactttatccagaaccaggcgccaaagaaaatcattgagaaaacattactcgaacaatttggagatagaaatttgagttttgatgaaaggtaacctaaaatcccaaagcatctacttcatgtgttcatacttgtcttattctggtttggtttggatttgctaatctcaagtgtaaatcttttgtttgcacaaaaactataacaaatatagcacaaacctaccttccattaatttgattgtttgcttttccatttctcttaaagtttctatctatggccttttaaagttttacctaaaagtaatttggataattcaaattatgaaagaaaatgtgatttttcaccgtctatactgtggagattttaggctaagtaattttattgtcaggcttccatgtggcttatcagatacagcagcaactctaaccaatactgagagaagccagtcccttgggttagaaagacccaagcatctcccatatattcccagtagccactggaagctggaggtgagtttgcttctctgagacaatccatgaagaaagtcgagtgtatacagaaattttgacataaaatagttaattttttcacttgcaactatattttgtcagaatctgttataaaactaatgttattttttttcttgttagtctgaatatcatttaaaaaagactccaagtatagaatttcaagatactaaatgttactttttttttttttctgaaacactttataaccatgatttgtcttttggaactcattgtatagaccaggatacactcaaactcacagagatcttaaatctgatttctgagtgctggaattaagggtgtgcaccactgtatccagcccttttttaaatctttaaaatttttgttcatgtttgtgtgcattgttgggggttgggagtaagacatgcttgacatggtatatgtgtgaagttatttgtgtgtgttgctggggtggtgaagggggtgagacatgcctcctgtggtatatgtgtgaagatcagaggaccactctaggcacttgtgagaactgctgattgacagtgatcaggccaccaaacctttgcgtcatcccactggcaattgtgaagattttgtttttatgtgtttggaaatttagttttatgcaacatgcttttatggtttttatggattttgtttttaatttagaaatgcctttcttatatttgaaggtgtcacaacataatgaaagttgcccaagccaaactggaaatgatcaaacctgaagaagtgaacttggaagaatatgaggtagtgtgcttttgggaaatactgacctctagtagacacattgcatacgtcataatggagaatggaacaaaatgttttaaatggctaaagtgttttaaagaaaacctttggtttttatgtttataagtgctcttgtatttcataaaccagttttcaattacttctatacatagtttttctctttaataagagcaatttactgcattaatgttgaaattgcaaataaagagcctgctgaatgttcttctaagcactgcgggtgtattgactaatttaatccagatattatcctccaattccatgggacaatggcacagagaggtcctcttacctccacacaattaccctgggaagcgtgcctctctcttccccacagccaacacacacacacacacacacacacacacacacacacacataaatttgtaagagaatgtttaaaaacagccagatgtggtggtacatgctttttatttattatttgttttattattactggtctgtacatgaactcaggaggtatagggataggagctgaacgggctgaaggtttcacaggtaggaatttacagctctctgactgcacacagaacctacaagtctaactgcccttctgtctatcctgattatttgctatgttttctgctttcccgttgatccatcctacatgttagaaagacattaaacagtcattttagccatcacgtggcatctgacatggtgatcctcagacagtgctgtctctgagtgtgtacatgcacacttgtctcatggctaatgagatttgtctgggtgtatagacaaaatcctttgttgacattggtttgaaaatatattttaacttaccaaatttgaaatgtagtgtctatttgtgcttttaaaattaagtttgaaaaatttacttttacgtatgtctttcattaatctttggtcttatttacaaacttttaactttgctgcttagagtttctaagggcaacttcagaataggtaacaggatcttgtaggattttacctttttatggttatcaactcatagtatcaaaattatgacttgcaagaattgaaattgtgtgtttggggaagggcgacgtagagaagaatgccctcctctgcatttgcccgtcagaacggagtcggagcaagtttacaaggtttggtggaactatctcaagataaaccttatattgagttttttattttttaactaatttttattaagcatcctttaaaaagcaggggctcttgctgttgctgtggcttgttggccctgagtgccctgcctaccattgcttgtgggagagggagtcttacttttcaccgtaggtcagcagagtgcttggcaacacgattgaaatcccccatatttcataataaataagtgaactatggcattttttatttccttaaaattctatatcaagcaacaagttggagctctggacagaactgcatcaatagaatgttcctgtctggactcttctaatattagtacattttatactgaagaatgtcttctgggaaaaaaaaacatttggtcatcctgccatttcattattttatgccttatattcttaaccttctagtaatattaatttctaacccctgactaaatgcctgataagtattgttactactataattattataattattataattaaactaaaaagtagtgtgctaagttatttaaattttaaattcatttctctttgtttgcaaaactatcagaacaatacattgttttatattcttaccatagttttattcttttcatttttactattttatatacaggagtggcatgcagattataagaaattccgagaaacaactatgtatctcataactggactagaaaactttcagagagaaaggtaaggcagagaggacgaatatgggaaaaatgtttgttcttatcattaatgctattcagtaattcacatctgatgcaaaatatccatagaatacacgttagggaaagttttagctcaaaacaactttaaatgatagaatatttcaaatttagtacaatgttaaatatcctcactataaagtgtattttgtttttactctaaatccaaaaggttgccatttgtgtttttgtttttcattagttacttttttgtttcgttaaagtttgatcaatagtttcccacatgtacacattgcatgttcacagtcatattgacccttgaccctctcccatctccctccctgacctctgcaactctgccccaccaagttcccacaagcattcatgtctgctcttgtctggttttctttttctttttctttttctttttctttttctttttctttttctttttctttttctttttctttttcttcttttccttgcccattgagttgaccagggctgagttaaaacatggtttattgtgaccatgagcttggatacgccttttagagcctagtggactataatggaaagttttgtatgaaacccatccataaaatatgggaacaaaggggcccagcatatgtaactagttgcattccctacagtgaacctggggcgtcactggttactatattcttcctcatctaagcttgacttacatcagaggccagtctttgtcttcatctgaatccccaggtaccataaacagagcatctgtggttgaaaggtattcagtgatagtatccttgcctggtatgcacaaggcctaaggtttagtcccattgcacaccaacaaaaaaaaaaaaacccaaacaaacaagtttttctgtaaaaacttctaaatgatacttttaaattgaagataattttaaattttcaatgtataaacttgttattttacttttttctttttctaattgaaagtagatttttaaatataattattttgttcccctcccccataccctccacactctcccacccacccaaatccataccttttctttctgttatataatacagtcatcttaaaataataaaaacatcagtattttaacttgtattatgaaaacatttcatgtactttttgtttctgttatttgctagcttatattcatttttccatatattatataatttctaactgagtatcaaaatacttaacctagtcatttttttaaaagtgactgctttattttcaatgcagtgtctttctgaagccaagcaaaatgactactgacctattccttcgtttgtgttaataaactgtaggaaattcccactaaggcaatggcgtgtttttaatgacaagtaggcacttatttctaggatgtaactgtccaactgtccaaggtactactaaccttgagtgacaagttcagattctgtaggtatagattcagtttcttagtagtactggccacattctttgatccatttatgaccagtgcccactctatagagtagagtttctgctgaggacctacccccgtctagccacagccccttagcctactgacgctgcctgtcgtttatgaggttggtcttgtacctgggtatgtaaatactatccgagtggtcagccactcccacaatgcttgtgctgctgttgtcagtagtcatttttgtagttgtgctgttttcagcagtaggagcttgccctcaagtcaagtgttactaaagacagtgcagcttgtaatgtttgggggtctgtggaaaactcagtggtcaacagttccaaaagaaataactcagacagggcactcagcttttcatttattctcttctggtgtctagtagaggcattgttgacctgttatagtgtaactctattttaaggtgtgtgtgtgtgtgtgtgtgtgtgtgtagatgtatctatgtatgtatgcatgcatgcatgtatgtattaagcttatttagtatatatctttttaaaatgatctttggtagtgtttacccctccccataccagctcctatgtcctcccttcactcgcccttcccaatttaaccattcttaatttatgctaatacgtttccaaattggaagtatgttttctgctttctacctcaccatctcctttgggcatttttctttgatgtttttctcagaggccagaaatttttctcttcatacaaaaacctggcttacatagtcactgcatgagccaaatgatccatgtaactataaagtaaacaaaaacaatctgtttacagaaaaatattgtgttaaaaacattgttggtctcacatcaggcttaaattttggtcctaagtggaaaccatcaaacccccatatacaaagacagcaggaggactcctgagtgctgtagctgaggccattcccatgttctttcttcttttgtcttactcttctaccttcatgctttgctcttgttgaaaggtgtgtttgttcatttgatgcgccgaacttattgtgttgtagaaaatagacatttaaacgtacacttagattgttttataattggagattataatattgaaatactaatactgtgtgtttatttcaagttatatagactccttgctgttccttctctgtgcttatcagaataacaaagagctcttgtctaagggtccgtacagaggccacgatggggagctgatatcacattacagaagagagtgcttactggtgagtataaattgcaggtgtgtgcattttcctatgttagacacagtttacaggcttgcacataggtaattgactgtaaacactgttggataaaaatcatgatatctgcataaaagtatttttaatgataaaacactttccttgatttaatgcaacactgcgttccttgtagtagcagatttttatcatcatattgccactccccttttgctcaaacgggaggactagtcatgaagaaagatattctctacagcaaacaattagtttcctgagagtagtaaatcatgctggactgaagttgcaaactttccttgaacacactagcttctatttgcagtgggaggctgatagtttttcttcagatatttttgtctctctaaattattattattattattattattattattgtcgtttttcaagttactttaaaaatgtttttagtctacattacctaactttacatatgtagagactttgattaatgcatactaaatcagctagctctcccatatggaattacaaattcccccaaaatgtatttgattacgtttaactcactatttcctgccagtattgctcccatctataatgtaagccactgagtaataattgttttccctgtttaagaaagatgagaaaaaacctctctagtgttgttatatgtattaaatgtaggaaaagaatttttaagtgactcttttcatgaaatattttctcttagatattagaacgactcagtttacatcaattttagtgtgacgtgttgtctttacaggtttcaatcagacaactgaaagactctgattttcttttctttctctattgtctttgttatctacatagctttttctgagagaggtgtgtgtttggtgtgtatattagtagcgttatacctgatggctgtttgttctgctactcgttgaacatattgatgaggttgtctgcagtatcatcatgttcaggttctcctttcttaacttacgatgaagcaaaatgtgttctcttctcttgttccattaagaaattaaacgagcaagcggccgagctgtttgagtctggagaggacggagacgtgaacaatggcttaattattatgaatgagtttatcgttccctttctgcccttgttgctggtggatgacatggaagagaaagatatccttgctgtggaagacatgaggaatcgctggtgttcatacctggggcaagaaatggaaggtaagtttgagcagtgccgttaggccccagggaggggctcggcagcagaagagggctttgtcatcttctgcctggtttgatattctggagtcctgcctccttcactctatggccacgcccctccctccgttacaagctagcaagtgcacatttccgttgccatgtatgtaaaaatcaacaaaagccaaactcagatccccaaatgaaggaaatttcatgtgtttgccgttgtctcctctcccataagaagcctgcagaggtgcccctttcacctctctctgtgctgagaaaaatctatttgtatttgcagcaaacctccaagaaaagctcacggattttctgccaaaactgcttgattgttctacagagattaaaggtttccacgagccaccaaagttaccttcctactctgcgcacgaactctgtgagcgattcgcccggatcatgttgtccctcagtcgtacgcctgctgatggaagataaactgcccggacttcccagggtcaccatagaaactctgttctcaccccggctacctgccgcggggattgcttgctgctgctagagtttttaactttttattttaataactgcaaaagacaaaacgactatgccgaccttagccaagactgcaaacaataaacccgagaatcgcatggcactcaccttgttttatccgaaaccaatgtataattacaaatgaattgatttcttgtggcaaaagtatgcttttgctgccttctattgcagtattgcctctcagttttctttacaaacagctttccatttagtctgggacctccaagactaagccattaagtgtttagcactgtctatgatacataatatttggtagcttgtaaatgaaatcaaagaataaagttttatttatggctacctaagtgtttgtaagcaggtatattgtataatggtgtgtattttagttatatacatgagtttagccatggggtggacattggatgatgcatacaataatagcccttttgtgttagtataatggaaccatattggaaatgtactgagtgtttagcacttcactgtgtctatatccactgagttcttggacctaaacatgttatgttcagtcagatttcactaaagtgagcgactgggttttaagtcaaactgcactgaaacttttaacctttacttagattaaacgtttgttcttttctgtatgtataaataatacaaggtgattatttcaagagaaacctgaaaaagtacttgaataagggctattgtgaaatttaaaaagaaaaaaaatgtgcacatatacacacatacatgcacatacatgtattcttcataatggagggcaatgtttttcattatataattattctatttttgtaaattatatactactttaattgagaaatgtcctctactaatcaatgctgtgaaatgaaattgatactgttcaactaggaattataagaatcttaactttttatttgcctccttttttttttcc

SEQ ID NO: 22 - DNA, 4247 bp, Mus musculus
cgggccgtccgcgtcgctgccccgggcccggtagagcgcgacaggcggggccgccgcgggggccatgaccgtggagcagaatgtgctgcagcagagcgcggcgcagaagcaccagcagacatttttgaatcagctgagagaaattactgggattaatgacgcccagatactccaacaagccctgaaggatagtaacggaaacttggaattagcagtagccttcctcactgcaaagaatgccaagacccccccacaggaggagacaggctattaccagacagcgcttccaggcaacgacaggtacatcagcgtgggaagccaggcagatgcaaatgtaattgatctcactggagatgacaaagatgatcttcagagagcgattgccttgagtttggcggagtcaaacagggcattcagggagacgggcataaccgatgaagagcaggccatcagtagagttcttgaagccagcatagcagaaaataaagcatgcttgaagagaacacctatagaagtttggagggattctcgaaacccctatgacagaaaaagacaagagaaagctccagtcggtctgaagaatgtcggcaacacctgctggtttagtgcagttattcagtcattattcaatcttttggagtttagaagattagttctgaattacaagcctccatcaaatgctcaagatttaccccgaaaccaaaaggaacatcggaatttgccttttatgcgggaactgaggtatctgtttgcacttcttgttggtaccaagaggaagtatgttgatccgtccagagcagttgagattctgaaggatgccttcaaatccaatgactcacagcagcaagatgtgagtgagtttacacacaagttattggactggttggaagatgccttccaaatgaaagctgaagaggaaacggatgaagagaagccaaagaaccctatggtagagctgttctatggaagattcctagccatgggagtgcttgaaggaaaaaaatttgagaacactgaaatgttcggtcagtatccacttcaggtgaacgggttcaaagacctgcatgagtgcctggaggccgccatgatcgaaggggagatcgaatccttacactccgataactcaggaaagtcaggccaggagcattggttcactgaattgccgccggtattaacatttgaactgtcaagatttgaatttaaccaggcattgggaagaccagaaaaaattcacaataaactagaatttccccaagttttatatctggacaggtatatgcacagaaatagagaaataacaagaattaaacgtgaagagatcaagagacttaaagattacctcacagtattacaacaaagattagagagatatttaagctatggttccggtcccaaaagattcccattggtagatgttctacagtatgcattggagtttgcctccagtaaacctgtgtgcacttcccccgttgatgacatcgatgctagttcctcagcaagtggccccctaccatcacagtccttaccaagcacaacagaacagcagggaccctgtgcttcagatctgcccggctcctcctcacccgcatcaggtgccgccctgcccttgaggtcagtgattcacaaacccttcactcagtctcggatacctccagatttgcccatgcatccggcaccaaggcacatcacagaggaagaactgtgcgtgctggagagctgtttacatcgctggaggacggaaatagaaaatgacacgcgagatctgcaggaaagcatatccagaatccatcgaacaattgaactcatgtactcggacaaatccatgatccaagtcccttaccgcctccatgccgtcctagttcatgagggccaggctaatgccggccactactgggcgtacatctttgaccaccgggagagccggtggatgaagtataatgatattgctgtgaccaagtcttcatgggaagagctagtgagggactctttcggtggttatcgaaatgccagtgcatactgcttaatgtacatagacgacaaggcacagttcctaatacaagaggagtttaataaagagactgggcaggcccttgttggaatggaaaccttacctccagacttgagagactttgttgaggaggacaaccagcgctttgagaaggaactggaagaatgggacacgcagcttgcccaacgatcactgcaagaaaagctgctagctgcgccgaaactgcgggaagcagaggcttcggccaccacagcacaagcaggaggcgcagactatctagagcagccatcaagaagtgacttgtcaaagcactggaaagaagaaacgctccgagtgattgccaaggcgtcacatgatcttgaagataaagggccagagacagttttgcagtcggcaattaaattagagtattctaggctggttaagttggcccaagaagatactccaccagaaacagattatcgtttacatcatgtcctggtctactttatccagaaccaggcgccaaagaaaatcattgagaaaacattactcgaacaatttggagatagaaatttgagttttgatgaaaggtgtcacaacataatgaaagttgcccaagccaaactggaaatgatcaaacctgaagaagtgaacttggaagaatatgaggagtggcatgcagattataagaaattccgagaaacaactatgtatctcataactggactagaaaactttcagagagaaagttatatagactccttgctgttccttctctgtgcttatcagaataacaaagagctcttgtctaagggtccgtacagaggccacgatggggagctgatatcacattacagaagagagtgcttactgaaattaaacgagcaagcggccgagctgtttgagtctggagaggacggagacgtgaacaatggcttaattattatgaatgagtttatcgttccctttctgcccttgttgctggtggatgacatggaagagaaagatatccttgctgtggaagacatgaggaatcgctggtgttcatacctggggcaagaaatggaagcaaacctccaagaaaagctcacggattttctgccaaaactgcttgattgttctacagagattaaaggtttccacgagccaccaaagttaccttcctactctgcgcacgaactctgtgagcgattcgcccggatcatgttgtccctcagtcgtacgcctgctgatggaagataaactgcccggacttcccagggtcaccatagaaactctgttctcaccccggctacctgccgcggggattgcttgctgctgctagagtttttaactttttattttaataactgcaaaagacaaaacgactatgccgaccttagccaagactgcaaacaataaacccgagaatcgcatggcactcaccttgttttatccgaaaccaatgtataattacaaatgaattgatttcttgtggcaaaagtatgcttttgctgccttctattgcagtattgcctctcagttttctttacaaacagctttccatttagtctgggacctccaagactaagccattaagtgtttagcactgtctatgatacataatatttggtagcttgtaaatgaaatcaaagaataaagttttatttatggctacctaagtgtttgtaagcaggtatattgtataatggtgtgtattttagttatatacatgagtttagccatggggtggacattggatgatgcatacaataatagcccttttgtgttagtataatggaaccatattggaaatgtactgagtgtttagcacttcactgtgtctatatccactgagttcttggacctaaacatgttatgttcagtcagatttcactaaagtgagcgactgggttttaagtcaaactgcactgaaacttttaacctttacttagattaaacgtttgttcttttctgtatgtataaataatacaaggtgattatttcaagagaaacctgaaaaagtacttgaataagggctattgtgaaatttaaaaagaaaaaaaatgtgcacatatacacacatacatgcacatacatgtattcttcataatggagggcaatgtttttcattatataattattctatttttgtaaattatatactactttaattgagaaatgtcctctactaatcaatgctgtgaaatgaaattgatactgttcaactaggaattataagaatcttaactttttatttgcctccttttttttttcc

SEQ ID NO: 23 - protein, 1053 aa, Mus musculus
MTVEQNVLQQSAAQKHQQTFLNQLREITGINDAQILQQALKDSNGNLELAVAFLTAKNAKTPPQEETGYYQTALPGNDRYISVGSQADANVIDLTGDDKDDLQRAIALSLAESNRAFRETGITDEEQAISRVLEASIAENKACLKRTPIEVWRDSRNPYDRKRQEKAPVGLKNVGNTCWFSAVIQSLFNLLEFRRLVLNYKPPSNAQDLPRNQKEHRNLPFMRELRYLFALLVGTKRKYVDPSRAVEILKDAFKSNDSQQQDVSEFTHKLLDWLEDAFQMKAEEETDEEKPKNPMVELFYGRFLAMGVLEGKKFENTEMFGQYPLQVNGFKDLHECLEAAMIEGEIESLHSDNSGKSGQEHWFTELPPVLTFELSRFEFNQALGRPEKIHNKLEFPQVLYLDRYMHRNREITRIKREEIKRLKDYLTVLQQRLERYLSYGSGPKRFPLVDVLQYALEFASSKPVCTSPVDDIDASSSASGPLPSQSLPSTTEQQGPCASDLPGSSSPASGAALPLRSVIHKPFTQSRIPPDLPMHPAPRHITEEELCVLESCLHRWRTEIENDTRDLQESISRIHRTIELMYSDKSMIQVPYRLHAVLVHEGQANAGHYWAYIFDHRESRWMKYNDIAVTKSSWEELVRDSFGGYRNASAYCLMYIDDKAQFLIQEEFNKETGQALVGMLPPDLRDFVEEDNQRFEKELEEWDTQLAQRSLQEKLLAAPKLREAEASATTAQAGGADYLEQPSRSDLSKHWKEETLRVIAKASHDLEDKGPETVLQSAIKLEYSRLVKLAQEDTPPETDYRLHHVLVYFIQNQAPKKIIEKTLLEQFGDRNLSFDERCHNIMKVAQAKLEMIKPEEVNLEEYEEWHADYKKFRETTMYLITGLENFQRESYIDSLLFLLCAYQNNKELLSKGPYRGHDGELISHYRRECLLKLNEQAAELFESGEDGDVNNGLIIMNEFIVPFLPLLLVDDMEEKDILAVEDMRNRWCSYLGQEMEANLQEKLTDFLPKLLDCSTEIKGFHEPPKLPSYSAHELCERFARIMLSLSRTPADGR

SEQ ID NO: 24 - DNA, 170032 bp, Homo sapiens
gcaccaacctaatatgtactatagttattgctctattttgaatatttgacccttcaagccccatgttgaaattttatccccaatgttggagataaggcctagtgggaagtgtttgggtcacgcgggtggatccttcatgcatgtattgatgccatcctcatggtaatgagtaagtacttcctcaattagttcccctgaaaattgttttttgttttgttttgtttttgtttttgtttttgtttgagacagagtcttgctctgttgcccaggctgaagtgcactggccagatctcggctcactgcaagttctgcctcccaggtttacaccattctcttgcctcagcctcccgagtagctgggactacaggtgcccgccaccatgcccggctagttttttgtattttagtacagacggggtttcaccatgttagccaggatggtctcgatctcctgacctcgtgatccgcctgcctcagtctcccaaagtgctgggattactttgggagcgtgagccaccacgcccggccgaaaattggttttaaaagaagtgtgacacctctttcccctctctccttgttttcctctcccaccatgtgatttctgtgtagtcggctccttttcccctttcatcattagtggaagcagcctaaagccctcactagaagcagatgctggtattatgcttcttacacagcctgcagaatcatgagccaaataaaccatttttctttataaattatccagcctcagttattcctttatagaaacataaacagactaagacaactatagtatattagtgcaataaaattatatttattaaaaagcactgtggttatctattggagccaattcctaactttcacaatttcagtacttccaaaatactgtaataactcatagcaatgtcatacatttgaattgttctttaccatttcagagtgcctgcaaataattcatctttgatctttccaacattaaaaagtgaaacaacattctttgctttatttcttcatgcacatatttctaggattatattttctatatagttacataattgtttctaacctagagctcaagtagcttttgaatggtacttggataaagatgaaattttgatccaatttatttctactccaatttcttgaaggttcactataatgataaatgagacgtgagagacataaagagctgtcagatcagttttatttctagttcttgcaaaatgcccaatgacagtagaaatctatagcagtggatctcaatttttttggtcctaaggctgttttactcttaaaatttattgaataccacattgagatttcatgtctgtaggttatatctattattatttattgaatttttaaagatgtatttattacttcattaaaaataacaagatacccattatattttaatataaataataatgttattaaaataaccatattttccaaaacaaaaaacagtgagaactatgactgtgttgtttttgatttttgcatctaaaacacctgttaaactaaggtctggttcaacagaagacaatgaaatcatctaatccgccttcactgtcaatctgataccatacattgtttgaagtatatgaaaaatatctagcctcacacagatacatggttggaagcagttgtatcttgccaagcctctgaaaaggttttgactacctccacaaatccatcaaccaaattttaaaatggccactgtctgagtccatatttacattgcaatatataatcatggctttcttttatacatgctgatttctctagcaagctactgctccacagcaatcttggatttctctcctgaaaattcgctttccttctctatcacacggccaggctgtgcattttccaaatttttatgctctgcttctctttcagtcataaatcccaactttagttcactcctttgctctcatatctgatcataagctgttaaaatcagccatgcaacttctttaatgctttgcttagaagtttcttctgccagattcattaaggttatcattcttaagttcagtgtcccacaaagccctagggaagggacaccatgcaggctaattctttgctactgtgtaacaatgtgacctttgttccagttcccaataagttccacatttccatatgaggcctagttagcctagccttcactattcatatctctatcggcattttggttacaaccacttaaccagtttctaagaagttttaaagttttcctcatcatcctggattcttctgagccctccaaactcttccatcgtctgctctttacccagttataaagccacttccacattttccggtatctttatagaaatatgtctctgctcagtaccaattttctgtcttagcccatttgtattgctataaaggaatacctgagattggataatccataaagaaaagaggtttatttggctcacatttttgcaggctgtataggaagcatggcaccagcatctgcttctggtgagggcctcaggaagttgccaatcatggtggaaggagaaggggagccagtgtgtatagattacatggcaagagacaagcaagagggaggtgccaggctctttttaacaaccagttcttatgggaactaagagtgagaactcactcccaagagaatgacaccaagccatttataagggatctgccctcacgatccaaaaacctcccgccaggccctaccttcaacattggggatcaaatttcaacaagagacttggtgagggccaaagaaaccgtatccaaaccataccagctcgtttgcagtgtagggggtgtaagtgcaaaagctttgaagtcacacaaaactcctaccttggttcaaactggtttaacaggtttgggttgtgtgcccttgatctgtttacttcaactataagccacagcttctgtttctgtaaaaagagggtaattattccaactttactggattattataaaaattaaatgataagtgtaaagtgcctagcacaggtactggcacatagcaagaatataaaaaatagtgtctgtccctaaatgtatcatattttcccacatctccctcaaaatagaaggcctggaatagccatctcagctcacctgagagtaagaccaaccttagagagaaggttctgaaattaaaactcatgggatctaattttaaaatatgctattctatttttatatatacaggatttattcagtcatcattcccatacatttaatggtatttatagtatcatagtccaacctgaaagctatggtagatttgaacagaattatccaatgaaccttcatattaaagaaatttcatgagttgttcttgatgacaaacagaccaaactaataagctaaggcagtggtagattattctattcatatctcattttataaactgatattaaatatactaaacatactgaaaatgttttcttaaagcctagaaagtagttattcatttcaaattatctcacattataaattcttttcaaattagttcaaattaaaagttcatttcaaattgcaaatgagttattcatttcaaactgaaatttatttcaattatacttagtgagcacccatgctgttaaatgtcattgtgcagaatccaaaaatgatagcatttttgcctaacatttaagtttttttcttttctttctatttgctaatagcatggtttgcctagaaataaatttctgatttcctatatcgctgatatgtgttttttaaaattaaagacattgacacctgagctttgtgtcttttctactattcaagagagaatacaaataagtatcaagagtctgaaactaaagtagctgcctaggaattactaaacaaattcttttgcacatgatctgatattttaaatcatacagaaatatcactggaatagtccccttcttagactggcagatttttgacctgacctcgcttaaccctgcttcttgtcttgtcttcctagactcagaacattcaatcccaactactttttcttgctgctcatctaacaattttaatttctcaacttacaggtcacaaggaagtcttaataaaatagcaagtatgtgctaacatttatttagtaccttgtgccttaaagtattccaggaactttatgtgtactaaatcatttagtcatcaaaataactgtatattattcttttcattttatagatgatggaaccaacacagagaaaataggtcagaaagggttatgtcagaaaaacagaatactctctaggtggtgttggggccgagaaaccaatatcccaaatatggcactctgacatgctgaactaaagaagaaacctcaatgtctctgtgaccactcccttcccccatctctcattctctgtgtcttccaaagcacagaatgaagttgttctctgaagtttccttctctctctaaagtctggacccacataagaagaaaaaaaaaccctatgaacccttttctgagttttcatgaactgaattcatatcacagaaagacaggctgaagtttgtcaacacacttgaacagacatatatcccaagccattgtcttctctgtggacccaacaggctttgtactggccattgtacatgctctaagtccactgacttcctctaaaaatcattttctatccccttaaaaatatcgatacttcctggactcccttttccctaagagcaagggtatataactctctggacctcatatggttgggaagtaatcgctgtgattttcctctgtgtgtagtgatacaaattcgtatgcctttttaaaattaatttgatttttgtcagttgattttcagccaaccttcaaaagatgaaggggaaggtttccctttacccctacagtggttaaaacaaggaatatctatccaaagaatttgttatataggcaatgcagagctgaaaagccgaacaaggggagtgagttaagccagagtttagcaacatcaaaaaggcattactacccttaatttggagagagaagtgaggatgcacagcttctaaatctcagggacctacctcacctcactggggagacctagaatcaggcaagggcagtctggtgagatgggaaaccatccaagagatacatacagcccaaagagatgccatcagaggagagggaggagaaagagaaatagcctggctataccctttctcttgccctccagtacctttcctttgcctgttagccaaatctgtttcaaacccatctgacttacgagcgtgaaacatgcagggatagtcctctctgtgatttacagcagaacaacagacgctcaaggaatcaatctcgtagcaaataggaactaaggcttaagtaacttgcccacgatcacagagctagaagtccctgggttgttcttcagggatcatgtgcgctgaacatgggagataggtcttggaaagtgacattagtcacattctgacatgtggttttctctgcccatatatatcataggataatttcagggaaatgtgtgcccaccaatatggtgggagagactttgtcttttgagtataggtgaatggactaaaaagtgatgagaaaaggtctgaggcctccaagccattttcagtgtgcaagtataacttcgggcctgttcaaggtaagtgaaagcaagtgatgcaggcaagaaataacacacttttgcactggctctccgttgataaattctagctgtttctccatagtccttactttctaggtggaccttgcaaagcacattagactagattgcttttcaatgcacaaaacttgtttcccccaaaatgattctaattggaagtgccaatactggcagaaaatgtgtgcaggtactagcctttaaagtgctaatgcatctcttaccaatctacgaagttacaggatggggcatgaaaaaatatatttgacggcacaaaagtatgaagcataggattaagtaaagcagattgaatatgactgttacgggctgaattttgtctctctaaaattcataacctctctaaaaagtcctaacccctagcacttcagaatgtaactgtatttgaaaacaaagtctttaaaggggttattaagttaaaatgatgccatctgggtgcggctgaaatcaagtatgatttatgtcctcagcagaagatgaagagatactgtgggcacacacggaccatggaaagaggcagtgagagggtggccatctgcaaggcaaacagagagggtgcaggagaaatcaaccctgctggcaccttaatcttgaattcccagtgtccagagctgtgaaaaaatacatttctgtatttttaagacacccaatctgtggcattttgttatggcagaacagacaactaatacaataccaaagaagcaacatctagaatccctcaaaatgtgaggcactattgagggctggagaaactaataatgacacattttgtcatatagaataatatggctgggctgccaggaccacaaagctatccacttggaatgagaagttagagttagatgtgcaccacaaaagcacaaatacatttgttttctccccttcatggctgcccacttaattcaataagcattttattgtgcatgtattaggcaggcagtactcttgcaggttgtaatctatgaacacctgattgctaaatagtaccattatgacatcatagaagactcctctttaaatgattgcttattgttttctttttgctcttttacatggagtcttgctctgtcaccctggctggagtgcaatggcacatctcggctcactgcaacatccgactcctaggttcaagcaattctccctgcctcaggctccgagtagctgggattacaggtgcctgccaccacatccggctaatttttgtattttttagtggagacagtgttttgccatgttggccaggctgggcttgaacccctgacctgaggtgatccgcccaccttggcctcccaaagtgctgggattacagaggggagccaccgtgcccagcctgcttattgttttcttattggtggaaataaaattatcccagaatgccaacactcctaaaggaggaaaataattcagatcctcattgcagtagatttaaaaccactcttttgtaatggaaattgtctaaatctgctccatggattcaacaattctttgctgacatgcctgtaatccaggtagctacttcagaggctgaggcaggaggatcccttgagaccaggagctcaacaccagctaggggggaaacaaagaaaagtcctacaaatgtgttttggcaatatggtaaacttttggtatccggaaatggatttttaacccctttctaaagatacctaaggcggaagaataccaattttcttagttgacatataaaatacaatactgagtattgctagaaataacgttttgacccaaaacagaaaaatagtcttgcagtttgtctttgtctattttatgctgctacaacataatacctatgaatgggtaattgataatgatcagaaatttgttggctcacagttctggaggcagggaaggtcaagatggatgggccgtcatttggtgaaggccttcctcctgtatcattgcatggtggaagagctaagagaaggggagaaagagagagagggaaggaaaggaaaagggaaagaggcaagaaggagccaaactcgtccttttataaggaaactgtccttttgatagggactgcacatttgtgatagcaccattaattaattcatgaggtcagagctctcataactgaatcacctcttattagggcccacctccacactgttgcattggggattaagtttccatcacaccgtttttggggggatacattcaaaccacagcattgttacacacaaaatatttcatattatatgaaatatgtcacttaacatttttacctgaatgtcaacaacatagagtaatgcagcagtttagaagttattaaataatatcttgaggatatataattccgacacacatgcatattaaagctgactcatacaacacaattgtcacggcgcaaatttaaaaaatgagttaggaaatcccagcgatgggttttgtgtgccaatttatctcaattgctcaaatttctctaattattcatcccaattgtaagccttctaaaaaggaatgcctatgaggaaacttgaaattttcttctcaatgttcttcagtacaacagttaaaaatatttaaagaaatgctgagtaagtaggaaaccctcagaagtaagctgaaaatgaacagtctcagtgggcaaataggtctaccatataaaagctctatttgatgattatctattgtaagatcatctttttttttctgtatggaagtaacaaatttaactcagagaaaagttgtattgccaaattcttgaaattaaaccttagtatctggcaacatttttcctcccatggtactagattactagatttttatgttaaatttaattttcttgaattcaaatgtatgagcttgatttctaaaaaacaaacaaacaaaccaaaaaaccaaaaccctcatatggagaaacatgaagttagcatataaacaagaaaagaagaaactttgatctataaatgaagaaaaatgggttttgataagctctctttgacaggtcaccctccttgggcttcagagttataaaaaaatcgatacgtgagattagagatgtgacagtatttctaaatttctgtttccaaccgtttcatgacttttcatttcctctagaaaagacataggatattaatataataagatttgcaatttgttaaatatcaaatgagtcaacaaatatgaagcttcaaggaaaaggtgacaacaggtggtacaagacatctgagctgcagaacaaagatggttgtaaagtgcacagaactgttacaaagccttaagagctactataatccatgattattaaataacaccacatactatttcaattagcatttgccaagcttgctttccttgtcattggattaaaaattatacccggattttcaagtgtattctatttgtgacaatatgcattgataatttctctcctcacactgctgcactctcacctccgttcccagattagctcctggaactcgagatatttttgtggctagagattgctttcttaatgttagattttccttacaattccatatatagtcaagcattccatgcatggtagttaattgtttgcttaatttggcaactgggatattagaattatgtatcattaggcagtgatatttttgtaaggttgtttgctagatagatcctatttcatttatattaagtcttgggaagataaactttatttttccagagcctagcagtgactgacacatattcgaatgaatgaaggtagatagaaaatgtctatattcatttacgtaatgattagttaaggagaaaagtacttcccagcataaagatttctggcaaccctttgcttatttgacttttcccttcaggcaagttcaaggcttgtgaaattcctagaaaggcgaggggagagaacgcgtgacacagaaaggggccggagttcgggaccctacgcagttttgggacgttatgggcatggagggaaatgtttgctttggaggctttgggtaagctagggatccgacaagccctgggcgcagggaggaacgctgccctccggcctccagtcgcgctccccgaagcccagcgccagcgtcgcgcaacctgccgcaggggcggctcccgggccaggcagccaggcgcgccctcgccccacccgggaacgccaggcccgcgcagggaggggcggggctccatggcggccccgccccgccgcccggagggtcacaatgtagggttagggcggccggcgggcggggctctgcgggggaggagccgccgggcgggggcggggatggcgcgtgggggaggggagggaggaggactcgcggagggaggaggacaacgccattccgggcggccgctccctccgtcccctctctcccttccccaaagcagcccgcggaccggcagcaaaggaacgtgcgaacgcgtgacgccgcccgactggctcgcgctctcccgtgccccggcgtcctccgcccgctcatggcccgggccgccgcggacgagcggcgctgaggcgggccgcgtggagacgtgaggcggccgccgtggccctcacagtcggcgtttcgccgcctgcccgcggtgcccgcgcacgccggccgccatcgccttcgcgcctggctggcgggggcgctgtcctcccaggccgtccgcgccgctccctggagctcggcggagcgcggcagccagggccggcggaggcgcgaggagccgggcgccaccgccgccgccgccgccgccgccgcgggggccatgaccgtggagcagaacgtgctgcagcagagcgcggcgcagaaggtgaggcgagtccgccagccggcgggccccacttctccttccgacgggctgtcctctcccgctgcggccgggcgccccggcctcgccgccgccgccttcccgggcttcctccccggtcacccccggcccctgcccatcgcctcgggggcgtcgcgcccagagcccagctgcgtgtgggaagcagagtgtagtttgcgggcttcaatccacttccttctgccgattgttttcccgtagcagacggtgccaggtattgagagcgaccctcacattcctacagtgctctgtgtggcatcttaatgaaactttattctctccccttaaatgagaaagaatagctagttgtcatcctttctgaaccgattttgtctttcaaaggtagtagtgtaccaggcctgctattttgcaaaacggtctccaccaaaatcgaattacctgcctcgcggggcaggcgtgttgaccaggtggactctagaagtaggtggtttgcttggtttcttttccttttaaggtttccctttcttcttcttcttttctgtttttttttttttttttttttttttcaatatagaaactgtccctaagagaggaaacctttctggccatgttattccaggaatcttttgtcccctaagtttgaccttgttctttcgttcaccctttactcttgcatcagtcacacattcaaatggtcactcactaaagaaaacaattaaaaaactgtttgtgaaactttatatctttaaagtgaatagagatcattctgctattttagattttgctttcagaatcttaagtgcactatcatggcttgcaccatgttctgaagagtagttggccatgatttaacttctttttttaatttttaatttgcgtgaaaagcattttgggcaaaagagtaaaccgtgccttagttgtgttggtattacggggacagttagggtttactgtgatcaaccaccagagttatgtttggtttatctgggtgagtaatgaatgccccaccctgttgtagatttggtgtagattgcaatattctacctgtgcttgactttagaataagacctgttctaaaatgggctgtctacatacagcctgctaaatttttgctttgagattatttttagaattttatgatactgctttaaagtaatcgaagatactcaagtttggaaagcaaggatagtgcattgttattttaggcacgttgggaaagttgtttttgagacttgtatgttagttgatattattggtaaagttagaaggatattgcacactgcactttatttacagtgaaataattcaagatttaataatgagaatttaaaagagtttccttcctaatcctccctattctattttgaataccttcaagttcaatttttaaagacttaaggcttaggaaagagcacatggtcatgtgaacgctaagcaatatttaatatgtatggtaccatttgtttataattgtcttcagtgttgaatattaaagtctgtttcaaagtgagaaataccaatttttcacttcctaagtttgaacaatgggaagaactttgtaagtttaggatttttttattttcatttgattttgactaaactgtattaaataactatgcaggctctattgtatggttcagaggttatgcataaaattgtagaatcaagaatcaagttaacgaaagtgatcttggctgtcgagtccaatttcctactttaatgaatcccctccacacacaaagggagtagtagttaattcaaaatattatcattatgatgctacttttagtatggctgtgttttagatcatttcattgttattggggattttttttagagaaacttttatacttccataatatttagattgttttacagaagaaacacttaaatgtgtttgctttccgtattaatacacgattactttgttactcatattagaactatttaaaaatatttatatggatacaagtaaaccatctacctcgataagttgacagatttaaatccgtcaagctagtaaccaggaagcggacttaaagctggtaactaggaagtgaacttcacacttagaagaaacaaaagtgaaagtctgtttttactcagacactttatgggttatctaaaaggagaggtgtgtagtgtatattgcatagccaacattttagccagttttcttctcaccttaaaaaactgtgtgtacatatgtgtttttaaattttaagtatttactatttaaaatttaagtatttactatttagctatattattttcaagatttttaaaacttttattttgcagatggatgtaagtttttttgttgtttgcagcaccacactacacaaaactttcatgattttttggttcgcctatagaattcattagtctttgtcacaatgtagtatgatgaggcaagaggctgcctttcccttttgatgtgttctttgcttgattgctggagtttggccaacccagggacttatgagatgtagtaaaactgcagaaagctgcttttctgaggtttaggtatttcaggtgaggtgcagttggcagcagatgagttaaattctgtgataattttggttttggacatatatcttcagcctttgtgcttcatgtttaccaaagtgtaggagccttagatctcagaaatttgatacatagattcaagttccaaatgaggatactccacggcgccccccccccccccccccaatctatctaacccgatgaaccaagctaggattctttagggcagttattattgggaggagttttgctcccagggaccaaattaatttacagagtgaaatgaacaggatactatttaattaaatgtatccttctgagttgaataaaatatattgtttcactctagggcttagaacagttctttacacatagtaggactcagcaaatatgtgatgaatgaaataagtgactggtttccaaaaggagtgtagtactttgtttcctaactgaatcttggaatttaaaaattattgagaaacaatgaggctgggcatggtggctcatgctttaatcccagcactttgggaggctgaggtgggaggatcacttgaagccaggagttcaaaaccagcctgggcaacaaaatgacacctgccaggagtggtgtctcaagcctgtaatcccagtactttgggaaggtgaggcaggcggatcacgaggtcaggagttcgagaccagcctgaccaacatggtgaaacccagtctctactactaaaaatacaaaaattagccaggcgtggtggcacatgcctgtaatcccagctactcaggagactgaggcaggagaatcgcttgaactcgggaggcggaggttgcagtgagccgagatcgcgccattgcactccagcctgggcgacagagcaagactccatgtcaaaaaaacaaaaaaccaaaacaaaacaatgaaagcttgaaaaactgtgcgtgctcatgctaggagaataggcagtggtactgaaagacaggatgtgggatagatctcaaccacctttttgtcaccttgggcaagtcattaagtgcttctgaaggttctttcaaagcagtaatattagtatgttaacagtagtatgttaaggctttaaactttagcaacttctttagattagattgtttaatggtcctaagcaagtgttctgtatagggagaataaaaaagaaacagtatagaatggaagcagaggaatctaacagatctacagtcaactttcactgaattcctccaaagatgagggttaggtgggaaggttgtcatagattagccaagttcaagagttaaaacttgaaaaacaatgcagactggattcagggtaaatttcttacttaaaataacatgtattttccaatttaggattatctaaggttataaaactataccatgcagcatttgatagttaacattacttaaatcactttaaatgttacttaaaggaggcattctttattaggaatcagttgattatcttattattagtataagacttgatttgggcagagaggtttccagctgtttattccttttcttattctttccttttcacacctacttttgacttgtagactcacattgtatccagtcttttaaatgaattcacatcatttctaataaatattctgttgattttcttcaatattatatgtatacagtccatatcctttacaaatacttaatattctgacctctttcttgtcattatttttaccacttattactttaagatgacagaatgctactacaatttatgttagtttctattatatattgtttccttataatatggaaattttcttacattcctaagttttataaatgtttcaaaactagatttagatgttgactgtcatgtctttttctttgcagtgaatgatattttatgtcagtaacataagaaccatttgtacatacgatatatgaatatttactatataatccgtgtaaggcgctgtgctgagccttcttacaaacttttttcatttaatctttccaaccaccttatgaagtgagtgctatttttctcctttcttattgaagctgaagaaacagtattggagaactaaagcaacatttcatctctagtatgtattaagggttggataaactcaaaagtcatgtgatacacaagcccctgctcttaaccacaatgttgtatcgttttggctgtccttgaattcctgataaaaccccatttggtcatgttgctttactattttaaatatgtttctatatttaatataataaatttaaacctagaatttggtatacaattggccttctgtatccacaggttctgaatccatagattcaaccagctgtggattgaaaatattctggaaaaaaaaagcattgttgcatctgtactgaacatgtacagtctcattttggtcattattccctaacaatacagtataacaactatttatgtagcatttacattgtgttaggtattataagtaatctagaaatgatttaaagtatgctggaggatgtgtggatgtgtaagttacatgcaagtattataccattttatataagggactttgacattcgcagattttggcctctgggggtcctggaaccagttctccttggattctttaatgagattgcttacaaggtttggtgtgcccatgagggctattaagataaggttagctcataaaatgattagaaggctttctgtgttttcctgtgcttttggaattgtttagtgtaggattatgttgagtcattcaaaattggtggtgtatgatcttttttgatttgaaaaattagatagcgttcaactgaggtacttgttactttgaagatttggtgaacatgactgtatcagggctgagctgctcatttagagcaaattttaggtaaagtttccaaattttgcttattgtcttttaaattttctatcttttctagggtcaaattttaaatttttttagttctagaaaattctaaatttcatttaggtttctgtatttattggtctaaagttttgtcctaaatctgtgtgtgtgtgtgtgtatgtgtgtgtgtgtgtgtgtgtatgtatgtacatatatatatatgtatgtagacatgccattttttttatccctgcttgttttgtcgtcagtagtgtttgccagatgctgatcttatttcctgcttttttttttgagacggggttttgctctctcacccaagctggagtgcaatggtgcaatctcagctcactgcaacttctgcctcccaggttcaagcaattctcctgcctcagccttctgagtagctgggactacaggtgtacaccaccacgcccagctactttttgtaattttactagagagagggtttcatcgtgttggccaggctggtcttaaactcctgaccccgagtgatcagcctgccttgggctcccgaagtactgggcagtttctctttgtatttctaatggattcaatccaaacttgtgtttttgtcttttagaatttaaccatgcacatgtggtgataactgataaatttaatctttttattgtcatctgattatccatttattagtcttgttttctccattcagttttgatggatagaccaaattttcattgtatcaccacccccacccttgtctttaacgttttcttttcaattttggctcttttaattttaaacaaatatatttttataatataaaattttgataatataaaacattaatagcttttttcggtaacataaaaaattaacttttttctccacccatttgccccaaattaggtaagacattttagcatgttttttcttatggtattcctagttttgttgggataatatagaattgtaattctaggtgatgaattttcttagtgttgcagatgcattattagtagctagttttttttaattaactatttaattttaactgtgttttttggtctgttgtataatgctttttgatggtttgatgccactctgctttttttttttttccagataagttaactctctgtgttaccttgtaagattttactctttgtttttaagagttcagaaatttcacttgcgtgtgtttatgtatgtatctttttaatggtcctgcctaggatttttcgtctgaaatctgtgttctcaggaatttttcttccactcttttcctcatcttcatttaaaactacattatttggattttatacgtcacttatctttcttcctggcttcaaatgtttcttctctcccattttgtcctgtatgctgtggtaactttttagtttgattatctagattattatttttgtaatgccagttctgtatttactacccttatatgtggtcagatagtttacaaagagtttgtttttaataatatatatttttagtttggttctgaagtacacataattgaattaattttgccaattttctcatgatcagctcttcctgcaaatatattttcatttatttgttaaattgcttattttaaataataaacacacacgaaccccctatttaaaacaaaagctggaacttcgataataacctatatcccttatcctatccctttactttcatttgagtgtatcatcttgaatcctctgttcatcttcctgttgatttattgcatctatatcaatggctgaaggtattttttttaatgttagttgttttaacttaaaaattttaagaacttttccctgctacaatatctagaaggtagtcgtctgtatttttaaccaagagttttaaagttatatttgcaacattttatactctttttcatctgtgcttgagttttgtatatggtgcgaggtagggatacagttttattttcatcatatacagattgaatctctcatatccaaaatgcttgggaccagaagtgttttggattttggacttttttttttttcccttcagattttggaatatttgtattttgcttacctgggttgggtaaatatccgaaatttgaaaatctgaaatctgaaataagccagtgagcatttcctttcaacatcttgttggttctcagaaaatatggagttttcaaattgtggagcatttcttatttctggcttggagttttgggatgtgcaacctgtaaatgattttaaaaagttcttttgttatccttgctttattgaaaagttaatgctctcttctactgaattgataggccatctttgtcatatatgcaaaagtttaatgcaaaatttttttccctttccttgactttcatcattcattttgtgaatatcatcctgtgttcattgttgttgctttaaaataatctctcatactggaaaagaaagttctttgcctttgttcctttttttcagaagtaacacttgacttttccttagaaattttagaatgatcataccaagctctctcaaatcctctgtctttttgattaatttgattgaatctgtagatccatttgggattattaagatctttatgatacaggatgagcaggatatactatttttattaggtcgtgtttaatatctcttgtatggtttataatttaacacaaaactattgtacatcttttgtttcaggtagttgataatttctgataactgttatatggcagtgcttttaaaaatttgttattggtgtatgcaaatgcagtggtcttttgtatgttaattttatacctagccaccttgctaaatgtttctaataccttttccagagacaattttgtactttctgtgtaaaagatcatatcattaagggaggagaccacgcctcatattgtcttatgcccaatttctgccctcaaagaaagaaaaagtaaaaactaaaaggcagaaatgaaatccacaagcagacagcccagggccacaccctgggcctggtagttaaagatcgacccctgacctaatcagttatgttatctatagattacagacattgcacagacactgtgaaaatcccgatactgttttgttcagatctaattaccggtgcatgcagcccccagtcacataccccctgcttgctcatttgatcatgaccctctcacacgcaccctcttagagttgtgagcccttaaaagggacaggaattgctcaccccgggagctcggctcttgagacaggagtcttgctgatgcccccagccgaataaaccccttcctcctttaactcggttctgaggagttttgtctgcggctcgtcctgctacatcatgattaaaaagttttatgtataatttcagtttttgtgcctgtactttcattttttttcctgtactagcaaatacttccaataaatattgattagaagtgataacaatgagtatttttttgttcttgctgatctaaaaaggcagttacctacttttgtacctcatgcatttctgaaatatttacatgtgttagttgtgcagatttacaaagtaggttctgtttaactaaaagatattgtagtattttcagtcgtgatgcttgcaggtattttttctttgggtactggtgacctttgtttaagctttcaccctaggtatcctgggtgtggtggtggaggggtgctggtagtttgtcagtctcttctctgtcatcctaggaactgtgaagtcaggcagggcactttttttttgtattagtggccctcactaatttccttctccaggggccactccacaattgatttctgccctgatgtgcttagagtaaggtgtctacagggtctttcttcccctgacactggcataattttactctctaatgtcatagaattgctttaagcactgacctgcagcagtggcctgcctttttcctacaatataatcactgatttttgttatgtttgaaggaccaaatttggcttgtgaaagtgagtttaggaatgtcactatataatgtgagcaagtagatgatgtgaaagttgaatttataaaaggatgaggccttgcatttattttggcagactttaattaatttccaaggacatcatccttgtcatgacatcttgttttatgtatgtagtaagtaatttttcagtttttctcttttttgccccttgattaactctgcttcagtacagaccatctgctttatttttagtttttggttctctgaactgctggatattttaaatgcccagcaatattttccttagtcttgttactataggtttagatcagtttcgtataatatggtttttatggactgtcttaattatctgtagtgcttgctaaaagtgcagacttctgtgcctcaccctagacgtattgtttcaagatgttgagggttgggctaaagcctgcttaataagaatcgcagattattcttctgcacttaatgtttgaggatcactggttgaagttaattagtattcttaaaggtaaaagtgccttgagcactgtgtaaattgactgcaggggtcctttagggattgaattatcacaatacaccaaatttaatatggaagcagggtctttgaacggacattgtttttttttgtttcaggtgtttctctccatcagtgcagcaacatgtttccttgtagaggagctgtctcctccctcaggcttttctggccaacatctctatggaaacccaaagcttcaggtggctaggtgggatacttgcccctcttactcctggaggcacaaataagttgaatcgatggattaaggagttggaaagtgattgtacatgctaaagttgtaatcttcctgtttctttctggctgtttttttttttttttttttttttttttttttttggtatgtgcgtgtgtatttgtgtatgaataattcctataggatttttttgtgggggctaaccatagcatatgaaaacttatgtacaacttaaatatattaagattagtattctttgtacaattttagacatgaaatagaatatcttattgtcctggaaatttcctttgttcctcattcatactgtccctcttttctacaccaccccccacccccacactactgctatcttgacttttttcaagttaatgttatcgtggtatgatttacactgaaagtgtgtaatttgatgaatttggccatacagaacatttctgtcactccacaaaatttgtcctgtatcacctttctcattaattatcaacaccgtcattatttcaggcaactgttgatctgatttttattactgtagatcagttttggctgttctgggtcttcacatcgatttgtttataccaaattttttttttttctcgcatctgactgcttttgctcagcaaaaagcttttgagattcacccatgttttattgcatgtatcaatatgtttctttttactatggagtaatattatataaatattctcacatctgtgtattcatgtaccttttgatgtacttttttttttttttccagttttttgacccatatataatgttatgtgtacatttgtaagcaggtctttgagacgtatttctatttctcttgggcaaatacataggtgtagaattgttatagtactaaattgttatccaaattgattgtatcattgtacattctcattagcaatataggagaatttcaggtggtctacatttttgccaacacctggcatttttaatcttttatgttttagccatttggtgaatatgtggtgtacctcattgtggtagtaattgtatatttccctaatgactaatgattttggatgtctttcaagtgcttgttggccagtttgaggatgattttttttaacattgcttctcatacattatccagttttaacactcctacacgataggaatcacagtagctgcattcttccaagtcttaaaatggcaaaaatgtcagagatgtagctaaaggtagaacactccaggaccaagtgctaatatgttcacaaaacaaattgagattgcacaattttttttgtttgcttgtttaaactaacacctgataaaaaggtacattgctgaaaaatgggaactcatttcttcatcatgcctcaaagtaaatattaaatttatctctttaacaattaattgcacacatacatgagaaatctttatgatacatattttattacaccgtgtacaaaaataatttcacattttagttgggttggaagtttgaaaagaacatagtgcagttgcaggggtgggatgaactgtggtgaggtaagtaaattggacagaaattgggcagaaagatacttcctttttttttttttttaacagttttttatctgtctgaagacagggaagaagaggaatctgaattggaaaacccccactatatctgttgggtttttgttgttgctgttcagtctggaaatgggtggtgtgtggtgagaggtcattaggtcatcagggcagaattgtttgcagagctgggagctacatcctcacggaagtgggatagatgtgctggggaggggtgtgcagagaggagccaggaatgatgtaccattagtggccagggcttgttatggtaacaccaatgttgaaaccaactgtgcattcacatatacaaaagttttgtgtcttaattcatgccagaatacatgcataatcaaatgtctcagttaaggtggagctacagaaacactgggctgaatgaagttctggggttttctttgtcttcgtgtgaggcctctgggctgggtctgggtgtctgatcaagaatgccctgaagttttcccatggggctttggagaacggctttggagctgggcagagctgaggatgagcacagaagaaaggaaacgagaaatggtccactacctgaggtttaaaatcctcaatttttggagggaagaagtgacacaagattttatcggtgccacttcaccagcaagaaacctctaaggccagcagtgcctctgcccaggctttgcttacactcactgggctcgctctgcctgctcggcccagcagggtgctctcagctgatccccagcccagatcccacgaccactgccactccgtgctcagcccatggcgggactgggtataccgcatgtggcttccacagctggactccagcattcagatgaggggaacgtggtggaacccagaaactcggagacggcagcaaccgtggagccccaagggggtgtcatagcttctgcctggggagtcccgaggtctgagccaccagggaatgccacagccctctcttgttcctgccgctcacagctccctgaatgggggtgtgttagagcttgtttattcctgctgcgcatggctttgtgaatgggggtgtattatggttctagttcgaggggtcctgatgtttgggcccccagaggggtcgcggctcatcactcccatattccagcaattgggagtgtgtaacagctcttttcatgcccactgcccacagctccaggagccagccaggtgcgtgttacagccgttctttgttcccaccgtttggcgagttctgggtttttgtccagtgaccaagaataatgaggtacgtggacaccagagagtgaggaaggcagagaagaatgttattgagcaacagaaaagctcttgacaatgagaggggacgtgaagtggatagccctctgtgtgagggggccccaaaagctggtagccatctttgcagttgagtccagggtttttttaggtttggaatgaggagatgtgggctggaggtagccttggaaaaggcaacattcaattggtttaaaagcattattcggaaagaaccaattgggaaagagtaggcaaaaagaaaagttttcactccagctgtggactctatctatatctagaacaggcagcttggtaggctttaaactgtctttggtttgaaggtcaggtttcaccagggacctgtccctgcctgcctaggagttggtctactgtggcgcctgcctaggaattggtctactgtggcgcctgcctaggaatttgtctactgtccctgcctgcctgggaatttgtctactgtggctatcagaaacagctctgcgcaggcctcctggggtcagtggacactctctttaccaattttggtagcatcatgcagatttgcagaactggcttctaggcttcttcccaagtgaggcaggaattgaagtcacttagaacagtggaacttacagaactgacagtgtttccattcttgctgggtggcgccaggaggagagcaccagtgtacctgagcatgtcgaactgtagcagagtagctgaaagcagcatataagatgaccctggtcagctctgtggtttctatggtgtaaagtgggtaggggtttcaggcctttggggttacagagatcagagccactccctcaggtcatggggtcctgtgctaggaggtgtggtcctagggctgtgtgaacattggtggggtttgccattactttatttttgtccatcttggtgttggcttaggcaaaccttagggtctgcgtttttttgttgttgttgttatttttgagacaaaggtctcaccgtgtcacccaggctggagtgcagtggtgcaatctggctcactgcaacctctgcctcctgggttcaagtgattgtcatgcctcagcatcccacatagctgggactacaggtacacgccaccaggcctggctaatttttatgacggggttttgccatgttggccaggctggtcttgaactcctgacctcaagtgatcttcctgtctcggcctcctagggtctgcagttttgttgttgttgttgttttggggcagagcttcgttcttgttgcccaggctggagtgcagtggtgtgatctcagctcacggcagcccccacctcccaggttcaagcgattctcctgccccaacctcctgagtagctgggactacaggtgcctgccaccacacccgtctaatttttgtatttttactagagatggggttttccatgttgtccaggcgagtcttgaactcctgacctcaggtgatccacctgcctcagcctcccaaagtgctgggattacaggcgtgagccaccgcaccccgccgggtctgccgcttttgaatgaaagtaaatgctcttccaagcatttcttgcatgagcagaagagtgtgtagaattctctcggtttgctgtctaaagcaagagggctgactgaccactttagggccacggcctccatccccgccacttcccctcccttcccctcccttcccactccttcttttcctgagtgctgatgttgttctgccttaagcttctaagcaggggcatcttttatggtcggggggagggaggtgtgggaggcaggcaggggatgttgcaggagagctactgataacccagggcctctgtcttttccttattgaccatttttatgtcttctttttaacatgttaagattatttcccaatttcttagttgggttatcttcttgctgttgagttgtaggaattctttatattttggttgtcttttatcatgtatatgtaattacaaatactttctcccaatgtgtggcttgtatttgcattttcttaacagtttctttgaagttgaagtattttaatattgattgtttaatttacttttatggttagtactttaaccattttctttttctttttcttttctttttttttttttttttttgtgacggaatttcactcttattgcccaggctggagtgcaatggcatgatctcactcactgcagcctccgcctccctgggttcaagcgattcttctgcctcagcctcctgagtagctgggattacaggcatgcaccaccacgctcagctaatttttgtatttttagtagagacagggtttcaccatgttggccagcctggtctcgaactcgcgacctcaggtgatccgcccgcctcggtctcccaaagtgctgggattacaggcgtgagccaccacgcccggctgctttaaccattttcttgaaacttagtttgtaaattttttctccctgtgttttgttctagaagttttgccattttaggtttacgatccatttggaattcatttctgtgtgtgttctgaggtgtcactaagtcaaggttcatttattgcatgtggaatctagtcccagcacctacttttgaaaaagctgtcctttcatcattgaattatattggtacctttatggaaaattaattgatcatgtatgagtgggtttatttttgaactcagttcctttctatccttatgtggtgccgttctttcttgattactgtggctttgaaatgtgccttgaagtgggtgaatgtaaattcttcaactttgttcttgttagaaatttgttttggctattctagaattttttgtatttccatatacaattctgaggtactttgaacagttggacaaagagccttctggggtttctgagtaggattgtgttggatgtatggattctttctgactgtttggacatctttacagtattttagcctttcaatccaagaacacatatatttctccatttatttaggttttgttttttaacggtttaaaggtctttgcatatcttttgttacagttgacttttttgatgctattgtaagtggtattttttatttttatttttattttttttgagacgcagtctcactttcactgcaaccgccgcctcccaggttcaagcgattctcctgcctcagcctccctagtagctgggactacaggtgtgtgccaccacacccggctaattttttgtatttttagtagagatggagtttcactgtgttatagccaggatagtcttgatctctggacagcatgatccaccagcctcggcctcccaaagtgctgggattacagttgtgagccactgcaccctgccagtggtttttagtttttattccaattgttttttgctggtatatagaatgtggttgatttttctgtatgaagcttgtatctgcgactttgcgaaattcacttattctaataaatgtatttaccacttttattcattttaaaaattgtgctttttggggtattctctaaaatgtttaatagaagtggtaatgacagacatctttgtcttgttcccgattttgtatggaaagcagtcttttactactaagtatggttttagttgttgcacttcttattttgttaaaaatgtgttattgttaatttatacttctagatatactacagcttaaccattctacagttaaactatttgtttatatatctttttatatatttatggtccactgtgattcttttctgtgaaattgacatttgtttctcttgcctgttttttcttttgggctatttatctttttctttatgatttgaggtagttctttatggtttagatactacttttgtttttctatttacaatagtccacgtttactctcatggaatgtgttccaagacccccagtggatgcctgaaactgtggctagtattgaaccatttatagagtatattttgaaagagactacattcacataacatactgtatatgttttcaaaatatttgaaatagtataccatatatagtatggttcagtactatatagaatatagtatatatagttttttcttatctatatatacctgtgataaagtttaatttataaattaggcactatataactatatagtacatatagtttttttcctatatatagtatctacctgtgataaagtttaatttataaattaggtaatttataaattagtagagactaacaacaataactagtaatgaaatagaacaactatgataatataatgttgtgtgaatgtagtctttttcaaaatatccgataactgagatggctgctgactactaagtgggtagtatacacagtgtggatatgttggacaaagggaagattcatgttgtgggtggcatggagtgagatttcattatgcacagcactcagtcagaatagtgcacaatttaaaacatcgtttctggaacttttcatatttttggactacgcttgatcattggtaactgaaacttcaaaaagtgaaacgagataaggggaaactactgtatatgttttgcaaatattttctgttttcacgatgtctttttattctctttatgtactttcatgagtagacatttttatttttaatttagtttcatgtataattagcttcctttaatatttgaacttccatgtcctgtttcacaaagatagtctcatttattgccctctaagtgttttcttaatttgtcttcatgcagggtttaagtttcattccacttgggtttgatttttgcatgttgtttgagtagatgtcagaatttttcccctctggagaaccagcgactttattgaacagttcctccttcccattaatactctgcctgacaacagtatgtatactttttaaattcttcagttgggaccattgtaaagaaaaacaggtgtcaggaactttcgcccttgaattaaaaaatatatttttgagacagagtcttgctctcttgcccaggctggagtgcagtggcataatcatagcctgcttcagcctcaaactcctggacccacactatcctccctcctcagcctcccaagtagctgggactacaggtgtgtaccatccacccagctactttttagttttttttttttttttttttttttttgtagagatggggtctcgctctgtttcccaggctggtcttgaattcctggtgttaagcaaacctttcactttggccttccaaagcattggcattacaggcatgagccactgtgctcagccaaattaaaatatttttattatggttttactgaaacttgtttaaatataaactaggcatacatttattatgttctgttgggtagctcttatgtaataagatgaaaaaccaactactaacttaaaggtaaccaaaactacaaaactggagaaattcagaataaaaaggttagcttaatttgacagatggcagtgttttgcagaagctaatttggcatttgtggcttcaactaaggaaatcggtatatgtatttcaggatattgtaatatgttaagcttttggaagtaaattttatttctgttgtcaactatactgcatttctgacttgatacctaattaataaccattattgtagagtgagtggtatttttggtctttttattgtaaaactgtaacagatatgctctcaagtgtgtttttttttttaatttttttttcttaagctatagctcagtaaatgccgatatttccatgttgaactgaacaggttgtgtgatttaatgtagagcaggatacacttgctgtgaataagaggtaacaattatagcttacctataagttagcgccaaataaatattcatcagaacttgtgagtactttgccttgtgtacatatttgagtgcctgggcaatcaagagagtgacatactatgcagcgtgataactgcttttgtagacattgtgaaatagtattcttatactgaagtaataattgtattctaaatattgctttattgctagtatgtgtttctgcttatctgtgggaattttccaaggtttgtctttgattttctgatttctttgcaagctttacctttgagagattatatattttccgagtcatatatgttcattactatcaagtatgtgtattgaaaataagtgtaatgttacatcttcacataaattctagttttaggttttcaattgcatgtgtacatttctgcttagtcatcactcagtatcatgaccgttcatttatgtattctttgttttaagcagactgagaaatagataacatacaaaaagcttttaaattggtagtggctagagccagaggtgcacagataatattgaaagttaaataaagtatttgtaggtagaactaagaggatctaggaagactaggaaagatcttataaaggaggtaatagctgaaataaactgttgaagatttgtaggcaggtcgaagtgttattccaagtaaagagaagtctatgagcaagggacaaatcttcaatgatttagtgccttctgttatctacacatggttttatttggctgagtgtgatataataataaatatttggtctttttcccttgttcctggcatggagcccctaaagcctttggaatttactctctagtctgtgctaatcagatgagtggcgtgggtctgggtgtttggggaggagaggctgtgtagcttccacttcagggtgggtactctttaccactgtagttagagggtgagaactttcaaccccagtccagcatccggggagggaagaggggctgcagattgagcccaatcaccaatggccaatgatttaatcaattatactttaatgaaatctccagtgccgtgtgtgtgtgtgtgtgtgtgtgtgtgtgtatgtttttttttttttttttttttttccttgagacagagtctcactctgttgcccaggctggtgtgtaggagtgaagtggcacaatcttggttcactgcaacctccgtctccctggttcaagcaattcttctgtcagcctcctgagtaggctggactacaggtgcatgccaccgcgcctggctaatttttgtatttttagtagagatggagtttcaccatattggtcaggctggtcttgatctcctgacctcaggtgatccacccgcgaaaggctcccaaagtgctgggattacaggcatgaacaattgtgcccgaccccttatatccttttaataagtgttcagtaaatagtagttctatgataatgctcagcgtatatggttaactttttcccctaattctttttttttttgagatagagtctcgctctgtcgcctaggctggagtgccgtggcgtgatcacggctcactgcaagctccgcctcccaggttcacaccattctcctacctcagcctccccagtagctgggactacaggtgcccgccaccacgtccggctaattttttgtatttttagtagagatggggtttcaccgtgttagccaggatggtctcaatctcctgaccttgtgatccgtctgcctccgcctccgcctccgcctcccaaagtgcttggattacaggcatgagccaccgcgcctggccctttttttctcttaaaactgtagaattatattattaatacactgttagtatacagaaattgttttcaaggaatttgtttcagggtccagtgaggacaaagaaaggacaaaaagtagaacaaaggagatttggtgtaaagaagtattgactaggaacagatgattggctgctagagggtaaagagaactctaaagtaagaaatgaatttgggagaggcccttcagaagccccaagactctgagagattgggttcttgttggagaggttgtgaatggagcccactggatggcagagcagtttatagaagtgctgtagcttgggacattcctgccagtagctcttttgaagtggtgtagagtatgtgctttatcgtatctagatgaatggagtttccaagagaccataggacatattatataagtaattagcatgaccaaaaactgtatttgctttaaagaattgtgacaaatataactgctaggaattatatagtattccagtttcagagttctacttagagcacgtttattttgttttattagtataagggagtttatttttggattataagctaattaggcaaacaagtacagaaactagagatgcataaagatttaattggacaagagagctataataggaatctgattattagcatcaacaagttaaatacatattttatttaaactgcagacatagtgatttaaggatatgatttgattcataaaagttttgtttacctacttgttttccagaatataggcactctaatttaaaaacagactgtgttccaaaagattttgcaagttgggtttttggaactgaaaatacatgttcccatagaaaccatgtttcctggtggtgtgttcttatttagaaatgtaactctgtgtgaacttagcttatagtgctgagtaacagtattttttgggagaaatacatttagagtttctactcatgatgtatttattttatctactaattaatagggatggggaatactcttttacattgtaattaaaaaaattttttttaagacagagatttgctcttgttgcgcaggttggagtacaatggtgcaatctcagctcactgcaacctccgccttctgggttcaagctattctcctgcctcagcctcccgattacagggattacaggcatgcgccaccacgcctggctaattttgtatttttggtagagatggggtttcaccatgttggtcaggatggtctcgaactcctgacctcaggtgatctgcctgcctcggcctcgcaaagtgttgggattacaggcgtgagccactgcaccctttttttttgagatggagtcgctgttgcccaggctggagtgcagtggcgtgatctcgactcactgcaacctccacctcccgggttcaagcaattctcctgcctcagcctcctgagtagctgggactacaggcgcctgccaccatgcctggctaatttttgtatttttagtagagactgggtttcaccatattggccaggctggtctcgaactcctgaccttgtgatccacccatcttggcctcccaaagtgctgggattacaggcgtgagccactgcacctggcccagatggggaatactcttaagggtcataaacatgatgcagatatggttgaaaggttgggtgacaggtaggaaaaaggactctgtggcaagggaggatggaaaccatcatttatctaggactaactatatccattgttctttgctagctatttctcataaagtatctcatttcttttttctggattgcatgaatgcttaatgttttagctctggaattctataaaaagtaggaagagacttaaaatttagaattcttggcatttttaagctttaatggaaagggtataccttcagatttatgtgcccatagaggtatatgagtaatttattttaatgctaaagtgctgttaatccaaaaagattgagaaaaacttcaatctgtgacagtaggatatgcagcatacctgaaccatttgttacccgccaaaaacttgaaaaccaggattagttgcctggtgagtaataaacaactcttcaagagaatgcaggttttggtcagtaggagttttactacttgtcacaaataaggagaatacttggagtattctttagagcattgttgcctctagggaaagtgacagggaggttttatggggtgatggagaggggagagggtgtgacatcacatgtagaggaggggtcccagtggtgcaaatgcagtgagtcactatgtcagcaggtaggtcacgtgttatggtaatgaagctgtagttcccccccagggtgctgactttagcatgataatgaggaaagttcacttgggttcatctgcatgttgcgagggtctgtcaggagctggctccaactgactaggtgagagctcattcctcacagggtttgggaaaaaacaggtggcaaggtaggaggttgtaaacaggccagttacttaagttgattaaattcctatagtcccgggggaccctccttgtctgcttacacattcatgggactgtcatatagattatttgcaatagggaatttcagtaatattatattttatacaaaccttcaagtgagattgacaggaccagaactgggaaattctagatggaatgtaggagtgtagaaagtttgcttagtaagtgggcctgacttatgtcatttagaagaattcttcaatttagaagaattagaaaatgtgcttattagttggcctgatatatgtatgcttctcgttcctgtatgagagggaaaaaaaaaaaaaggcttctctttacctttctaagttctttggctggactagaaattaaattgacaagaggcagattaacaggagaaaacccattttaattacataggtacttacaggagtcccacaaaataagagacttgaagaagggtcacatgattgaagcttatgtagcatccagagctacaaaaagtgataggggtttggggcttctgggaggggtggcaacacaagttatgagagggtgggggaggaaatgtatggtgaataaagggtgtcttgtgtagataaaaagtcactcaagtaataaaagttgttgcaaccctcttgctgatacagatactttttctaatgtagatttcctttaaaaatggattttttttcacaaaaggacagtttttcaaggttactcttgtgtccgcagtttctcaaaataactacctcaaaatatgccaaagaagtatatttttgggtggcatattctagtcgcctgcagtcttatttggaggtggtgtgtcctgagccccagcattcccatctccaataattagttagtgcctcttttctgtgggataagcttgtcttgtgatatggcttgttccagctcacatctgcaggctctgctgtattcatttattcagtcaatgttgattgcttgccatgtgccaggcattatatgtatgtaccaggagtacagtgatgaacgaattatggtctcattgataactttgaaatgattaacatttggtgcctagcagtgctttagtgcacgtgcttctgaagtttaagagttcttgtcgtctttggatttaccttgtgattaaccatagtgtattattataatttgtggtgagtctcacagaaggcacctacatgtgcagagacctttgcattatgaaggagaatggtgttctgtagaccctgaatgaaagagagggaagaggaatgccagggggaaagcaaagcaagttagtgctggggacagaggtagggactctagcatgcagaggtcctttaagctgtgaggactatactataggaaaattcctcagacaagtcatagaatattacagttgagggaaatgaaagatccggcttacacattaacaagaaaaacatgactcaggagattttttcttcttctttgctttctggctatttagagactggtttggacttacaaacatgaaggatgtgttatgtacttgaaattcttggacagtgagtattagaggtttcttatggtaagagaacatgagctagagcagtgtagtgttagcaggtagatgcagaggtttttgcaaaatcaggtgtgtgtgtgattactcactttaaagacagtataatgaattaatcttgtcattgacaggtaactttgaaatgcctacatttggtgcttagcagtgcgtgtgattctgaagtttaagaatgtctttggagtttctatcagttttttttttttcctctgttcttagaaaatttggaaggtttttttagaggtcattctaagagttgcgccccccgccttacacctatccccaaggatggaaacctttgactttcttttcctgaaccaagtttcatttatatttggaaatttagctgaaggagccaaggactgacttaatgagtcacccaccgcttaacacaaactgtttttctcctttgttgtcagtggtgctttagttttcttttaccattttataagtattttacatcaacataatagtggatttttgcactgagttttcattttttattgaatctttaatctccaatgttagatatcctagagttgagaaaatatggcaaggacatggaatttgaacgaccaagtttcaaccctgtctctgcacttactaatgtcttgaagtctgtgttagctatgaaatgagagtaactttctagagggtgtgtgggtatgtctgtattaaatgagagtatatattggaaacattggaaacagtctggtatagggaagtttaaaccttcactctgaaagttcgattaattgagtgctgaaataaactgacagtaaacagattagcaagagaaagtgcatacaaatttattgacatggaagcatgggtgggagctacaaaaaaaatatgaggctctaaaaagggccagatgattgaagcctgaatcccctcttcataaagggagaagtggaggatgcaggcaattttagaggaagagtaaatgatttcaaggggagatgagtgtgcctgaagagcagacaatgacctggaacaaaattcttccgggctctgggagagatggtggcaattttttgggaaggtgaggggcagaactgtactgcaaacaaaagttgtctttgttatatagataaagtctctgaggtaagaaatagcccttagaagaatagtcaaaagaataggtgaaaagtctgtctgggtatggtatgcccaggtgcatggcaatttttagttttctttcctgctataggagttaatcttctctggtttatatagattccagggaattatccaagacaatttcgttccttctggatgaacgtccctcagtcagataagggaacttcagagaaaacctctccctgtgctttggaagggaaaacggggaggcaggagaatgttggagagagaccttgcttctgagtcctttcaattgcttttgttcagagcactcagcaagccagaatgccatactttggggcattgttttcgtaacctcaacattgatatacagcaagagtataataaattcatattttcttgccttgtcttgggccagtgatccctttttttgcatcctcaaaaagttatactgatgttaaatatgccctctttactgaaacagattttaaaaatacccagcattaagtggggtcacctgagaagggaaagaatttctatgaaactctcaggtttttaatttatattgaaattaccaatatttccttatatctgaagtgcatagtactgtattttgcacatagtagacacttaaggatgttattgtgcagtaaaaataacaggaaggaatctgaagacttgtaggtaatcttgacttctttgcttattaatttttgtggtgtttgcaagtaactgaatctctttggacgttgcatcttgcccctttggtttagcagtgggaagaggttgaacccacctccctgtacttaactagagaaaaaaaatccatacaaggagcatctcagagcccagaagaggagctctagatatggaagtggattggatgggaaccaccttggatttggaattgctggtcagggagaggaccatatttaggacatttccagttgaggatcagggcgtatcacaggtcagaagtttcataaatgggaaggtacaaaccttgaaaaacagactagggtcttaatcacaacagaaatggcaacaaaacccccacataattgcaggaaatgaaggttcagggtttcaaatacaggaaaaacacaactggaagatgccagtaacaaagggaaaaaaactttgcaaatgaggtggcttctctaacttaaacttaggatttttctcattgctcacctcttcccatttctctctacctaggtttagctaagaaaattctttcactttttttgttttcttttccacctggccttctccccgatcaccagttcttttcattgtttcattttcagtcaagatttatgaaaacatgaaccatactagagatacacctgatttttttctaggatatttgtctgaatttatagtaaaagataaaacagcaaaataacagtttcaaagaccttgctcttctccataatatactcagtattcttattgcactttatcaaaccaccataacaaaccacctcaaaacccagtggcataccaaaatattgtcactcacactcacagatttgctggttggctgggttgacttttttcacatgtgcctcattcttcttaggcaagtgggctaccaagtcatgttcttcttaagcaggttgcagaagttcaactgggctagcccagcgatgcaggtagtttcatgtctgcttgcatgctggctgctaacatgccattggtcaaatcccatcatccatgacaaaaggaaatacatcatgtgtgaggaagtaaaagtggcaaagagtatgaatacagggatgggagaattgggaggctagcataggcagtgtaatcttttctgggatttatattcgtgtttgtattttactttgtggttattaatttgtgtatatactattttgtattctgctttagcgtaatgtgattttgtaaggaaaacttctgtatagattatatatttttcacttaaatagttgtatgtgtaactgagactctgcttctaagttgatctgcatcaaaatcatttgaagtgcttattaaaatgccgatccctagaccttaacccagaccctctggaatcaatctctggggatgaggcctggacatcttcattattagcaaactcatggagtcatccttctgtacattaaagtttgagaactactttcttaatggaaggacatgcatttgtattagtctgttctcacgctgctataaggacatacctgagactgagtgatatggttagcctttgtgtccccaaccaaatctcatcttgaattgtagttcccataatccccatgtgtcatgggagggaccaggtggaaataattgaatcatgggggcagtttcccccatcctgttctcatgatagtgaataagtgtcacaagatctgatgattttataaagagcagttcccctgaagatgctctcttgcctgccaccatgtaagatgtgcctttgcccctccttcaccttcagccgtgattgtgaggccttcccagccatgtggaaccatgattctgttaaatctctttcctttataaattacccagtgtattagtctgttctcatgctgctaataaagacatacctgggactgggtaatttataaagaaaaagatatttaatagactcacagttccacattgtcagaggcctgacaatcatggcagaagggaaaggagaagcaacggtgcatcttacatggtggcaggcaagagagcatgtgcaggggaactttccttcacaaaaccatcagatctcataacccttaactcactatcacaagaacagcatgggaaaaacccgcccccatgattcaattaccttctaccaggtccctcccatgacacatgaggattatgggagctacaactcaatgtgaaatttgggtggggacacagccatttttaaatttttataattaatggccatcaacatttgtacaaatgactgatttccttgggtactaagtaatttttctctgagccatgattgaataattttcagttgaggaaaataatactttatatatgaaatcagatttggagtgctggtagcagtgacattacagacttataaaaattataaaggattttatattaactaaatgaagacattgaattgaataaagataatttctgtaaaacttttatgcctttaattcgtaatgttgggtattgcatggcttattcatgattccattgctatttattagtaattttctaaatgaaagtagtataaaccaaaaagtatcttaagacaagtctcaatcaatttagaaagtttattttgccagggttaagtacgtgcctgtgacacagcctcaggatgtcctgacaacatgtgtctaaggtggttggggtacagcttgcttttatacattttaaggatacataatatatcagtcaattcatgtaagattcacattggttcaatctggaagggagggacaactcaaggtctggtcacagggtggcttccaggtcatcggtagatttgaatatattctgattggcaattggttgagttattatcaatagaaaggaatgtctgggttaagataaggagttgtggagacctaggttttatcatgcaaatgaagcctccaagttgcaggctttagagagagtagactgataatgtttcttaccagacttaaggtctgtgtttatgttaatgctggagaggtatactgaggcatgtctaccccccacttccagtcatggcctgaaccagtctttcaggttaaattttagagtgccttgaagcttcagattttgtttttggtttacggtataaaaactgataggtttaaagataattttatttttctcaattcggctctgtaaatttggcagtttattcatccattttgatacttcctggcattttatatgactttgtttgtgtactttattatgtattttatttttaggtagcttggttatctcagctctgtaaaaccatttttatggaagtgaaattctttggtggcatggcagacactgccaatgcctatccaatgaacattcttttctttttgatagcagaaccctgatttcattttcacagcagcctttgcccacccaaaaaattcatttcccaatctcctttgcagctatgagtggccatgcaactgtgttgtgctttgtgaggcttttgtaagtggaagtttgtaggtggggcttgttaaagaagtctcattcatttgggagacaccttttgtcctttgcccttctctttatcctacctagaacttggacaggatgatggaggaggagaccatgcagtgacaaacattctgatgcatgttccactttaaagacttgatgttgggtgtccctactaggtctggactgcccattgtgtcttctaagttagaaaagaaagacactccagagtattgaagctgctgtttagttgggaatctgttacatgtagctgaatatagtttctatctaatacatatgatttctgtaaaagatacttgggctgcaatatctcttaaacctttcatgtaatttgtttaggactttttagacttctgaaaatacatattttatacataaattgtcaagcatgttttgaaatgcacattttacaatttgatgtcaacaaagctgaatgcagaacattttaaaactttttattttgaaatttcaaatttaaagttgcaagacttagtacacagaacttccataactttttttctccccaaaccatttgatagtaagttgcaggcatcatgcccctttagcacttaaattcttcaggatatatttcctaataaaaaagatactctcttactatactggagttatcaaattcaagaatttaatattaatgaaatgtcattactaagctgtgcatatttatatttctccggttgtctcaatatcctgcataacatttggtatgggatgcagtcagttccccctttggctcacatgcttctttagtctcctttagggtggagacttcacctgcttttcatggcatagacatttttgaagatgatagaataattatttttcacagtgtccttcagtttgggtttgtgtgatgcttcctcaagattagatttcggttgtgcattttcggcagggctatctcacagattatagagtgtcaggaggcacgcactgccattttatcctattattggtaatactaactttgatctcttggttaaggcagtgactgtcagggtttacactgttgttacagtaggtagctagtcagacatgagcagggcagaagggggcctcccccccaggaatgtcaggcaaccattaggcggtggtcaggctgttattaaccatctctctgaaataataattggtcgcagccggtgccagggaaaggcagtctcccaatagatagaaacacctgaaactggtgattagcaacttcctgataagattccaggatttgagtgaatgggctcaagcatatatgcactaagaggcaaaacggtggagtttaactgacatatgacctttgtttaggaacacccaactggtaagggaaaaacgccttaagtgagcacatgcacaatttcagtaaacacactgtgcgtgcagcccctccccagtgctggcaggccactgcacctgtggacagccatcctgtaggaagaatcaggggagaagaaatgcaaaccctggaagcatgccagtgtataaaaccccaagtcaaaggtcagctgttcacttgatctttcaagttgcccgcttggcccccttccaagtgtactttacttcctttcattcctgctctaaagctttttaataaactttcactcctgctctaaaaacttgccttgatgtctctctctgccctatgcgccttggtcaaattccttctgaggaagcaggaagtgagcttgctgtagacctgtacgggttcgccactgttaacacaataaagttattctttctccctttataatttgtggaagagaatttaaaatgatgtaaatattctgttcctgatcaaactttcattcagtagttttatcatccattgaagattcctgactgaattattgctgagataaatgtgaaacatctttttaaaaaagatttcaatagatcctattctattgactaggtttgcttttcctatcatatccattgtgattttttatttcatggtactgttctatagtgttgggaacttcaagaaatacagagatgtaaggaggaagttggtttttatttaagggccatcaggggagagtttgatagtgaaatcctatctctctacctcttttcccttccagtacaatgcagtcaattttataggccaatagcatataaagaactgaagcaaatgggggcaaatgatctattcaatttagaatcttttatgacagattggacagtgaaatgatcttctttttaaagtagatctgaagatctccgtggtataattacccaccgagttatgtcttgccgaaagcatgtcttttccaaaggtgtttctctccttgtgcttaccatcatggataaggccccttttcttgttaggtggcataaatgaggggatgaagaaaaggacagaaactgctaattcagtaagacttattggggagtaatgtagagaagttaccttttcgaaacgtgagaatgaaataagggttctccacagcatgattcattctttctaaaagaatgaagttgtttggcctttctcaagttctttttccttttttactctagtttactttattctgttttttgtttgttttggaaaaccaaaggtgatttgttttcttttcctagtatattttcagagttgagaatataatgattttgggtttttcctccctctagcaccagcagacgtttttgaatcaactgagagaaattacggggattaatgacacccagatactacagcaagccttgaaggtatggcctctgttttatgatatacagtttgtggtatatgctcatctctagtgcgtattatatttgatagttgattttttttttggggtataccatgtggtagttttagagatacaggaatggactttgtaaagtaaaatcctcagttaacacactgcggttttgaggatgttagctttcagcagtctgatgtccatgataccttagagtgacagataacctctttctatatatgaaatgctttttgtgcaagatagtgggatgtgaatcctaattctaatggatggttttacttacgagctgtgattttagagtttaaatgagggttcaaggtggggtgtattagaggatgaggtgtaagagaagggaaaagtagaaaattaatagaagtctgaaaacttacatttttcttctcctgagaagcagagatataaatttgcacccattcagctaattacaccctaagttaaacattcgatttcaaactcttcagtataggcaacaactaaaatgtatcattttggtcatatcttagttggaccttcagtttcacatcgacatccaaatgagtcatatcatatggatactcacattgaaaaagagtgaatgaaagctatttaagaaccagaactgtacagtattttaagcttatttgcatattactactataggctaaaaacaatatagcatttttgccactgcagtcatatacacagctccaatcctttggaacttgatttcaagcctagagttctttatttgtttttagaaataatctattagatgattataataaaagtcattataacaataagtagtaccgattaaacatttagtactaccaggcagtattttaagtactgtatgtgggctagctcatcctaataataaataactctatgagataagtattagtttcatcccctttatgaaaagatgagcaacagagaggttaaagtaacttgcccaggatcacacagcctgtatgtggagaagcttggaatagaaaccaaggcagcctgatcccaggtgccacacttaatttatgcttcttttactagaagctttgcttcaccttattcccccatcaggaaaatcatgaaatagtagtgtttagagcattaatgcggggtgtatgaagccactgtaagtatttggagaggaagcagaagtgctatacctcaatttttatgattatgacgtttagataattgctagtccctttttattctgataaatatcattactaaattccatgtttgttttcagaaactgcctttttcattatgtattactgagtgtgagaccatagcctatcaccttgccagggtaaatttggggaatttgcttttttttttttttttaaacttagaaaatatgtagctcgaatgaagtcttatccacatttcctttgatagaggttgtgtgagcataggtatttttaattttccaaaatttttgtttcagttaccagtagctaggggaaaagagtgtatttaaaccttaattgttgcccattataaatactgacgagaagtctacttttgagcactgtaatgtcattgattaatttcagtacttttaatttgagaacatatttttagctctaaaaagtaaatgaacttcaatttgtgtaaattcctgctgtgttgttttaaattattatatgaggtaatatatgaaaaacacttagcacatttcttggcatatagtaagtgctcaataaatgttagccatcattattgcgctttattttattgttagattacttatttaacaatagtgtatcttacattttggatgagtcacttaggaatcgtctaatgatcatgacagatagcatttttgaaagtggtggtgcctttgaaactgcatccttactccttttgtcactgactgctacaactggaattggggtaggtcttggggactttattctgccagctgctcagtccttaaattttggaatcatcctgatcctacttctgtcatgtcccacatttaataagatagcaataatattggatgctgtcttctgccctttctctcctctagtctattcttaatacatggagtaaactttttaaaatgtaagtcatactatgtcattcctttccaaaacactccactggcttcttattacacccgtgtgcatgtctaagttcttagggaacctacagagccttccatgttttggttttctgttacaaagatagcttcgttgtgaatatctgggtttcctatgttgttttggttaactgttttagagctaacgttttacttgctgtcagttgtgcagagaatataaagatgtaactgggcaagtctcttctcattttgctgttttaaattaaaattcttattctggcatctgctttcttctaaataaactttagaataattttattcagctatacttttgatgagaactatgcaaaatgtatctatttaatttgagcaggattgtcatcttgacagtattgagtatttctgtctagagttctatgtgtctttccataattccatattatcaagcccttcagtacattttgccattttcttcccatgagtccttgacattttgcttaagtttgcccctaagtatgtatccagcacccagattaaaaggaatatcttttattgtccttgtttgtagaagtactaattttaatacccattttgcactctttcgtatggcaagttccagaagaccttttttagtttatttgttcaaaagtataagtttgtgattcacttttattaagcagataggaaagtaatgaagactaagaaattagagatggatttttacattgtatcagtagttttaattagtaagaaaggtattactattgatatagtatactttatgtatgatgcatttacactataaaattagaatcacatatagattaattgcaaatttaaagcaattttgttctagagagttatggagaatattgtataactttttttgatggataaaattatttcaaaacacttgatactcctttcttgatatttgaaggatagtaatggaaacttggaattagcagtggctttccttactgcgaagaatgctaagacccctcagcaggaggagacaacttactaccaaacagcacttcctggcaatgatagatacatcagtgtgggaagccaagcagatacaagtaagttttctttcttttcttattattttaatagaaacatactgaaaaacttttcttggtgtaatatattaatgttgcttaaggagaggtaaagaaccaaaaaagaactctattaaccttggttctttttaatgtagttgaaaggaacatacattatctttttcagattataaggaaaagattttatgtaagttatatagtttttcatagagcatttcatatagaatttattgttttgaaatatggaatagctgcagatatattcataaaaggaagaactagaatttttagtgggcacagttattttgcagattttaagtgctggtagaggctttagtatttcttttgaggttaaagtattatttctaattactgataggtttaccatttaataaaatttcccttccctttccccctgcttccaaataaagctttggcaaagaagtttattattgtgtaatgaaattgcctttcatccaaaagaaaaaaagaaaagaaaacttggaaaaagtgttttggagatacaaatacgtacatgtggaagattctatgtgggacttaagtttttcttcataatatgaatactttatacttatgtagcgcacagtttttcaaactatgttcagttaccttcatatctcattatagtttaataattgtactacataaaaatagttacttttatgccttatggatttgcaaagtttgattattaacatatatttggagagaatttcttattttgtttatagacattctcaaagttaggaagcaaccagaaaagagttcgtttacatagatgtttattaatgtttattgataaaatattttaatttttagttttcaggataatcttagcatttttgctacatagatgatcttgtgtcagagaaaactagaatactcctgtctcacttagttaataggtgatgggagaatgtttgtagcatatataagatagacctgtttacttaacgtctaagttcaaggcaagctgtgactgggcccccatccacatttctagcctcattttccactgttttcctcctgtcattcaacactgtgataatacagaatggcttgaagttctcatgtactcagtggtatttaatttctctgtctttacatttgctgttccttctgtttgaatgcactctggccttttcctccctagcctaatttgttctggtcttgaaagatttagctaaagagctgcttgctggagaatgtttttcctggcctctagctaggaccaagtgtttctccagcatccagggcatgcttctgtcttaatgaatactctgttattttgaaattatttgcttgaacattattggtgctcaaaaaatgttcactgagttatgtttgataatatgtgcagtaaagctctttcaaaaccaatgaaagggaatgaagttgagaagcttgttgcaaaaagttgaaagagaagtggtataaaggtcagaaaaatgagtacttaataatattttggatatttcaaagttccaagactcgaggggaaaaagaaactagatgggtgataaaagggaaaaggataattttgactaaaatgctcctggtttaagtgaagcaagcaggaaattgactaaacagagatcattgttgttagttgtgaactcttaatatagatggtatacttggtgacatgacatggtatatttatagaaaaggggaaaattaggattatgtgtgtcctgcacaaaagaagatatttgctgtgcaaagtgagaaaatactgcataaggcaaatggttacacctgtttacgattttagatagggaatagtgaaaatattatggaggacaaaaaaaaattttgaataggttcccttagggagaaggcagcctaatttcaggaggcacgtgtctcatttgctgataattaaaactttttttgtgtgtttgtggatctcttgaaaaatattcacgaggtaattttattttccacttgaaataatgtagagaaatgaagtttctgatgtcatctcaaccgattgtcatattgagtaaattgcttgctgttgtggtttctttatccataaaacacataatacgtaatatgtatcaagtgctttccctctaatcagggtgccaattgagatagtgtgtccataaagttggttagaggttattgacagcaaacagttgtaggaatttaatgtggcaattgtactatgatagtatcaaaccagaaaaaaattaactgttggcgtaacagtaatacttttccattaaacattcctgccagtagtgtcataatgcagtgttactggtttaaaactgagaaagtggggagatgtcatgcatttcagcaggtattaaaaaaatactctttaagtgactgtgcagttactgttgagaagaaatgaagtcgtgtatttttaattcttggaagatgtggtaaaacatgagggaaggaaagacaaaataattacaaatggatatacattcaaatgcaggcctctatttaaaaaaatctacctaactgctgtaggaatgtagaagaatagatcagagtgtgagttttcaagggattgttgtagatataaaaaccctttttgagcactttctccattttgtgtgaaatacattgttatttaaaggttgaccacagtttcacttaattctttcaaatatggcagggatttttattttcagtttttttccattcttctttttgaggtataaaatctcttaaaaccagggctaaagcagaaacaaagtcatgctaactttaagtgatacacttggttgcagtgctgacaaaacgtctgtcttctgaaatcgaaatctctaataccaaatacatatacctctttgttgatattagctggaatatcactgtttacaatggactgtttcttttagaaggaataaattttttttttgctgactagaaaaatttagtttttaaactaatatcacatggaagttatatttggggcatatggagaaatttttgtttatgcatacctggtgtgtcagaggctaaactatattatgtcactggatttgaaaaacaatttgtgagccttcctttaatattgaagaagtaaatatattttcaatagttagtaggacaattatatgcctttttggtgtactttttacctttcacttttgagagaaaaaggagacatatcaaagaaatcttgtgctctgcataaaaaagaatttagaagtcgtacacctcatgtctttacttgattacattccatactgtaattctgttgaattctggaaaaaagcccaaatcatttgtactataattagcaaacgtactaggtaacattttttattatttggacctctgttcagatcagatcaaatattatagattgtcaaatgagtgcctgttgtccctggcttaaattgagaataaaattgttttggagttttgctgtcaaaaacacaaatgaaaatgagaccaggacacgatacccggtattgagcattataggtgtgattaatagtcagaggagagattctgccaagtttttgtgtcacggcaaactctgtcatagacatgaccatacagctcttttgcccaatttgaagtctaatagtaatactttttattttgtgaccattaaattctttcgaacatttttaaaacaggaaaaaaacagtatatgctctccagaacaagatgtgctacaattgagcgatcaaaagataagagggatttgggtaggtaattttaacacagaaagtaatgccacatattgactcaagttttagagaaattggtataagacttgaaatgagtgacaggtggtaagactcttcaaaaatttataagccgttttttttttctttttttctaaaacaccttgaatttgaaaagatggcatagaaagggagaaaaaccttgaggttctatcctagaattctagttatggctatcttgcttggccacagtaatagtgatttaaactgtgataaatagatccaattctagtgcttttattcttaggataattctcttatgctaaacagtttaggatattgttaattgaacactgatacttttcccattgcccaagtaacttcagtttttccctagaaatttctaatatgtaaaacgatttttgatgactcacagaaagtcaagatgaagcctaaaaactgagatgctaaatggtgtgaaaattagttccaactgatgggtgcaattaggagcttcagattgattagatgcattttattagatatgaactgtagaatgacttgtataacttgatgaattttctttagttttgggttagaatgatagccatggtctttgtacttttgttgactaacatgggagattaattttactttttttcacaataaaaattgaaaaacatagtagaattaatgacaaaactctggaatgactcccttactacttactcattttccttgcttaccactgctgccactgtgattttagcagctattattaaaaacagaactagaccatttaaagctgagctgttcaatatagttgccactagtcacacatggcaattaaaatgaaataatattgaaattcagtttctcagttgcactttaaatgtttaattctggtggctaccagatcagtgcacataatgctacatttccattatcacagaaagttctaatttacaacactcttttaagagaatctgagtttaacagtgagaatattgaaagaataggaacatctgaaggaagctgaaagcaagggaaaatgggagagtggagtgggaaacaatttatattgtttatgtcttctggcttttaagattcttgcaacatgataccttactatgctgtctgccctttcacttgaaaaaattttgaatatataaaagatatgttctcatcttctaattagtgccattatgaagatgactcaccagtttttatctctattctgtatttctttaacaaatatttattgtctaatatgtagcaagtacttttatagaccattaagaaagcatgcagagcctcagtttacatagaggaaagacagtacacagtaaacaaacagtatcagatagtaataagtcgttcatgaagaacagtagacctggatatagacaaagaagtgatgggggtgtgcttgtgggctgggcataggataatatgtgattttaggtagtgtggaagagctcatatttgaggaacagtagacctggacatagacaaacaagtgatgggggtgtgcttgtgggctgggcataggataatatgtgattttaggtagtgtggaagagctcgtatttgtacagatacctgagcgaagtgtgagcatgaacttttggctctctgaaggttgtgcgtcccagaccagggcctgatggggcagtgtgctggccctcgagatgaatagtgaggacacagccttgttgaagctgaatgagcgagggtaggaatggcagtattctcgtttctgatctcttgctgcacatcctgatgttcatatttgcctttctttcttaagggtatttccattcttctggtggtccagggtattttttttttctttttttttccttttaatagctcttctgtcaatctcccaaaacaaccatttggtttgcagatctgtcagtttttgtatgtagacttttcccttcagttactcctgccctgctacatattcttattgcaacgcttctcaaactcttcactacccagtttttttctgtcttgcactcccttgcttagaaatctttgctgacagtaaatataaacttggcttattttttttaaaaaaagtatttcctcttggtttagcctgtgtagataaggaaaaacaatggaagaactctttttttcttctgaattcaaaatatttacatatataatagttcagctagattatgggccaactaggcttttgtgaacttacttagaaacctgaggttcaagtaagattcacttacataattcacgttcctatttaatataatattttcatgggaaagtgaattatgagttataaacaatgcatatattttgtttgaagtctagttcattgataagttgatgactagcatatattttggagttagcagagaaatgtttggtagttggtgtataagttttactcatggtattcctttgtaagtgaaagatttagtaggatgagtatcacgttttgatatatatttctcactttacaggaaaaatgttttaatttggactctcataaaaatgtagattactgcttagatgcatttgtaacatgattttatacagtggcacccagctaactgttcccatgtgtgtgctgttgaattgtattcacgctaatactagagggagagttggttaaaaataatgtttttagtgttttaccaaggtcttgccttgacacagatatgagaatattaataatgctctggcattgagatggaagttttacaaaggctaattttctgtaactgacttttaccagttagaagttgtttatagccaaagttattctgtttcttttgtaagcatgtgagaatatctgagcgctagtttttattataaattgataattcgttacatgttttacacaaatcattattccactaagtccagaaaaagaataaattgggtttaaccagtctgttgaaataacattttattttcttttactggtcttaaaatcatgtgaatttggtatgtgaggtatctttcaggattgcatttgatatgtgaggcatctttcaggattgtatgtgtggaccgtatgtgagggatctttcaggattcagctatctttcaggattgtcatattgttctaaaataccctgtgaaaagaagcagttttatggattaataggaagatcatggaagaaaattgttacaattacaatgaaattaaaataataagtaaacctcctccattgcttaaaggaaaaagtcccagcttttcagttaaggattgttagtctctggtctcaaccaacttttccagcattaaggactactattcctctataccagggattggaggctcaaattcccagctggggtacaggtgtgcctatatgctgaaccctccgctattggagatgcctggagtggctggagccatttaatatggtcgttctagccacaagcagctttatccttttacacccatgtgaggtacaagatatgcgaggatgcaagggcaaggaaggtaatgtgaatgtgtgtggctggccaagttgggggcgggggcaaaatgaagagtgaatattctatctaaagagagctgctactactacttttattacactctggctttgtcacaatgattattgccatgcaggaatcgtgtaaccaggtcttctggtttttttttttcctcccagagcgtgagggaagtaatacctattattgtacacatacaatctcctaatctttatcttttgccagttatttcaaaaaattttgaatgacattgtaaaaaccaaagaaaaccattttcaattatgatttgtttcataaaaaacatgtctaagaacatggagtagatggtgattcttgttatttttgctctcaggacccctttacactcataaaaattattgagaacctcagagcttttgggtacataaaatttactattttagaaattaaaacggagaaaagcttaggctattagttcatattaaaatgtcagtctattatgtttgaataacatattttatgaaaaacacatttgctgaaacaaaatggttagaagattacgttgctttacattgttgcaagtcttgaatgtctgccatattagaggagaactagagtctccaatgtgcttctgaaggtttgcattctattgcaataagttgttttggttgaagtttgtgaagaaaatctggctttacccagataataatttagaaaagggaggagtattttaactgataatcagataataatggatattctttttaatgctatacccaaacttaacagatggtaatttcttaaagattagttgcaatgtggaattcgaaatcacatcagttattctatggtggtatcaacaaccttttcatgttatgttgcattaaaatccattagtgtttcttgctttttggatggatcttttacccatgcatgagtttgtaacactgtgcattggtaatttgaaaagatttctttttaaatgcttgaagaatgtctactataagaaaaagttgaatttgttaatatcaccactcatatacaagcctttaagtattgagaagatatcaagctcacagtggtagaaacaagtttttcaaagtttagatttttgcttgaaaattccatattaatcattgtcaacagatacatttgttttccttaaagcaacaggctcacttttttttttccagacaacatctgccaaatactgaagtctgaataattctagtttgtagtttgttagtttttcttttaaataaaaattgcattccatgggaaaaatcagtttagcttgtaactcattttacactagttgttagcaacagcatactctggatatatcgcagaagtactttatgtgtacttcttatgttagaattaaacataaatcaaggtttgaggtttaataaaattaggtttaatcttttcgccaagaacataattctaaaagaaactggcttggcttctgtttaaaacagtgagtgtgtatatttgtgactaatacaatgaattatgcaacttggtgctgctgccttgatttgtgctaagatgcagcagttttattcaatatcgttttgcatcattggtgcaaatgtggctacagtacaaaaggcaaataatatctgagtagtattatttttttatttaaggactttcctcccttttttcaaaggggccctggggaccccaaggatcaatggaccatatttgaagaactgctagtaaggcagaaagaccactggatttaagagttagaagacttaaattttgaagcctgtgcaccattctcgcgtcttatgatgtgcttcatttctcagaatttcagtgatttcatttataaaatatatttggggaaaaaacatcttgttttttgcttttttgttgcttgaattacaattgatgaattaggaaaagctgtaagtgtaagttgttgctatttttaaattagtttcggctatagcccatttgttttacttgtcagtcatgatacagtaaacattctagaaattttcaaataaggaatttaatacaggggattaggttctttaaaaaatcactggaaggactggaggaaagctctagctcagacttctgaaatgactcccacatcattgcaggactgaccagtcagggaagcgaccagtcagggaagcggctacttctgtcacaattaggaaagcggcctcttggactactgagttcaagaacatacttctatagctgcagcccaggaaacaggaagccaggattaggtactgcctctgagctatgcctggaaattggaatgcaaagtctagttgccgcttatattccatctcttgacattcttaaagctggaaattggagcctggaatactgtggaacaacttaaatcttttcaatcaagctagagaaaacagccaaaggcaacaggataatggttgccacccccccccccccccgcccccgctgcactctgccttccatgtctcgtgttagtgcattctaatggatgaggcctaagtttcatccaaaaccctaactgccagtgaataaggaagatagtttttctgtttttttttatgtttagtttctataattgaagaaagtaaacttaagagaacgagttaatggaatctgaccgctaattaatcacacacctaaaccctgtttttctgcttctctgtgattttcaaattttttccacttttcattatcctttctctacttagacctaagttctagccattttaataaccaagatagctttcatttttatgaggcattccatacctttttaatcctcactgcttcatcagtgtttatgaatgttcagttctgggttacactcatcttcagctgtggtctgggtggacttggattttgtaaccagacttgtaaaacctttggcctgctgttgcctgtaaagtgattcaccatttcaattactatgctatataaatctttcacattttacttgcctgtatttttggggggccctacttaatacacttttgtgaggttttattatactctctaaagacattaaaaaaaacaccaccacttccttccatgatcaggtattctttctcatattttaaatcttcttacaagctactatttggagaacgtgtggataaaaatagaagtagactctggaaaatatcaatatacattactttttttcattaaatatataatatgcttttctagtatttatgtaaaaccttatagccatatggtaaaataaagccaccttatcctccccatcctctatcctgtttgttttttttttcctcttctaaaattgtatgattacaaagaaaatatttttaacatgtctaaaatacaccaacctgggcaagacgcaaaaccttgtatctacaaaaaattaaaaagaaaattagccaagtggtgcatgcctgtagtcctagctactctggaggttggggcgggaggatcactggagctcaggagtttgagattgcagtgagctgtgatcatgccactgccctctagcctgggtgacacagtgagacactgtctctaaaaaataaaatttaaaataagcaaataactaaaatgaaggcaaaacgtgtccaaaatacaaataagcataatcccaaccatgcaaagataataacagatagtttctctttctgatcatattattttgtaacctgttaccacttccctacttagcaatataccatggtttctatcactgttgaaatgataatgggagtatttatcattggcatcatctgggttagggaaattgaccaatatatattgggaaattggattaaaagtcatttttattgaaggcggtattagttgtaaccttttttggaaaaagaattaatacttaatagcatcaaggctattttttattagaagagggcttgtttcattcacttgtatatttcatttttgtgaaatgagaatcttgttttaaattaaaaggactgcatatttattaagcaattcagattgtatagaagtatttaaatagaaagtgaaagattcttatacttcttcctcctataactcctttcctcagagttaaccactgttaatagtttggcacattctttcagaatttaaaaaatgtatgtgtaaatgtacatctctggttagtttctgaaacatcagtttttaagagttcactgttaattattgtaatttgataatgtctagatggtagtagtatggacagaatttaatacgtatgtaatcgggttaacttcagaaagcagaaatgtcaatgtttaattgtattgatttcaatttttgttgataaaccattctcagcagtctttctgcttattagcttttaataagagacctcatagtaaatacagagattcttctacagtgaaatatatttctgcttactgctttaggtatattttatcaaaaaaatcattgagttactgagtatgaccagttaaaaatatgtttgcatttatttttagataggcttttagaaatacaaaattagttggtactgactggtttaaagagtatattggatataaaatctccataataaaaatcctttcattttgttttacttttaattttgagaaagatagttttgcttttcagatgtgattgatctcactggagatgataaagatgatcttcagagagcaattgccttgagtttggccgaatcaaacagggcattcagggagactggaataactgatgaggaacaagccattagcaggtaaaaacataatttgtataaagcagatataagtacttttaaaaatagaaatcattaattgggttaaattaattttaagaggtaataagatatactttgttactctaaactagtaatatgcttgtgtatttttaaattttatgtaaccaaaatcttcatatttagttttgattgcaattgggtttagatttttaagattttgggatggtgttatgagggattacatttaggtgcatattttaatatttctttcattttttttcttcccctaatcttttttggatgcactgtccaatttgcaacaatttatagcaagggtcagcatcctttttctgtaaagggctaatagtaaatatttttggctttgttggctatagggtttctgttatagctattcagctctggtgtcataacgcaaaagcagctatagctgataaataatataatgagcttggctgtatcctaataaatcttgatttacaaaggcagccagttggttttgtcctctcggctgtggtttgctgacttctgatctatagcatgataatatgtttatatatattgttcaaataaatgggcagggctccaagatgtgtgctagaatgcagtttttcatttaataaccaaaactttgtagtttgaaacagtttgattcatctaaggactaaaaaatacatttggttttcataatacctctaaaaatggagatataataatttaataagccataaagttgtaactaactgtaatcctctaaacaactatttgaaggcagtggtaactctatgttactgaagaagaaatttacttgcaagaggttaaatgtgctttttccaaaggcacacagctcagatgcatcttaagacttaaatgttcttttcctttaacatagtcctttggtaacagaatgtaccaaatttctcaggtaatttttcttggcacaatatcaataggagatttctttccaaataatcagagattactatatggtaggaaatgtttcaaaatgctatgtttagcaaaggcatataattttttatcttagtgcgactttttaatgtctttaaatgttactttggaaactactttgtaagacattatattatgtaaagacttaattaaactctattgtccccctcattagttgtggctaatatttattgccaggaactttaaatgaaaaccaaaaaatacgtagttaggcttattttctgaagcatttgagaaattatatgaattgggctttttctttttaaaacgtgtattgcaatgcataattgtcttgaataattatgaaacaacaatacttaaactttgagaaatattttaaatacaaaacacatgagttggatttcatatgtaaggggcatggttttatgtgaaaagggttataaaaagaatgtatacttgatacaaatattatttttaaaattatatttttgtttatatgaatttatatgagtatatgaatataaaatatatgtgagcttatatacccaattagtatcagtcgttctattatgtgttttctaattaaaacaacaggtactaattatataataaaagtaaggtaatataaaaagggatgaaggctgttcctaatttgatattcagttcaatgtatatgttatattattgttttggatagttgtttttatccaaaatggcaaaagaaaatctcttcagataatgctgttttttcattctaggtcttttacattttaatataatttaaaaatagtaaatatttggtagatattattattgtagatgacatagagattcggcataatgtaacatgccataaagctatgctccctagaagtaaaagagtcatattaattatgtgtaaattcaataacccgcaatgagcaaatgggtgttcaatgcaaaatatgcatttaataaacttatatgtaaatcatattgtattaggaaaagaggatgtggagagttctagctaaacattatcagagatatatttgctcatatgggtttattaaggtatagaactctaaattcaaaagagaaaatgatgcattttaaaggaagacatttatatattatgcttaaaagtaaattaactccttcttcattactgaagttgatatagggaaaatctttgcaaataaaattccagaatcatttgcttattatattttagtagacataatttaatgtgaagttacacattaggatactacattgtgtgtaatttgatgagataaagcctgtctttttacgtcttagaatcctgtgtttaggcatttatacgtttcatgctaaaattttttaagtagaacgtttttaaagtatttctttatacactttttagtgtcagaattgggtgtatttattatctcttgattatcactgccaggacacaagtggagtatggacagttgaaatttgttaataaactacattgtgactggtttgtgtctatggcatatttcttgtgaaaatggcttgcctcatgaaataactttgaagtgcctcattagaagatagtgctaagttttctagctaaaattgttacaaagagcacgcaccttcaacaatttcaagaagtagtagactacagattctttttttcctcattacttctgtgtttcaactagttatttcttgttatcttcagcctggagttgccattggggaaagaaagaaggatcatgtccaggaatagtcagggtggaattctgaattattaaaataggtctgtataactcctacattttttatccttatcattactgaggaagcagctgtgaaggggaactgtctaaagatggtgtgtgaaacaggagtggatgagggaggcagagttagaaatcttttaaaattgatctttgaggaggatttcggtgctcaataattccagatacttgtggatgctaaggagcatggaagggccatcgaataaccatcaaaccatttaaggtgtgttatgtcagattatagatgatctggaaaagtaagaaatatgacacagattagtttcctgggctacaaggttgtggctgcaggtgactgatgaacagcagcagtgtaacttgaaaaagtatcagcaacagtgaggtaccactgatatccccaggaagagggatcaactggtcgatgtagtcaggctgtccgtgtggcaggagccacaccccatgcaatgtgggctctcctacggccagatacacaggtcaacttttggtaggaatcacatgtctgacaagtagtggtagcttctgtgttagaaacgtagagttccttaatttgtactctgtatacgattgtggatgtgattccattttgggtattgtgattgtggcagtggtggtgatctgggttgtgcaagtttgatcaaaagctttattctgttcatctcattgaagaacacattagagcactcatccatcacaatggctaaaattaaaaagactgatgggaagtgatgtcagcaagatcgccaactagagttgcttggctatcatttccctcacaaaaaaggaaccaaaacaacgaataagtttattttgtctggagtgactgaggaaatgccctggagagtaccaagagaacagcaaagtccctgtggagcatagagtcaagaatagctccacagggaggagaccaaagtatcctgcctctgccatactgtctcccctgcgaggattgaatcaaagccagggggttcctcttcttataggaagaaggtaagcggagaatcatcagtcctcatcaccaccacaggtgccagcagtcactgctacaagagagttccccagtcctcacaggtcccaagtccagcatgaacagttgctgaaagtgcatgtggctacattcccccacagcaggaacctctttgacaccctgcacccctgcaatccaagcagctaagggatgacacaactgtgaaaccaagcccacatctggagtgcttcctgacctggaggccagtagccaccctgtatcccagaggcattgccctcattccacaaagttcacacaagtgcctctagcactaataccttggctacttggagcctaggctcaaaggcacaactggggccctgatacctaaacccacaaggctccctattacccagggaagcaggtgggcctgcatggccgggcagccccatgcggccaccaggctagtgtacatctgtccctggctctagctggcctggaggtggccccaccccaagggagagagtagtatacagccagtgggcctgtgtgaacttgctcccagcttgaatagctggcccagaggttgtctgcctgtaccactggaggattgtgcacagctgccgggccacaatttcctgcctttagtccaatagctggtttggaggcactctttccgcagctcaaccctacatcaccagagtcatgcacagcctccagacctgtgtgcatccacccctggcctgatagccagcccagcagtaaccctgctgccattcaggagagacagtcgtacaacctttctggcctgctgcatcagcatgtgcctgaccagcaaccagcttggtgccaactccagaaaaaccatgccaccacagtcatgggcttctgcatactaagtcactgagataatcacggacatcgcaggtgaggattccagctgaataatctgtttggacaccacaatactgagtccaccctgaaccaaagccaccacacgccatttccaatcagcaccctaggacccatcaacaggaaaaaacctcttcctatgaaagctgctcgttaaaattggaaaaagcaattgtccattacatgcacaggtaccaacatagagacagaagaatcatgaaaaagcaaggaaacgtgtcacccccaaacctggcaccacaatgcatctttagtaatggaatccaaagaaaagaatatttatgaaatgcatgaaaaataattcaaaataatgacattaaagaaacttttgagttgtaagagaatacaacaatttaacgaaattaataaattcattagctgagtgagaaattgaacaaagatagatattatggaaaggaacaaaacaggaatcttggagcttgaggaattaagtgaatgaaattaaaaaaaatacaattgagagccacagtaacagactagaacatgcagaataatacatttctgaacttgaagacagatcgtttgaaataacccattcagaagaagaaaaaaaaaaaagaataacaaagtatgaagaaagcccataggacttatcagacaccattaagcaaacctatattcatattatgggagtgccagagaaagaataagtgaagagaggcatagaccacccatttggttaaatagattgcctgtgtccttctgcacttcttggaaggaagtcttggaagttatggacatctaggaatgaaaagatccccaataaaattcagcccctcaaaatcctctcaaaggtacacaattctaaaagctgtaagacaaaaacattacgtcacatatatgggaattcccattagactgtcagtacatttctcagcagagactgcacaagacaggagagagtgggatgacatattcacagtgctgggaaaaaataaaaataaaatataaaaataaaaactgtcagcagagaatatatccggcagtgctatccttaagaaatgaaaaagaagggccgggcgcagtggctgatgcctgtaatctcagcactttgggaggccaaagcaggcagatcacgaggtcaggagatcgagaccatcttggttaacatggtgaaaccccgtctgtactaaaaaaaaaaaaaaaaaatacaaaaaattagccaggcatggtggtgggtgccggtagtctcagctacttgggaggctgaggcaggagaatggcgtgaacccaggaggcggagcttgcagtgagccgagatcgcgccactgcactccagcctgggcgacagagcgagactccgtctcaaaaaaaataaagaaaagaaaaagaaatagagacgtttccagacaagcaaaggtgatggaattcatcaccactggactggtcctacaaaaacacttagaggaaataataggaaatgaaagaatgattaataccatgaaaatatgtgaaaatacaaaactcatcaatataggtaaatccataatcatattcagaataccccagtgctgtaatggtgctgtgtaattccttccgtcctctaatatgaaggtttaaagttaaaaatgtcagaaatatcaacagctacaattagtggctaaggaacacatgaaagataaagatgtggctgggcgtggtggctcacgcctgtaatgccagcactttcggaggctgaggctggcggatcatctgaggtcaggagtttgagaccagcctgatgaacgtggagaaaccccgtctccactaaaaatacaaaattagctgagcatggtggtgcatgcctgtaatccaagctactcgggtggctgagacaggagaattgcttgaacccgggaggtggaggttgtggtgagccgagatcacgccattggactccagcttgggcaacaagagcgaaactctgtttcaaaaaaaaaaagataaagatgtaaattacagcaatcaaaacactaatcatggtggggtaggggagtgaggggaaaaagtctagattatttttgtgtgaccaaagttaagttgttattagcttaaaatagtctgttgtaactgtaagactcttcatgttagctccatggtaaccacaagaaaaattatagtagatagacaaacaagaaaggaaacaaagcttagcattatagaaaaccaccaaaccacagaagtaaacaagagggaaagaatcaaacgaggaatcttcataatattgagaaaacaaactagcatgagtaaattattacttatcagtagtaaccttgaatgtaagtggattaaattccccaattaaaaaatatagagcagctggatggattgaaaaaaaaaaagacccaactgtatgttgcctacaagagacacacctcatcattaaatataaacatagactgaaagtgaaggaatggacaaagatatcccatgcaaattcaaaccaaaaatgagcagaagcagccatacttgtactagatacaatagactttaagtcaaaaactgtaaaaagagacaaagtcattatgtaataataaaataatcaattcaccaagaagcaaaactgtaaatatataagcaccgaacaccagaacatccaaatatataaagcaaatattattagatttaaagggggaaatagactccagtacaacaatagtagggacttcagcatcccacttttaacagtagacaaatgatttagaaacatgagacttaaactacaccatggacatttacagaacatgaacagccgcagaatacacattcttttcaactgtgcatggaatattctccagtaaagatcgtatgttagagatggtatcaagtattttaccagatcacaactatataaagctagaaatcaacaacaagaaaaacgttagaaaccaacaaatacatggaagttaatatgcaccttaataaccaatgggtcagtgaagaaattaaaagggtaattagaaagttccctgggacaaaggagcgtggaaacacatacaaaaacctgtgggacacagtgaaacctgttctagaagttcatggcaataaatgcctgcatcagaaatgaggaaagatttctaataaacagattaactgtgcaactcagagaaacctgaaaagcaagaacaaattaaacccaaaattggtaggatggaaataataaagcttagagcagaagtaaacaaatagagactaaaagagcaattcaaaagatcagtgaaatttttttgagaagataaacagaatcaacaaacctttagctagactaagaaaaaaggaaaaaaaaaaagactcgaataaataaaaccagacatgaaaaatgaaacattacaaatgtatcacagaattggaggatcacaagagactattatgaacaactgtataccaacaaattctagaatataggaaaaatggataaattcttgaacacacacaacctaccaagattaaattgagaagaaatggaaaaaataagcagaccacaacgagtgggagaattgaataactgctaaagcctgacataaagatccctagtttctgatggctacattgctgaagtgtgtcaaacatttaaggaacaactaatattaattctcaaactattccagaaaattaaagaggagggaatacttccaaactcattttatgaggccagcattaccctgattcaaaaactagacaaggacacaacaaaaagaaacaggccaatatccctgatcaacctagatgcagaaattctcaacaagattctagcacgtccgattcaacggcatattaaaaacatcatccactatgatcgagattcatcccagagatggagggatggttcaacatacacaaatcaataaatgcgatacatcacagtaacaaagagaacggaaaccatataatttcagtagatacagaaaaaagcacattacaaagtttaacatcccttcatgataaaaactctcaaaatagatatagaaagtatgtacctcaacacggtaaagaccatagttgagaaacccacagctagtagtatactgaatgcagaaaaaaatgaaagcttttccactaagatcaagaacctaacaaagatgcccacttccaccaatcctattcaacatagtactggaagtcttagagcagttaggcaggggaaagaaataaaagacatcaaaattggaaaggagaaagtaaaattgtctctgtttccagatgatatgatcttaaatatagaaagccctaaagagttcaccaaaaaactgctacaactcataagtgaattcagtaaaagtgtaggacacaaaattaacacacaaaaatcagcacttctatatgctaacggtgagttatttgaaaaaataagaaaacaatttcatttacaagagctacaaaaaatctagatacctaagaataaacttaaccaaagagataaaagatctctacactgaaagctataaaacattgaggaaagaaatataagacacaaacaaatggaagtagatcgtatgttcatggattagaagaattaatgttaaaatggccatactacctgaagtcatctccagacttactgcagtccatgtaaaaattccagtgacccttcagagaattagaaaagacaatcccaaaaattcatgtggaaccacaagagagcccaaatagccaaagcaagcctgaacaaaaggaacaaaaggtagaggcatcactacttgacttccaaatgtactgctagaatatagtaaccaaaacaatgatattggtgtaaaaaacagacacatagaccagtggaacaaaatagagagcccagaaatggacacacctacagccaactgatttttgacaaaaactgttaactggagtaaatctaagaaatgtacaagaacttccaggaagaaaatgattaaatatcattaagacacattaaagaatacataaatattttgaaacattcgctgtttcatgaattggaagaccattgttaaactggtcggttcttcttaaattgatttatgggtttagtttgatcccaattaaaaataccgttagttttgtttttgcttttttaggaaatcaaatgagatgtttcattacccgccgccccctttttttttctttgtagttgatctatacagcttaaagtgtatgcatgtttctcagtgagtgtaatacttcccaaaaaggggcttaggtgagctatgaagtgggatattttcagtattactgctataggcaatttaacaacacaaaaacaataaaataataacaccccctcaccccccccccaagtaaaaccaccgtgtaataaaatttaatggaaacatgatgatctaccatatgtaaatgctttaaacatttagcgtagtgtgtggaaggaaaagacgcagcaaaacattttgtcgtctttttatattgcttactaccaaggtcatgaccaattttgagaagataaagcaaggtgataggtcagactcgtttttggtatgtggcttgcgagtttacccttcaaacattttgttataggctatctctgaaatttgccttttttttttctcctctaccagctggtaatacctggattttagccactgcatgtcttatacttaagagcttgggtagtatcattggaaaggccaggggaggaacccttatgcaggattttgctttataaaaagtttggatttatggtgccagtactagattatagaaggggatcaggtggagcaatagagcagtattggagctagagattggcttttgcaatcagtcagtcaatcaataaccaagaagtagcagcatttaatatcttcatcatccatttactttaaaaacgtgtttatcactcatttataatgtttgctctagaggtaaagcaaattcttgtttctacttttcagacactgattggagacactggttgatatttttggcacagtgttaagtgtgtttattaagttctttaggaaccaagaggagatggtaggaggagacctactgaggcatgctgtaaaattctggtgataaaatatgtttaaattaagagggtcaggaaatcatggcattcccctttcacctacatgctttttttttgcaccacaattctaccatgtggtatggttaaggtgtattgtgataaacccatttctttaaaacccatacttttgttaacagtgaatgacaatatctaccatatgactgaattgagctacttgggaaatggctattatttttaaatcttaggtgactttgaggagcaatcatcaattacatgtatctcttgaactttaatcaaagttgttacactttgtgcctcatttgatctctgcaaagaaagttatataggagtgctgggaagatgttgtcttggttcgtatccctaactttcttgcccttccaacttcctttttggaatggtgtgacaaatggttcaggctttacttgctcctagaaagtacatttgaggccacacattcttgcaagtcctgtgtggggagagagaaggcaaaggaactaaaaagcttacattatctcagtatatcaatgtgatgtttacattaaatattttgtatgtaaacatgccaatcaagtggtgtatattttttggtagagcagaagacgggcgtaaaggaattgactatacttaaaacatttcaaaagaccttcctggggtttagtaatcttagcccagatctggaatgtgaaaaatgtacttagggtgtattgtgcagaaatcagatgtcctcaagttttctgtagctgatgtatgtatgaaccatttcctgcttattgtgatatgtgtgatctgctctgttgacattattaagaaggatttgtttcttgttataattagtagttaaatataacgacagatgttcatatgctatagattcaggattacgtctggttcttttagacttttgagcagtttatattttagaatatgctgtagaatcctctttttacatattgtctgtctgcactggtactagtcaattgctgggtacctcttctatctcttatataggatcactggtactatttgttttatggtatcgtttttatctgcctttcccagaacttattccatgttttagtctatttatttctgactaccaagatacaaataagtttgctgtatctcaacgtctaaatatacatatatattacaaaaggaacaaaattttcaaatgagaatactgccatttataaaagtcaataaaaagttaaatatcccctctatatagggcagtcttttgtattacagttactttttatatactgtgcattaacctttcttttttgagcataaaccagtcttgaacaaattcagtttgttcaggttattattattctgctgaactgcaaaatttaactgttagaaggtctttaggacctcctgggtctccaataggagagtcaagttgactgtctttctatctctcccttgtattcttgaaaacttgctttctggtaacagtagaatgttctagatattctttggttttcctctgccccagttcatctaactaaatgtctttcaaggagttctatgtcttttcgtgaaacaagcctagagtctggggttgcctgtgggagttggtttttgggcagagagtagtgctggccagtcgggtcactcttaagtgtgacagaagtagaaactgtttacttttcactatatgagtttacattttaacatatcatgttgttaccagtttttcaaaaatgtgtgttttattgattcccaaagactgacttctgtattcacatggatattttagatttccttgtatctaatgtcttgtggtaaatattgctgttaaggataaaataataatattttgacattaatctgataggataaaatctttaggataaaaatggtgtgaaatgaatgagattttcttgataaaccaaaaagttgaaaaaaactaatctttactcaggttctggtaattaacacaaagtggttaagatacctgaatgttatttatgctgatttagaataataagtaacaagtttctttttttttttttttttggctgaagccaagtagcaagtaacacatttcttgagcaggcaaaatgcttggttagatcctatgtgggaaccagggttttccagttatgattatacttatgttgttgcatgctcaggagcaagaaacatcattaaagtagcattacttttgccatgtttagatatacttaagatattcataggtgagtttattttggaaaggttaactatcttttgttattctaatatgtattctaatatttatttcattaaattttcccaaaggcaaacttttgggcaaggcagtgaacatacaggttttcttttcctttacttggctctcatagaggcatagatctcaagaattgaaaggaatcataaagtttaactcactgaactttttttttgtagaagaagaactaagtggtcggtgataaaagtgcaacttgttcagtttttaatgttttcttgattcagagtaattgttataaaaagtggtcatcatgttatattgtaaatatgtactttaattgttatttctcagaaaattcatctagatggtatattcctggtactaatatctaatttgttgaaatgtgatttattgtactttctattatataaaactgccattttatgtttgaaatttcatttttcttaggaaaaaagactatacttctctatgtattagcattgacactgctaaaacgtgtatttgagtaaagttagtattaaatattatttcttcaaatacattattgaaatcttatgtaatgaaaatgcttttagaatgtgtgatatgcctgggatatataccattatataatgctgcatttttttccaccattgattaagagttcttgaagccagcatagcagagaataaagcatgtttgaagaggacacctacagaagtttggagggattctcgaaacccttatgatagaaaaagacaggacaaagctcccgttgggctaaagaatgttggcaatacttgttggtttagtgctgttattcaggtaaggatttttctttattcagttcttatttgatgtgtgtgatagcaatggaaagtgagttggttgtgtttaagttgtgtactttaaagataagtacagataagtttttaatatactattttgtctaataaactagcttggggattgaagtatcctcccatccctctttgtttttcatttctagtatgtattttttaacagtagatcactacttatgcctttcacttatttggaatcaatttatcctttccttctgcttttaggaattgttggggtggaaagagttttgtatatatttccctgcaaatttatggaagcattgtaaccaagtttgaaactagaactggctttctgtgggtcagatcagatttatttgtatatactagacagtgttatttatagaattatagacacttagtatttttaataagcattttgtttgaggttggtatagatttgcaaatctgagtttgcatgtgaaatgatgtgatgaataaatattgataaatcaagaataacacattgtctttttttactaagaaatcccttaatgatacatttcttgatctgcttattctaaaataagagacatatgtatgtgtagatatccctcttttcaatttggaacagttttcttttacgtgtttaacaactgttatcaaaattctttatcattctcggttgacattgataatgttatccatcagattgcaaaactttaaaacaatttatgaataatatgtccttaatttttattactccttaggaaagttaactaatgttttgtgttcgtttttgtgtgacagttgaattatagcttattatttcatgttcgtgatgaatgctttttccttcattggacatgcatgctattttttgtattcaaaatatatcttcattttgtaactttccaaacctgtgtgtatgacagcttaaactttcatatgatattaaggcaactaacaggttatttggttcattttctacaagttaattgtttttgctaacttgtaattttaacttttttttatatacttcagtgctaaaattttcaccgttttctccctttttgcttctggtgcataatatcatataatttgattttctttgtttttctggatttacctcactttttaatatgctgtggtgcatcctaataagtaatatgctatgttattggctttcccaggacatgaagatgctaaggaatacctggattaacataaatctatagtagtatctttgcttctagccttgattatacgttgtttacttacatgccaaaaagcaatatctaaaatattgataccttagagattcttagatcatcttaataggctatctcactttacttgcgctatctattaagaaggtttgtgcatatgataatttagacataattttaaaatattaagtatagttttaaggctctgaactgagtgctcatgaacatgttttgctgcctgtgtttggtcaagtagatgctatctcagcactattatggcaaatacatgagggtcattgattagaagcttttcttagaaaggtataagaagaaagaaagtatttgtaaataatattgttagaatagttgctttttatttctctatcctgtatgtgtagggaagttctgtttgaaatgataaatgctgatatagggataatgaccttttgttttagtaggataaaacttctttcagcagctcagtttaatcttgatacagttacaatctgtttctaccctaagtttgctaatcttagcttttctagcttttctttttagcttagatttttttttttaagaaggagggaatgggctagaaaaaaattatcttttaaaaaaatgcctagcttatttaaaaactagtaattgtactagttttaaaattttatctaagtttagtggctgcttaactcctaacataggcaagtataagagggcttgagttatttattttttcttttggtgaaatctaaacatctaggagaagtaacctataagcttaaaaattcaggttataatggcctaataagataatggcttttgagggagtagaaaacactaagcatcagattgtggaaaatgatgagtgggcagaaaaatttggctagagatcacctgaagttttattttttatggtaattttaaaatctatcaaactattttaagtagcttttaacttttatctttggtagagtcttcttaaaaattttctaccattattgcttaactctaagctataaactgagatataatacttggccatcataaattgactttttacttgtgaatgaaaagttgggccaaaaatctaccatagtgttggaggttttgttgttttccacagtgagttggaacttactcaaattgtgatgtaaatgtactgtaaagttttgattacaaaattttctcggggatggaatttacttagtaggactaatttgaaacatctgggaattctttttcttgtaaatatattgaccagttatagaagtttgctagtaatatcaccctttaacttcaaagtatatagctggggtaggctacaacagttatagatagctttgcatacttattattttagatactgagaccaatattttggtagaaagggggaacagaatgtaagaaagggaatataaacaaagagaagattgtacagataatggcttaaataatcttttggctgctggcaacattagcctgtctttaggttagacatcaaccccacagctagtcaggattatttttgtcctattcacttggtacttttatgtagaaagtactgattgcagctgttccccactagggtgtcactgaatgagttagctatttggaggtgtatgttcttctctgtagctctgggacatgtcgttgaagtggtatgggtgctcatgatgatccttagccccttagcacctttccatttggatgccgagaagtaaggtgctcatacttctcagtttgcttgtcatagtcccttttactcctattgtagatctgttggcacctgtcacttagtcctaaagccctgctgtgtatgatggtaaagtatgtggttaccttactcataaatcatataactgcaggttgactaaaatacaggcaccctgagggcagagagcacatttagggtactctatattatatatataatacagggtctggcacattggaatagcccatcaagtaattattgcatgaatggatgaatgaaccaaaagggagcatgtatggagtatctaaagtagtacgtgaggatattttaaaaaatgatgcatattgtcagaacatttcaggatataatttaaaatgcttattcatactccttgctcttctctctttaattttcatcaaagaaaaaatcatgtggcactaaaatgcttaaacctgtctgcttcctagtcctgccccttgaaagagacctgtatctaatccatttcttctctatcttcatttttctaaatgacatgccttcccactgagatagatgaggaatttgctctttcagttcacctgcctagaattgccttttgtttcatctctcaacatggttataatacaaattaaaaatagtaggtagtcagtattttcattttttataactttgtaaatgttacagtgattcactaggtcctcccatctatagtactttgttatcctggagttgtcaattgctacctttttcccctattttctatatactttaatattttctaaatgcttcaacatgtttgttatggtcttaataatatattctgtatgcccacacatatttgcttcatttttttgtttgtttgtttttggagttctgtcccatagaccatttctctgtttcaaatttggggtgaattctgattctttgtggtttaagcatgatcactcgctttctaaaagtaagtctagagaaatgggattggtcgatgtgggtatcagtttacatgtttttacttaatcttgctgtttgtagctctcaatcatctctcctttgtactgtgacatacaatttgactgatttttctgaacctgagtcatttaagatctccaaagactaaatttcctatacacccacagaggggaggcaattgtctgaatgtgctgggtctggaaagcacatgggggtttaattgttctgtacatagacttgtggtttcaataatgccatctatttttcaatccctgcctcaccatgaaacttatgtgataccatgctaatttttttttaatcctccgaggagaatttatcacgcttctcagtcttctccactgtaggcagtttatgtttcatttcctctgcactcttgccatcacttctttctttttcacaaattatttgaactcttatcccccattatgtctttgttattagcaagaatctaaccaaacttcattttcgtaagtgcttttcaaaattcacatattagctttggactgaatgaaaggatggttattttcaggtgcattaatcaaaaacactcttcaggcagtaaaagttaccctttcttacctcttttgaaggaatacattggacagtcctcatatgactttggtgaaggatatagggtctttgggacttgaaaaacttaatttttatgatttgttgtgataatcaatggtgatgagtttcactgagtaatggtagatgaggttgttttagaccatctgccttgtgatgttttgctggattccaaaacagaaataaaaccaaccttttgagggcatcacagagtactaaagcagtgaggaattttgagtaaagaaggatagtcatagagtgagcttgttatttttgatggattttgtcctttaggcatctccagaactgactgctgcgtagttgaggaactaagaaaatttttgcacaaagtttgagccctagtaaaacatcttagactgtgagttggaattctaaatggttagaatgtagcattaactgagaactgaaagttaagacaggcttcctagtttctgaattatatagttttaagttatctcagaatttattggattaaggcgacctgagactgtgactctagtctccctgcctgccagagcaaatgtaaattctctcttagaagatagtattatctggaacctttcctcaatttttcatacacaatgtctagtactcaggtcagtcataccagaaaataagatgtgtgtgaaaactaacacaaaaaaatggacaatagaaaacagcacagggaaactggaatacttgtctgccataataataattaatatgttcaaggaattaaaagcaagattgcgagtctgaagaaaactaaaaactgtaaagaacaaaatgtaaatttcagaatggaaaaatataaatgaaactaagaagtcagtggataaatttagcagcattattagacacaactgaagagataattagccaactggtaaattaatctggagaatatttttcagactaaagctatgacataaagatgggagcatcaaagagatactttggatatggtgagtagtactaacagtgtatttgtagttccagagggagagtaaaaggaaatagggcaaaagcatgtttgaagagattactcacaatattccaaacttgagaaagatcaagccatagattcaggaagcaataggaatcaaatagtataaacataaagaatactgcaccaaagtacatcataataaaacaaataactatagacaaagagaaatcctaaaagttgcaaggtggaaaaagatacacgtataaaggagcaaaaacaagactaatagctgactttgatacctttaaacatcaagtcacacataagcagaaataatgtctttaaagtgctagaaataaataactggccatcttgaattttatacctagcagaagtctttaaaaatgaagaaaaactagctgaaataattcttcaccagcacacccacaccaaaggaagttctaagtatccaggaacaaggaaaattctctatctacaatgggagctcagagaatagaagtgggattgaaattcttctaacctgccaagattctctttcctctttaaattcctcaaaagaatagtccatggtttgtctcccctacttaacagtagtcccccttatctttggtttcactttctgctgtttcagttacctgctgttaattgtggctgaaaatattacagtactgagagagagaaggagagggagagagggagaacacattcatataacttttattacagtatgttttctttacaattgacctattttattattcgttattgttgctaatctcatactgtgcccaatttataaatttagccattataggcatgcaaggaaaaaaaacataatatatatggagttcagtaatatctgtggtttccggtattcagaggagattttggaatgtatcctttttggataagagggtgctactctgtaccccattttcccattatttaatgcctctgttcttcctctaccactccactgcaaacatgactttgcagttgccaaatccaaaggttatttctctgtccttaatttattggaagaatgtggcaacctttcatgatattgctaatcttgtcctccttgaaatgtgccagctattttttgatgtacagcagaatcttttgtggaactttgtatctttattgagagtcccctgacacagctattttttaaagctccgcagtttattagaatacacaagtatgtttgaaagcccttgttttctccactcgtttttcttctgtgatttcccttagtattcctttctctttttcaaaactctttttcttttttcctgtgatttttaaatggtgctttctccccaaggttctgatcttggccaactgttaatgtattcatatcccttctggtttattacttctactcttactgttttaaaaagcagtcacaagactgtaatccctacaagggcagagactaccttcttagtgtctggcatatagtagatgctccataaatatttgttaaatgaatgaatagatgatttattttatgtgcttatattgttgaataaatctttctagatcacaagataaaatttttttttacagtttctgttaccagctttatggttttacctttcatatttaggttgttaattgatctatgtaatctggctctatttctttatatgtagttttctcaatacccaactgttgatcaaaaccttgtttcctcattgatttgtggtgccacctttaccttctgtcaagttggctgactcaccttttctaagatttgaaacattatcacttcctgtatagtaattttcaaactttataaactgtgacccaagaaaggaatatactgtatattataaaacattttacacatacacaagtgtgtaaaatatctacaatgaaaattttgcaagaaaatactctgatgtatttactgagtatgatacattgtgatattttccattgtattttatctcattttaaagaaatgttcagtatgatgatagtaaatggttgcaaactacagtttaaaaaacatactccaggaagcctttccatgggcatcctgcatatgctccattagattcttgtgtaattattatcactgcatcttgaagtcacgacatttctattacatgtctgtctcctttctaaattgtgtacttccttgagcattgagataatatgtaatttctttgtgtctctattacctaggatctgatgagtaaatttatttgtactccatttttctagtattaatgatacatctagataattcatggtaaacatagcaggtctaaaaagttttggacttgacatttgcatactctttattttgaggaaactgcttaagtgcatataaaaagagctattaataatgagtagtatatttaaaaagttgtccaaatataatcttgtgcactatcaagtatcaagaatggtatgtcaaataaaagaaacttgactttttctcagaagtatgtcctccttgtgccagttgcaatgattctgagtataagtagtacacagttgtaaaaaataaacctccaagactagtcatttttacattctgctaatggaattttccctcaggttatgttaaattgttgttctttttcagtcattatttaatcttttggaatttagaagattagttctgaattacaagcctccatcaaatgctcaagatttaccccgaaaccaaaaggtaaaattcaaaagatttttttaagcagtatatatactctatatgttctcttatatgtgattgatttttgggcatttacttggctcatcaaatctgaaactgtcaatttgaatgtcaattcattaatcttagttaccatagcaagttcttatcctttgttaatatattataaatacgacttttttcctttacctgtcacagtaatatgccaatttttggtgtcgctttagtaatttttttgggggggactgtcaaatttcagtaaactttataggctatagtttacaatttaaggtctttcctcagttgtctcctaaaaaattttgtggaaatcgaaatttcttttcaattgatcgtcttgtgcagccctttaaaaaatgcgttttgcattcatgtctttgcagtacaaatctgtatctttcattttggaagtgactgtcatagatgggtaatataaagtgacaacacacacaccagggccagattgcgtgggttctagctagggacctagagctggttacttgatttctctctgttccatttactatctgtaaatcatatataataatagtaattatttcatagagttgctgtgagcattaaatgaggtaaaacatgtaaggggcttaaaagtgcttggtacatagtaagtactaggtgtcagctattgtcagttaaacaataaaaaaaattaaaaaaaaaaaaagacttattttaaaaagaaccagtttgcacacagaatttatacctaatggaaaaaattacttatggagatgatatagttgcgtgtagggctttagtggttgatcttgtcataaacaatctgtagtcctaaagtggacttattgccaaggcaagggagttagttttaggtttcagtaaactgctgaacttttttgacctatttttagtaggagtgatgaaatattaaattatgttttcgttttagcgtttaatttttaaaaccactttttctttttctgtaaacacgtgaaacatttataatgcatgctagtgggaagataacttgatttataaccagcttttcaggttataatctctgggctgtagagtgtcaggctgataaacaacccattttcaaaagggagtcaggatcgtctgacaaactcttatgtctccagaaaaattaaggaaaaccctttcaatcattatggtttttacatggaactttctgaactattgcctctgtcattgcaatttgttaatatcacagttcttctctcttctcatatctcaaagtatatgtataatttgtgtgaaatggttgagaattatcatttctagttaggtatgcatgtatgtatatgcatcttgaccatttatggtcctggattttaatgttttacagagctttaatttcttttgttcttcacagagttgaatgaggccatgttagtttgtattcttatttaaaaaacagttgctatatttatgcttatatatcagaacgagttgtgaatactagagaaatgtgtaattccagtcttcagcacctttctagagaagtttgtttcttgcaatgggttagcctctccaggtgtccctttagcttaaggaaataaaagaatttctcacttccattctgagacaattacttagaatactgtgcaattttatatgattattccacaaatgtgactctaatttagtatagtgacagcagtacacactataccttgacatctttgaagcaaatggatttatagatagttatcagccactgaatggtcctatattcacttgagatggtgacagcaggtttttaaaaaaggcgtgagtgtaacttgtcacttatttaataatgaatttaccgccaactcgtgacatgtctacagctacattcaatttgaacactttgtcttaagttgcagaatacatttgggattactttgatcacatcacagagatgccatttgtatgcacttttaaacaggatattttttgctagcaaaatttgccacaaatattacatacatattgagtgagatttgaaagaaatctagtatttgaaattagtatgtattttaagtagacttggcaattgcttgtagaaattgaaactaattttagacactcaggtttctttgaactgttggtaatttcagtgtctaggagaattgtgaggtccctggaaatataataatagatccttgatgtaatcatcccctctcccctcacacagatatacatttggtttaaaatgtttcagactgatggcaaagcatattaaatgttgagaaaacaaagatgcacatgtataatatttagtggaaatcatcatgtaaatagctaaagccttattaattggaaggttatattatttaaagtcttgatttaggacaaatatttcaaaataaagaaatttatcactttccactacttaaagtgaatgtcatcagaaggaaatgggtttagttgagtaccatactgtattcctggagcaaatacctgaaggaattttgaattttacaaataaaaggggcattctgagatttctgccattagtcatgaagaagtaacaggagctggatttataagtctcagtgcatcttagaggattcaaagcatacaaaataccttttctgatgaaaatggtagaaatcaaggtagaaatcaacaacagaaagatatacagaaaatccccagatagttggaaatgaagtaattcacctctaaatatcccaagggacaaaaaaacaaatcaaatgagtaatgtcagaatattgtaagctgaatgaaaattaaaacatgacatatcaaaatttgaggatgaagctaaaacagtgattagtggaagatatcttataagagacatcttaccagacatcttattagaaaagaagaatggttttcaattaatgatagcagcttgcatatcaagacattagagaataaagggcacgttaatctcaaagcagaagtaaggaaataataaaggtaatagcagaaatctgtgaaccaaatatcagaaaaacaatacagaaaattatggaaccaaaaactgcttcttgagaagattggtgaaattgatgaacttctaggtagactaagcaagaaagaagagggaagacatatattacaaatataaggagtgaaaaagggaaacatcactacatactctgtagacactaaagggagaatagtggaatattataaacagcagacaagtatcttgaaagtcacaagctatcaaagctcactagtgaagaaatagataacctgtggtagccctacattatattaaaggaactggaacctgtccaccaaaaaattcagcagctaaatagttttacttgtaaattatattaagcatttaaagaacaaatgataacaattccctataaatttgtacagatacttaaaaagtaaaacttcccaactcattttgtgagctaagcattaccctgaaatgaaaagtaggaaaatacatttcaagaaaagcaaaccacacaccaatatttctcatgaatttggaagcaaagaattgtagcaaatttttgaaaaattaaatcctgcaattatatataaaggataatacctcatagagaagtggggcttatccaggaatacaaaattggtttagctttcaaaaataaatcagtatacttcaccatatcaacagactaaagaaggaaaaccatattatcatctctgtggatgaagaaaaatgatttgaccaaagctaaaatctcatttatggtaaaaatcttctagaaactaggaagcaatttacttttcaaatatgcttctcagcagaattccactaatttccaaaaattattacttccaattttgttactgggaatgtctcaaaaaactgcattgacttaggtgcggtgataaagaaactgatctcaggaaattaagggtacttttgaaagtaattttgtggattaaagctcatagtctttatacttttaaaacctatgtctgagggcatatttggaaccagttttattccctcttacctatttctcaggactcttttttggaatctattctagaagcaattctttctatgtgggttatactattttgggcagcaactatgtaaagatacacccccatcccagacccctagaattttacagtgttgagaatgccaactgtgtaaatttggaagaaaattttcatgtttaatatctaaattttttccgttaaaattgttattataagaactaaatattataagaatggcttgcctggtttgttgtcatgaaacatttcactaagttatgtgaattatgttattttttaaaatttccttcttgttttaaaatacattgttagtgattggtaatgtgggttgttttaatttctttctggagattttgctttaatgagccagtaagaattgaatgctttgtgtagtaaaaagttggggaaaagatatagaaattcttgtctttgagaatcttatagtcttattgagaaacaaaagtaagatttcagaggaatattaggagggtgatatattagtctcctattaggatctggtctaattattaaattaataaaattaaataaatttaaatattgtgattgaattatattaaatataatgttcgataactttagatataaaataaatgagtataaaataattttataagtaatttttattaaatataaaaacaaatattaaatttctaataatcgggtgaggttctaatattagtctaataattaagattgtcacaccacagtgacagtcggtgattcattgctcagtgaaaggcatttatttcagtagatgtggaatttgaaggtatcgttgacttgaaggagtctggaaaggcttcatggaggagtggagatttttgctaaatgggtttattgagatcaagcacttagaacagtgcctggcatgtagtgaacactcattgaatgttggctgttattattgctctgagcagcagcagctgggccttgctgaatgggaagtattatgagaagcagtcttgaatgaggaagatattcttggctgagtaatgacatgatttgctgtgaatatgtggcattcatgctgaaattgtgagcctatcctaggtcttctgcctttttgtgctggacttctttgagtctcttagatggcaccaacactctactttcttcaattatgatagagtgctaattcatccctaaactatattggctagtttaatttttggttactgttaaaatgaatatttattagtaaaaattttcttaatcttcagttaaggtgtttttgtttttgtttttttccttcaataggaacatcggaatttgccttttatgcgtgagctgaggtatctatttgcacttcttgttggtaccaaaaggaagtatgttgatccatcaagagcagttgaaattcttaaggatgctttcaaatcaaatgactcacagcaggtagttctgttgcactgacttgttcattaaccatttgtatttaatctgaacaatattaagcacctttcccaagaatatgagactatttgagatgcatgattctgctttattaaaaataacctggaaccatttaaaacatttgggagacttttaagagaaaagtgatcttgaaggtgttaaaataaagttttaatttatattatgattgaaatgaaaacgatggatacaattaagattatttacaaatacataattaaacatgttcacaaatgtgtgataacagaggatcattatagtacacatgcttttgatattcctgtgtttgctggcagggagtacttttccttaattacccagaaatggtttttgaaagatgttatctttgttattgttgcttttgtcttttattctttatatagtgtattgtggtagatttttatccattaccttaaaagaatattggtaattttcttataaaaaatacaaaatatctataaacaaaccagtattttcacatataattggaaaaatcagagaaattaaagaaggaaaacagaggaaaaaatacagtggcaaagaatagtaagtgttcaaaaagatagcggcaatgtgtaatggcagaagtttcaaaaagccactaagcttgcagcgttgttttttaaagtacatacttggatgtgtctctgttttgtgatgtatggagagggcgtttggaagaggaaggtctgagattctctcaccatcttccttgtgctttttgtttctgctttacatttaccttgtatggcaaatgtgaatgaacaaaaagggcactcacatcagagtttcttttatatgttgttgcatttttaaaaaaaattctaacaatgctccagtgccttttaggcttagtatctactcagctttgtttcttactcgctctgtcatggtaacactaacacaaatcaaaagaaagagaaataattttacagttgattccaaaccatcattttcgggcattcagcattccttctggttctaaatgtgttttacttttttttttcttctttagtatgcatagtatcttttccagtgattctgagtatacaattaaattttttaaaagattacttctgttctctgacttatctttccttctggatggctttttccttgtcttttttctggtttctttttttttttctttcttttctagagattcatgttgattttggggtatcttttcacatttaaagatgaggcagcatagactttgtctggagccatgtatgtacataggtgggcttttcagtttgagttagagttgaaatggatacaactggcggttaaggccacaatataaatgcttttgcttcagattagcagtgtagactaacttttgaaattagtgattctttttctttagaggccttttaaagtagatgtgcatcaattaaggttgataagtttgattctcttctgttccctaaacacttgaatttgaagtctacaggagtaatttagtgaatctgtaaatgtaagcatcatgatttttttaaaagtgaatttatattttcattgtatcttcttcctaaatatttcaaatacatcatcttttgaagtacacaggagtcttttgagacaccctttggtatgtgatactgttagttttttctttttcttttccgtgtttgtttttttttgagacacagttttgttttgtcacctaggctagagtacagtggtatgacaatggctcactgcagcatcagcctcctgggctcaacccttccccagacctcagtctcccaagtagctgagaccacaggcacatgccaccgcgcctggcaaataattttattttatttttatagagacaggatctccctatgttgccaagcctggtctcgaactcctgggctcaagctatcctcctggtttggcctcccaaagtgctaggattatagacatgagccaccacacttggccccaattgatactgtcaattttaatcatacctttaattgttttattttataattgtcaattttagattgatttctaagaaagatagggattaacttctgaaaaatattgtgttagctaggaaaccttattttttgttggatgtaatgtttaagtgaattaaagttatacaaaagtatgaaaagttgttttaaggtgttacaatagttcctaaggacagtcgtaacaaattacaacaaatggagtggttaaaaacaaaaggttattctctaatagttctagagggcagaggtccagagtaaaggtgttggcagggccacacttcctccattggctctgagggagaatcctttgcttccaccgtactctggtggctgttggtgttccttgccttgaggcagcatagctccaatctctgtcttcctcttcatgtggctttccctcatgtgtctgtctgtcttctggttttctgtttcttacaagaacactcaccattggatttagccccagccctaatccaggctgatctcatctcaagatccttaccttaattatattgacaaagaccattattctaaatagtgtcacattttgaggatctaggtggacatatatttttgcaggctactattcaacccgccacagatgttatgaatgtttacagctggatttttgcgttgcgtttagtcctatttaactctacagctttggagcagtttacttaagcttcccagactttagtttcaacatttttttgaggttaatataaagttggcctacatgctctttaagaaactgctggctgaaaaaatatatgatagtaagtttgttttgtatttggggctattttggtaagtaaggacaaattgcttactactgattcatctgcctgtaagcagcctcagtagagttgatttattgtttttcccttatgttctatttattattttctgtgttccaactcacgttattgaaagaattatggtagttgataacacaactgccacaacctattcctgtttttccgtgttgggagagcaaagaccaaaggcatggtgaaaggtgataaatgggctggttctgaatgatagtaaaggtagatatggcttaaaaagttgtgtgtgtaagttgaattaagaaaagtgaattgtggaaagagactagtcttccttctaagagagaagccagtcataattctttataaaacgaagaactgtttgctaagatgatttcttcattttataaagattcattacagagctctttgggtggggagtaatgattattttttaaaaatctcatttgtaagtttggtttttgattgtgtgtgtgtgtgtgtgtgtgtgtgtattttaaagtgaaacccaataattgattatcatataatgcttgttttttcaaatatcttatatcctggttaaattataaaagtttcttgcatttcgtgtgaaacatttcacttgttatctttgtaaggagttggtaattatatatttcaacaactggctctaggtttgatgttacaacatctagtattttttttttagtaggctcaaatatcaacaggcttttttcttttcacagcaagatgtgagtgagtttacacacaaattattagattggttagaagatgccttccaaatgaaagctgaagaggagacgtaagttaccgtgaagtttagcaatggggttttaggaattcattagatagcatgtattaaatgtcaacagagaaataagaaatcaagacagacttatgggaatcccagtattttctgtattattgacaagctgtttagaatttgcaggcacaaataatagtgtaaccaaaaaaatctaaaaagtgatccctggaagagctagtcttacatgcccagttccttttcttagattcaataatcacttttcatgacgaggaatgaatttgcggtggagaaagatgtcaggaatgtgaattgtgacaaaatccttttacgtagaagcatgaagacagggatatgaagtagcagtgcatgtgagcaagtggctctgttttatctgttcactcagggccccgaggtcacctaggtttctgggatcttgctggcagtgaaaattatactgtgtctctaagtttctgcccagaggtgacacacatcacttctgcaaacattttgttgggcagagctatgtggcctaacttcaaagtgagtaggaatatctcacactaattaggatggcggctacgaaaaaaaacgaaacaccccccccaacccctactgacccaagaaaataacgagggttggcaaggatgtggagaaattgaaacccttgtgcagtgttggtgaggatatgaaatggtacagccactgtggaaaacagtatggggatttcttaaaagattaaaaatataatcaccatatgatccagcaattctgcttcttggtgtatatccaaaagaattgaaagcagggtttcaaagagatatttgtacacctgtgttcatagcaacgttattcacaatagccgaaaggtggaagcaaaccaaatgtccattgataggtgaatggataaacaaaatgtgctgtatatacatacagtggaatattatttatcctgaaaagcacagaagttctgacatatggtgtaacatgaccccttgaagatattatgccacgtgaaagaagccagtcacaaaaggacaggtactataaatcacttatgtgaggtatcaagagttatcaaactcttagcaacagaaagtagaatggtggttgccagaggctggggggagggggagatgaggagttgtttaatgcatatagagtttcagttttgcaagaggaaaagaattctgacattggttgcacaacagtgtgaatatacttaacattaccgaactgtacagttaaagggttatgtacattttatcacagttttaagaagtgagtaggacagtgtatcttaccatgcacctgaacgtgaagggccagaattttttttcagtagcattaaagactgctatactacctactggggttcttgtaagaattaagagaagtacttatcaacattattctaaggattaaatgatgacccatttatcaagagagatggtatcccctctctccctttttaaacaatacttcacaaatcaattaatataaacacaaattaatacagaaaaatctgtacacaattgtggatacaacgcatttctatacagtaaggcaaggataaactttgtctttttaggtcacacaaaccataaaaagacaatttaaaattttcaacttttgtttgctccaagcagaaaagaaaaaaatgaattttggtattaaatgacttggaaaatttgtagatgactaattctaccagcagtgtgaaacttcacaaaagaatgaagtagctgttcagctactttgggtgaaaaactggtacctcgttccctccctggtgagggttgttgtttttggatttttttggactcttccatgtaaatacaggaaataacctatcaaaattttgtagaaatgtattctgattaaaagtggcttttcttccttcccatgtccaaataaacgtgcactacacagagtatgagattgaaatgtgtaatgatgataggaagagcaggcactttgtgcacaaactgtgtcaatttctcttccaagttcatacacgtagtagctcattttaactcctatgagagtcctgtgggtgcagctatcatagttatccgcagttgacaggtaaagaaatggaagaataagtaccttgtgcaacgtggcactgtaaataacagagctaaatgcaagtgcgtgatagccacataagtgtttttgtcttgtcatatgttatagttctttaatattttctctatttataggtccgaaaattgtaatcacatttatattttttaacatactttagggatgaagagaagccaaagaaccccatggtagagttgttctatggcagattcctggctgtgggagtacttgaaggtagagttatacatttactttttattgcaagtgaagagagattattattcattcattcgtctcgatagttactatttttttagtggactttatttttaatttgatatattctgtctagtaatttttgttggattgctactgttattcacataaagcacagaattgaatgaaggaaaaggaatgtacagagtgcattatcacatactaattaatactttattttatcctcatgttttttccagtgagagggcttccatgatacaattatgttggaatacagggattaatgggatggttgatagatcctttgaagataatattggagttaaatactgggcttgatatgatgctcactttctttttcatgttgaaagctgaatttagcaacttagcatagtcagggtattatagagttctcactttttcagtgattttaaatgtagatattagttttcaggaaaagattgtactctatcttttgaaaaatcagtgaagagtgatactactccatttaagctaaatacctgtttcttaaaatttggcctaagtagtttctgtttgggttccctaacaagggaggagactctttaaatgtaacttcatgtaataatattaggtcccaaagcataaacttttgaaaaattgtttttctcacatcacccaatgcatcaacttttgaaagttatctttttccagatcagctaaagtgtaaaatttgaaaaaatgctttttcttcacgatcttaagtagtggattccctgaagttctgtttgaacgtaggtggtttgggattcagaaaaagacaatactaactcagatgttggccctttaaaaagtcttagtgacatgttcgtacgtttttgtttgtttcaagtggtaacaacttatatataagttgttttatatatatatgcacatatatatgagttaatatatataagtttatatatatatgtagaatattttacatagtacatttacgttgggtcattcatcttaatcattctgattttatttgaagtagaacactatctgatgcagcgagtaggtctcatcaggtcatgactaggcactgtttataataccctgcatgagcatttctacctgtattatattgattcctaaaattgattgttattaaaatatttaatttgttggctgggtgcggtggctcatgcctgtaatcccagcacttcgggagcccgaggctggtggatcatgaggtcaggagatcaagaccatcctggctaacacggtgaaaccctgtctctactaaaaatacaaaaaaaaattagccaggcgtggtggcaggcgcctgtagtcccagctactcaggaggctgaggcaggagaatgacgtgaacccaggaggcggagcttgcagtgagctgagatcgggccactgcactccagcctgggagacagagcgagactccgtctcaaaaaaaaaaaaaaaattaatttgtcaatccagtgttgaagtctttgtacttggtattagtaagttgctttagtgattgtgttatataaaggtggccttaatacgttttcacttgaactatgtgtttgcttcagtaaaagtaatttatttcagagtactttcttatcactttttacatagatcttcctaatactttctttcaaaccaatggttcttcattagggatgatttttagtttgtttgccaaagtacccccactgcaaaagtccctcaactttttgagaacttctagttcattgtcccctctcagcccttctctgtacttcactccttcctttttcatctaaaacctaaaactctctttccccccttcccttctggcaccccctccctgttctctaaccttcattaagctgttcatcttttctgtgtctgtactgagtacctgaagattgctggcaaaaagtcacagaaatgggctaactgtagtggatcatgaatttgagtgatactgagcttccgtgctcccaatcctataacccaacttgttctgtgtaatcaccattctttctctcatttactgcaataaatattttcgttttttccactcatttcagatctaacttatctcttcattctctgagaaaatctttacctcagatttcatagatttactgtcacattaatgaaacttaatcacaggttttgcccagtccccgaatctaattttacatttgtagttttgtatcatattctaaaaacacaacattcccaaatatatgagcctcaggctccataacctagatctatcactacctctactatatttttacctgctcctacatataataaaggaattacccagttttatatcaaaagactgttctttatacgtgctcagaattccctcccttcatgcttttactcagaccttacttcattcgttttttcttggcttttgagcttctcccactctttctttctcatcaatatttacacattgtctggtatctcaaaccttaaaaattaaaaacgttatcccctcccatactctttttcagttaataccctctcttgattcttattcaaaattaagcccctttaaagagaggagttagtttcaactgattactccccatttattaaacctagccccagtttagtttctggcttcagaacttgtctaaaagggatcttgctaaggttattgattttctacatgtggttaaatccattagatccctttcagtttctgatatagtttggtcatgtcccaaaccgaatctcaacttgattgtatctcgcagaattccgtgtgttgtgggagggacccagggggaggtaattgaattatgggggctggtctttctcgtgctattcttatgataatgaataagtctcctgagacttatcatttattaaaggcacttcttccatggcggcgacaagagaaaatgaggtagaagtaaaagtggaaacccaggataaacccttgagatttatctggggtttccacttttacttctacctcatttcctcttgctgctgccatgtaagaagtgccttttgcctcctgccatgattctgaggcctccccagccatgtggaactgtaagtccaattaaacctctttttcttcccagccttgcctatgtctttattagcagcttgagaatggactaatacagtaaattgggtccggtagagtaggacgttggtgaaaagatacctgaaaatgtggaagcaactttggagataggtaacaggcagaggttggaacagtttgaagggctcagaagaagataggaaaatgtgggaaagtttggaacctcctagagatttgttgaatggctttgacaaaaatgctgatagtgatatgaacaataaggtccaggctgaggtggtctcagatggagatgaggaacttgttgggaactgaagcaaaggtgactcttgttatgttttagcaaagagactggtggcattttgcctctgccctagagatttgtggaactttgaacttgagagagatgatttaagatatcggtggaagaaatttctaagcagcaaagcattcaagagatgacttgggagctattaaaagcattccattttgaaagggaaacagagcataaaagttcagaaaatttgcagcctgatgatccagtagagcagaaaaccccattttttgaggagaaattcaagtcgtggctgcagaaatttgtgttaagtaacaaggagccaaatgttaatccccaagacaatagggaaaatgtctccaggatatgttataggtcttcctggcagcccctcccatcatagacccagagaagcctaggaggaaaaaatagtttcgtgggctgcccgtggtactcatgctgtgtgcagcctaggaacttggtgccctgtgtctcagctgctccagcttttgctagaaggggccaaggtgtagctcggcccattgtttcagagggtgcaagccccaaaccttggcaccttccacgtggtgttgagcctgcgggtgcacagaagtcaagaagtgaggtttgggcacctccacctagatttcagaagatgtatagaaatgcctggatgtccaggcagaagtttgctacagagttggggtcctcatggacaacctctgctagggcagtacggaagagaaatgtggggttggagcccacacagagagtccctactggggcaccacctagtggaactgtgagaagaaggccactgtcctccagaccccagaatgttagatccactgatagcttgcattgtgtacctggaaaagctgcagacactcaacaccaacccgtgaaagcagccaggagggaggctgtaccttgcaaagccacaggggcggagctgcccaggaccatgggaacctacctcttgcatcagtgtgacctggatgtgagagctggcatccaaggagagcatttcagagccttaaaatttgactgccctgttggatttcagactgtaacccctttgttttggcctgtttctcccatgtggaatggctgtatttacccagtacctgtactccaattgtaactcttctcaggaaaaaaatcagtcagtgttacagtttttaggttcaggtgagaatccttacataatcttaattttagtagccaaaaggccatgttgaggatcattaattttctcccttcttatagggagtaactagcttgcttttgatattacaggcttgtaggcggaagggacttaaccttgtcttagatgtggtttggactgtggacttttgggttaatgctaaaatgagctaagactttgggggattgttgggaagacatgattggttttgaaatgtgaggacatgagatttggaggggctagggctggaatgatgtggttcagctgtgtcctgatgtaaatctcaacttgaattatatctcccagagttcccacatgttgtgggagggacccaggcggaggtaactgaatcatggtggggcagtctttcctgtgctattctcatgatattgaatacatctcatgagatctaatgagtttatcatgggtttccacttttgcttcttcctcatcttctcttgcctctgccatgtaagaagtgccttttgcctcccgccacgattctgagggcttcccagccatgtggaactgtagttccaattaatcctctttttcttcccagtttgggatgtgtctttatcagcagcgtgataatggactaatacactttccatattgaattcttaccagttgttaatgctgatgactcttaacctcttcttcctcctttttcctattctttccttaaaaacacatttctctggcttttgtaacaccatattcttgtggcttttttcctgcctcagtgggtacttctaagaaaagttgtatttatagtctctttttgcatataaaggtagcagaaccttaggactttgtttaggcccatttcttcttcctgtcccatcccctaggcatctcattcagtgccttaatttcctgctgtcaataagccagcaattctatctttattccagaatgttaatcttagttacagattcatattcaactgtcttctcaaattgaaatctcatggatcataatgaaccagtgatttccactgctacctcaaaactaaagaaaaaaaaaatcctgtgttcttacttaagtggtgccattttcagtccataatctgccaggcatgatggttcatgcctgtaatcccagcactttgggaggctgaggcaggtggatcacttgaggtcaggagttcgagaccagcctggccaacatggtgaaaccccacctctactgaaaatacaaaaattagtcgggtgtggtggtgggcgcctgtaatcccagctactagagacgctgaggcaagagaattgctggaactcaggaggcggagtttgcagtgagccgagatcacaccactgagctccagactgggtgacagagcgagactctgtctcaataaaaaataaaatgtcatcatcatcatcatctagttgttcaaaaaaaaaaaaatagtaatcattatcatcatctagttgttcatgccagaattctgttattcttgatattttccttcttacctatctcttatcctgctcagtcaagtcctgttggtgcccttccttgcatatatgtataaatgtatatgtatgtaattttatctcttttctgtatttttacttttaacaaccttcatccatgctacctttatttctggatagattctgcaatagtcttttaacagatgaccacccacttcacacagggactttaaaggtgtttcagagacataaacctgagcctgttattcttagatttaaccattcagtgactgtattagtccatttacatgctgctgataaagacatacccgagaccgggcaatttgcaaaagaaagaggtttaatggactcacagttttacatggctggggaggcctaacaatcatgggctggggaggcctaacatggcagaaggtgaagggcatgtctcacttggtggcagacaagagaagagaacaagagccaagccaaaggggaaaccccttataaaaccatcacatctcatgaggcatattcactaccacgagaacggtatgggggaaaccgcccccatgattgaattatctcctgctgaatccctcccacaatacaggagaattatgggagctacaatttaagatgagatttgagtggggacacagccaaaccgtatcagtgactttgcattatacccagaatgtggtggggaaaaaaattcttaataggaccacaagaccttgtagattttaactcactgcctgacttttcattgtaatctctcccttggttccccaagctacactaacctcctgttagttcctaaacatatcaacttctttactgccttaaagtcttcatcatgctgttccatggccaagaatactctatagtcccccagcactctggcatggctaactcccactcattattcaagtctgagcttaaatgtcctttgccatggaggtcttccctgctctccccaccacctccaagactaagctcccatttttatacctctcacataattctgtctcatcacaactttctttttataacaattgtaatataattatttgtaattatttgtttataaatatatgtgaagttaatgggtataatgttttttaaatgaggctgagaattttctcagctcagggaccatatctctcttgttcactgctgtatatattcccagtgttcagtacagtatcttgcccttagaaaatgcttcttgcgagaaaaaatatacatacatatgtgtgtatataattacatatatgtggatgtgtaatatctatggctgggtataaatgtacatttgcacatgtgtataaaccaacaggaaaattaacactaacacttctcaggaatgaaatcagtcagtgttacaattttcaggttcaggtgagaatccttacgtactcttaattttagtagccagaaggccatattgagtattattaattttctcccttcttataggtaaaaaatttgaaaacactgaaatgtttggtcagtacccacttcaggtcaatgggttcaaagatctgcatgagtgcctagaagctgcaatgattgaaggagaaattgagtctttacattcagagaattcaggaaaatcaggccaagaggtgagtttaacattttcattgtcccctttcttccctaggtctttcttacaatgctatagcacaatgtaaggttctaattatagagctacctaataattgagagagaatactcagagagtatgtttggatttaattggtaatttagacattcaggagacctgtccagtcaatatggcctataatctatgtcaaattctcacttaaataatttatctcagaattttaaaatcttaggacattgttcagtctttttagacctttcaatcaaggtaccagccattagcagcatgctagttcctcgatataaagaagaaaaatcctgatattacagtggattttaaaacagatatatgctacttatatcaactgttattggaatttgtccacgatgcccagattccttttcttgtaaaattgctatgtgattgcataaggtcagatggaagaacttcccttctcaaggaagaaatcatttttataaaatattgttaacttatatgtctacctcaactagtttctttctttccagccatctctgtttctttatccatctctgtagctgcatctgtgtagccattcatccatgcattcatctgtcagggagttttggcactgtaatagtaagcaaaggacatacgtgcttccccaatcagttactgttaagaaattgctgatagttgtctagctgttaaactccatgaatgtggctagaggtctttatctgtgtcattcactattatatccctagtggtaatatggtaactgcatacataatacttattgagtgaatgaatgaaatgtcttggtgcttatcaaacaagtttctgaggtctttatactgaataggtgcttaataaatattaagtgatacgatgtctctgtgtttatctaaaaggagactttgttcttgtgtttttgagaacaaattgcttttgtctaaattttaatttttttttcttaaagatgcagttaaccctttcctgtttcaagtgcatactcatttttttcctcttcccccccacatacataaacaaacaaaaatatgcttttcctgttaagaggaagagatgtatttgaaatagtctttctctctacatcgtagatcatctatttcagtgattctcaatagagaatagccagacttcaaagttatccaggcagggtctacgatagggatgtggtatatggacacaagagctgcacaagtaattctgataaaaacctctaaataagaatgtttaaattcagcttattttattgattgggaaacagatctcttaagagtgggactttaccagtatcccacaatggaataagaaagcagactcttaaaatccgatctgtttgctgttaaatgaaaggatgattggggtagtaaggcagggatggtacttgtttttatattatcagagtagctgaaatacactatggtttattggtaatctttctcacatattcccagcttttaaaaatttttattgtacacagaattgaaattttattgtttatttaaaatatcttagatttgtcctccatctttttattggttttatactctgaatgcccctatgttgcaatataaatgttctgcctaggttttttcatctagcctagggaatataatgatttatgatggttctctattttagcagtttctaatctccactactgtggcaaatttgattgcctgtgattcctgctaccatttttctagatttgctggaggctatagtttcaataataattcagcttgatttaagagactgtcactgactaaagtatagtatcagtttttaaaaaataacatatttaaattatagtcttattatatcctttagaaaaagtattcttgaatctctaaaagccagtaagtaacattacagactatttctaaattggcataatccctgataacaatagctttttcctcaatctattaaaaattgttgattttattttggcccagagaacatcttatttgctgaaatagctgtggccaactaatatataggaagacctccagtcttccaagctaaaacatccaattggctataagagtttaaattttgtggatgatatactaagagacaactgaataagttaaacatgattatatccaaaataactgcttaaatattttttaaatgatacattttaacttttaaatggtatgcaatttgtagatgagtcagactctccaggaaacatggagatattttttgattgtctgttggaggaaaaaaatttcagatagtaaatacttcacttgtagtgtgagtattcactactaccagtgtgtgctgtgtgttcttttagactattgctatgcacatataagtatttgcatctgtccacactgccccgaaagttgcatttttcactcagcagtatatcatgagcatgcttctaagttagtgtagagctttacgtcagtgtttttaaaatctacatagtgtcacatagtctgtatttataaaattaaattgatttaattatcctgtaaggcagtaactcgaaaaagaactattctgaagaatgtctttgtataaatacccttgcgcacttaggaatgaagtatagttagaagtagaatctttgggtcacagggcatactcatttagatgtgttggcactgccaaatttcccttcacaaagttgtaccaagttataataaagtgctagaaggagtttttacaaagctttaaaaacaaaattagagaaacaatatcgacatgtaccatattagacatctgtagaggttatatggggaacttaacttttgaaatcaaagggcaaatgagtcaaggcaattaaatgactggagctaattttttaactggaataaaaagtttttgcttcttgtgcatagtttacatcctggcttggtttgatattccgtggggaatttgaagtgataggtgtgttttttctgttgtttttttctctccacatttgtgtaatcctctcataaaagcaaggtatcttatacactttaatagaaaaccagctattaaaactcataaaaatgacatactctttaggaactacttttgttaacaggtgagatttctagaattgtgatgaatttagaagcacttgtgctgccaatactgattatgtaagttctttattcactaactgcagaaatctattcctcctgtagtttcattatctagtaaaataataatatgtttagagatatggagaatgacctctgtctcacaagcatggcatactagttagattgtagacaagtagatatagttttttgttgaatggaaatatttttttgaaagaaaaatttctcatgtttcgtattatttaaaattcaaattatgtactgctatactacaatccaaatattgcagagctagacataccattaatattttaaaacatgaatttacagaatgtctggttatctcatcttgtccccatcagctttagaatgagaaagtgaaatccttccactcttgtagtaggaaaaacctgccatcgctgatagaggaaaatgcattcataacagagacatattacataacatttttgaacatccttttgtaaggtatggaagctatttatatttcctggacttttcatggtctacagaaaagtgtaccccagtttgggtcatttcatttcttgtggccattgtagatttccatgaattaaaatatgtaactatttaattttaatggtgacatttaaagtattgcaataaaatatgaaagtgatagttcttgaaatctactttcttgtttgagtatcataaaatggagcagagaatattatcctaaagaatcaaaagtgttctttctgatgtgtctggggtaatgttttaattcttaataataattttatatgtggattagaactaactcaaaaattcttgccagttccatgtgagatcaaaatgagtaagcaaactttgctaatcaaattttaaaacttgagatgtttcttatatttttcataattttatttaatccgtttcaggtattatccatataaaacaaattccttaaactttagctttcagtaaaagataaccatccagctcaggaaatctcagttcaagtaattatagcattttgaaagagaaatagtattgaataccatttgcttttatttgctgtagagaaaagtagcaactttccagatcctcctcagattcagtttgccagatgtgtgccattcatgctttttttggatgttcaaatttaaatttggtatattcttaacttattgacagatgtgtggtggcattttgtgacacttgaaattatcacacacaatagattatgcagcagtttcgcatattgcagtttataataagcacttcagaactattttatacttctgttctttgttgatttacatacaatctttctttctctttaaatacatatgcttatgtataatttgaggttgtatatgaaaataattttcttttaaaaatgttgaatttcatgcttaattgaacagttaccaaagcatgtatggggattaggggctgggggtaggggaaggaaattacggctatactcattatcagaatttggctcatagcaatgagacattcaattctttaaacactagttattttaaaagattttaagtaaattactctaagtattaactttttgttagtgatatgtctttttcataaattagtatgaaatccagcagaggagctaaagctaaaacaggaaaacaccattttttcatttttagtatgagagttgtgacgatttatgatataaatttttttttgagtactccctctcataagttattttatcacaggattttgatgctttggttaagtataagtgccattcaacatcacgttgaagaagacagagaagacttgagctactaagtcatggttttaaccagtgtctttttctttgggctagaaattctaatgtaaagaattattttcgaaggatagttgtgagatttctttttttcctgatcatatattatacccactcttggaattttcaagaggtgtggaaaacttttagaaagaggttgagttttaactaaactgtgtacccagttacttgtcaggtccgcattgtggtgatacatataacaatgtcagtgcccacatcctgtgcctaagattgcagtgaagaaaacaaaggtggtattaaagtttttgttattgttttatttcctttcagcattggtttactgaattaccacctgtgttaacatttgaattgtcaagatttgaatttaatcaggcattgggaagaccagaaaaaattcacaacaaattagaatttccccaagttttatatttggacaggtatggtttgatatactgcatgacttagtttgaaacagtttagtaagggagaaaatattgtttagaggaaaattctgcataattttcttagaattaatttctacttttgcataatatacctaataccatttgtcaaggtagatgaaatttactttgtattagaaaagtatagtttttgggaataatgttataaggaaatttaaaaaagatgaattttgtaatcttaaaattcagaattttaaaaaataccattttgtattatctaccttacatcttatacaattttgaatgaattgatgctttgtggtgatgtctgtacttaatattgtatctatctatctttctgtctttctttctgtctctctgtcttcctgtctttctgtcttcctgttttcctgtctttctttcttttgtttttttctgtctgtctttctgtctatctttctgtctttccttcttttttgttttgagacagagtcttgctctgtcgcccaggctggagtgcagtggtgcgatcttggctcactgcaaacaccatctcctgggttcaaatgattctcctgtctcagcttcccgagtagctgggattacagacacccaccatcgtggctggctaatttttgtattttagtagagacgagatttcaccatgttggccaggctggtcttgaactcctgacctcaggtgatcctcccgccttggcgtcccagagtggtaggccgggtacgctggcatctggccatattgcatctactttcatgatattcggaaatgctaatgattacctttttctgatagatacatgcacagaaacagagaaataacaagaattaagagggaagagatcaagagactgaaagattacctcacggtattacaacaaaggctagaaaggtattttaacttttatgaaattaggagataattatcagaaaccatgtatttggtgactagatttttaatttcaaatttgctttgagtgatttataattttaggagtagttaatattgtgtgaatagttttgagttttgcttgaaactaaaaatctatagtagactttaaaaaattattctagtgtttaaaattaaatatctcattgtcaacaggtaatgttcctactgctgaaaatagatacaaagttaaatgaatatagttttgaccttcctttttgcatgaaactaaagattactcttgagattttcattaaaatgaatggtatctgagtttttctccttaaaacaggatacaaactcagctgcctaccaagtcttctcagcagcttcgtaaaggaggaaattgtgtcaggtgtaagatggtatgtgccgggagcctagagagcaatctgtgtgtacagggaatgaatgccattccataccagtggatggtaccatgtatgagtatggcctcactgttgtctattgatttggatcatttctaaaagacgtcagaatctggactgagaaatgttctacaggccagacagaaatctaaaggctgaaatgtcacaagtcatttcagtttgcaaaccccaatctgctctgcattcccctattttaggaattttcaaattagtagtctaaaacttcttacatcaaatagtatattgtattttaatgatttttattcttaaaaagtatgaataatcatattgaaacatgattagtggtaaaagataggaggatagtacacatcactgtcttgatcatgagaccagatgccagatctaaaaataaaaacagtctcaggagatgtcagttttcatcttcctattgagttacaatttagaacagcatttacagattataacagtatatactcacattcagtcccaatcggccttggtttcctgtctttggggaacttttaatgtttttcttaagtgtatattcagttttaccatcttcgttttaaagcaaatgaattttattgctgaggaagttttattgaagtatcgtatcacgttttataataataataaaggcccaaatatgctgtatatagaaataaaagcatttgtacattttatgattaacagatatttaagctatggttccggtcccaaacgattccccttggtagatgttcttcagtatgcattggaatttgcctcaagtaaacctgtttgcacttctcctgttgacgatattgacgctagttccccacctagtggttccataccatcacagacattaccaaggtaaaaagtaatcctgatgcaagagacagttgttacctttattacacaataatgtaactgctgcctttaaagacagtttctataaaatgtatgctttgatttacttcagtgaactcctaagagtagattcacttagaagactgtatgtcctctgggagtttttttattatttcagtagattttatggttatggattaaaattttaatcacattttttttcagttcagaattatactttagcatgttttggtatgtacatatataagattcagcattttatgatccataaaaatagtactatcaaattagaatttgtttctgtaatgtaagctgataagccagggaaaataatatcaccatgcgtaagattttcttgttttttagaaataaatatgattaagctgttttaactctaaagctacaacttcatcttataataatttagttcttatgtattaaaaatctcatttggatgttagatcaatccacatatttctttaagattttttcttttgaattacaagccaatttaatactgtgggtttggcacgatctttgtcaagagtttcagcttgaaaggttaataagaaatactctatgctttgatacagcacaacagaacaacagggagccctatcttcagaactgccaagcacatcaccttcatcagttgctgccatttcatcgagatcagtaatacacaaaccatttactcagtcccggatacctccagatttgcccatgcatccggcaccaaggcacataacggaggaagaactttctgtgctggaaagttgtttacatcgctggaggacagaaatagaaaatgacaccagaggtaagaagtgtctcatagcatggttactgtcacctcagatggatatgtgtaatgttaatattgagaagggaaatcacgtctggattttatatttaaatattatagtcatttttcttttccagaaagggttttaagataaactagtttggctccccatttttataatctcaatatcaggttcacagggaccaaaagattttccctggattgcttagctgattaatgacatagcagatggcctgattttctagtttgctgctctaaatttatatcaaactggtattcacagttactccattggagaaatgtcatacaatatcaatgtttgtacatatcaattaggtactaaatctaagtttgcacagggagttccggtgattaaaaaattttctttgggcttaagaattagaaatgtgaattttaatttttaatagctctaacagatttatgagtatctatgatcccattactagtctgtaacagagtttttactggcatgcagcaaaataagaaaaataaggacagtgctctgggtggggtgtgtgcacttgtgtgcgtgtgcgtgtgtgtgtgtgtgtgtgtgtgtgtgtgtgtgtgtgtgtcaagttgccatctgtcctttcttggaaggaactctcttttattcttttctattctattttttcttttttttcagaataagttattctgaacttttctctttcctactttgctgctgttaaagtgtacttaaaaaaatggattatggtagattttattacatttttttccttaaatgtgaaaatataattccctattatcattccccaattttatgctgatttattgatttttgaaaaaaatgaactatgtgacatggttggaattatattgaacaatattgattgttggatattatatgaccaacttaactctttatagacaatatttgaaaaagaatggccctaatttagtaagaagtacataaggtatgatggtgactaacagcattagtagctgtcaagattttctttagtatttttcaaataagagggaatttttaaaaatatttgaactcattaacaaacattaatcaagcaaatagtgttgatgaagcactatattaggcgttgggtaattttctactcctcatggcaggttgtttttaaaagattacattcagaggagtggaagctaggaagcttttgacacctaagtagtggcattgagggagggaagaagtgaatgtacttaaaatactctttggagacaactgacagatgtgggtcattggctagaggtaagagagagggacgaatcgaatgattctctcagttcataatggtatgaataaccaaatagaatgtattttggaaaaaaggtaaagcagtgggcaaagaggttcccactcaggggaggaaagagaaatatgatgagttctcttttggccattttaagtttgaagagcttttttgagacggagtctcgctctgtcaccaggctggagtgcagtggcatgaactcgggctcactccagcctctgcctcccaggttcaagcgattctcctgcctcagcctcccaagtagctgggattacagttgtgtgccaccacacccaactaatttttgtatttttagtagagatggggtttcaccatgttggccagggtggtctcaatctcttgaccttgttatccgcccacctcagcctcccaaagtgctgggattacaggcgtgagccaccatgcctggctgttaagatttttatatgtaatactatggatcaggaaagaaggttttcctcaggatattttttttctttctttcatccatattgatgttagcagttagcattattttgtaaactattgtgtaatattccaacacacgggtatgatgtaattcatttaattcccatattgatatttcctaaatagtgctggtcttcgatatacatatttatacacttctgtaagtaggatatgttcttttttatgttcaggggtacatgtgcaggtttgctataaaggtaaattacatgtcttgggggtttggtgtaagattatttcatcatgcaggtaataagcacagtacctgataggtggtttttccatcctcaccctgctcccaccctccaccctaatgtaggccccaatatctgttgtttccttatgtccaccatttctggttcagagtgtgtatattttaaattttgacgactgttttaaaattgtcactccaaaacattaaaccagtttgcattcccactgtgtgagagagcctgtctcccagtatcctccctagccctggacactttttagtagtttttcacaattgaaaaactggtattttagtgttttgatttgcattcccttagcttcgagtgaagttggatatttatattgttctgtaaatttcttgtttgtgacatttgcccattttttaagtattgagctatttgtatttttcttattacttaatagaaagtttaatgtattgtggatattaacactttacctataatatcacatatgctgcagatattattttcccagtttttcatttgattttatgttggttttgttttctttttataatgtagattttttaaagtgttgggcagggaggatcttatcttttcctataaggttactagttttctgacaggcttaagacaggtctttccccactctaaagttagccagtttcttttatagtttttcaaggtttcttcctgattggttcagcagcttcacaatatgatgtggttacaatctaaccgtttccttattgacagatatttaggttatctcttttttaaaaattattgtggacaatatgactgtgaacatccctatctgaacaattttgtaggattattttctactagaagtagaaataattgtcatgggagtgccataattttattttcactggtgattatagtcgatttttattcagttatgtgtgtgtacaagatatgtggtgaacatgttttactttgttcttaagtttacttgtgttatagcaatatgtaaggaagcttagctttcattttcattgaaactctcctttatagatttgaacaaaattcacttttattggctctgcacattttctagataaatcatatttgtgttgtttttaaagtatgcatttgtactgtgtcttttattaagaataactataattcattttctacagatttcaaatggtaatgttttttaagaaaagttttaggaaaattttcctattcctctaacatgtttgtaggaaaaacattagtccttatcttataagtagaaacacatttgctgttaatcattaaatgacaccttatatccttagatttgcaggaaagcatatccagaatccatcgaacaattgaattaatgtactctgacaaatctatgatacaagtaagtgaaattttgagctagtaatcattgtcaaaattatttacatatattttaatttacctttacattatcttaatctaatttttctttacatgttttgttttaaaattttggcaaatcttattgtaaaataataagggcttgcaatatgtacaatgtgacagttcatctgaatggggaaacttttataacaaatttataacaaaattcatgacaagttttccccattcagttgtattttcacaccgtatgtgttgtgtacccttactattttacagtaaaatctaccaaagtttttcaaaaggctatagcatctttaaaaagtcttatgggagaaaatctatggttgttaaaggatattaagatttgggaagaaacttaaggactccattacattttaacttctggtgtatatcatataatctattttgttaaccgtcaatttagaattctgaagatgtagacacatttgctatatgtaaaactgcccactataagctttttattcaaataaacaattaggccaatgagtatgtacacaataaatacatttttagtttttcaaaaatcatctttttaatctatcaactttgcatatctttagcttattcagattccgtctttttaaagttttatagtttagtttttttcaaacttttaagcccagccagttctctctcatttaaaaaaaaaaatgctcttatggttttctccaaacaggttgtttgtggatttcatggaatgtggtatatagtaaactacataattgcagtttaactcttctttttttcacatttaggttccttatcgattacatgccgttttagttcacgaaggccaagctaatgctgggcactactgggcatatatttttgatcatcgtgaaagcagatggatgaagtacaatgatattgctgtgacaaaatcatcatgggaagagctagtgagggactcttttggtggttatagaaatgccagtgcatactgtttaatgtacataaatgataaggcacagttcctaatacaaggtaagaatatatagggtggtgtgtatttttaaatagtcataaaagtggctctggtatgtggtgtgattagttaagtgtaattcactcagacgatgaaggatgtggttaggaaatgctactgggttttgacaagactgaattgaaaagtaatgtcgtcagggctaagaattcgtatatattttgtattccaagtcaactattaaaggtaaatatgacctttttcgtccttgctaaaaatgctttagtgactgttccacagattgactcacatttaatatttaattccttagcctaacatatatggcctctgttcttggcctctgattatctccccaccttcattgatcaccagtgttccttttgaatttatatccttactgaacttcttgctgtatctgctcatatcaaaccatttcacacatttatgtttgcatgttcgtatatgttttattttttgctagtaattcttttgcctaattcttgtttatctgtcaagattcaattcaggtgtcatttcccctgcaaactatttcttgatctgccaaaaagtatctctccttatgctgtcctggcatctgtctactgggcatttactgttgtgtattggaactgtgtgatgacttgtcttgcacatttctctcttatctgctcagagccagagatcatgtcatactatgtctgaatctttttaatgctgatattctgatatatgctttgcatatagaaaataataaaggtttattgaaactgataaaaataatctttttatatttagtcattcagaatcagctaggcagtccacttctgactaaaaaaatgaagttatttttctgtgtgtgtagtagaagttcagtaattcttctgaatactctattgtttttaagatcttgctatattaattttcataattgcatatttaagtctacttaatttcttcatatgacaaacaattttcattttattttgagctaataaggttaacatgattatgagttgtttacattttgtgaaaagttttactttttaagtgatcaaacatctggtattttccaatagtggcagaagtagtattacatcactgttagagtagcaaagaaaaaaaaaaatggccgggcgcggtggcttatgcctgtaatcccagcactttgggaggccaaggtgggcagatcatgaggtcaggagatcgagaccatcctggctaacacagtgaaaccccattctactaaaaatacaaaaaaattagccgggcttggtggtgggcacctgtagtctcagctacccgggaggctgaggcgggagaatcgtctgaacccggaaggcggaggttgcagtgagccgagattgtgtcactgcactccagcctgagtgacagcatgacactctgtctcaaaaaaacaaacaacaacagcaacaaaaaacttggctttggctttgtattttctgtcacttctactcttaagataaaaaaaaatctgagaccattacctatgatggattatcaaatattttcatcattgtttttctgagcatttgtttgagttttaaaaagttttgtagataataattatttgctaagcaatagtaattcttaagtaatatgattggctgagtggtaataattcatagtttaaattctatttgaaatgcagtctattttgagctttgcattttccctttaattcttaattttatactagtttttgaaatatgatttgcagaggagtttaataaagaaactgggcagccccttgttggtatagaaacattaccaccggatttgagagattttgttgaggaagacaaccaacgatttgaaaaagaactagaagaatgggatgcacaacttgcccagaaagctttgcaggaaaagcttttagcgtctcagaaattgagagagtcagagacttctgtgacaacaggtttgtccatttttattaagttgtgtttgattatcaatattatttttataataagatatgctcattattaaaaagttttagctatcttaaagtgtgaggaaatcagtagaaatcatttcaaattccatcactcagattatcacagttaacaatttagtttacctttttgccagacaccactgtatatatttatatgtttttcaagataaatgagataattctgttgactttccctctacctactctgcctgtgttgggtgggcttgaattttcttggcaagtagcagagaaagctgtgaaatcagcaagaaacccaaaccaattcactaaagctatcaagagtatcaattcaataaagctatcaagagtatcaattcaataaagctatcaagagtagtaattttaaatttggccaaaataatactaccggtatattcatatatactttgtgcaatagtaaaatactaccattaataactatttgatgtttttcggaattcttaagattaagagaaaattgaccaaaactatttagtatatcacaggtaaaaagtaagtgtatagacctgtaaaccaaagatataaatgcataaacatataaatatttaaaaacattattctgaaatgaactattagctgatgaaatcaataagtcaaagtaaacactgtataggaattaagaaaatagtttctagtaaaattgaaaatatattgtctttttattttcttaaaagattactcttcactgagttgcaaatatgttttagggcaacatgttttctggtatagaaaatgctatttctcagagaagctataaattaagcgcatatattttcctcaaactcatttgtctctttttataactgctagtggatattattgaataactttttttttttgcaagatctgcatgttttgtgttttaaggaagtagttccagcttttgtttgtttaatttcatctttcgcagacagaggtttccttgcagcattacctggttgggcttcagcattatcatttgaactttagaaggaattattacttcaatagaagattgttttacagtgctacaatgtagtattgtgactgtcgcaggcatgcacaaatctgtccagatacttaacttattttcatgtagatcaaataattgtcgttgattttgatcctgagaggcagataattcagcattttttaaaaagataatggtatcacagcaacatttggatactacagtgctatggagaataccaccattatagtggctggtgaactctaccattatgtagggctgcacttttcccccacgtgtacaaggctaccgcgtagagcaggtgaagctatgtgggtccacaacaatgtagtttttagtagatgtcaagaggtatctaagctcaaatcacagtgtagtaactatattatagttcctttcatttttaaaacatttctgtccctttgtgatttcatgctttgcattctgtacatattctttccaaatcactcctcagaacctgccccaagatggagctactgtgttattgttcccttaacatttacttattccattcacatgtgactattcttgttattagtgggaggaaggggctgcatagtgtactataagcagttgtggtacctaagctcccagacacaggtgaatcctccattcattggttaagctccagttttattcttggctcacctatattttgtgataccaaaatattaagttctatatatcctcctcctcttcatcctgtctgtttctcatctctccaaattttcagagttaacatattttatttctgcttagtcaaacgaatacatatttccaactaatattcctatctattaaggactagccttgccccatcctcattttacatttgtcatcttttttctttctctgtgaaaagaccatgtgtgcataactgcatccattttcatgatcaatacatctgaccatacactttacatggtgttttgtaatttttaaaaaatgcagtactaggtattggacatatattttcatgtctgtttttaccatgcaaaataatcttagaatgttgatatatttctgggaggaaccagaataaaagatgaagagatggaaatggtcaattcctattcctagataacttttatagttacctttcagcgtgggttatttagaaagcagtggtaatactacttctgtaggaaacattgtatcctccatagacttgacggaaatatgcacttggtttgaattagtagaagtagaacatgccaagtccataaatttacagagtgagattgttgtttaaaagattggtttctattactgttatctttgagattatattaagaaatttgttctctgttgcaggatagtttcacatatcataattgaataagactaatgtttcattagaaccatttattccctattattaatagggaaattttattttaatgtccatgccatcctcttctgattcttctcatggttttcaaagtaagtaatttaatttggtataatacttccaggatctcaaagcaaatctgtattttaatctctcaggtgttcactagtattaccagtgactagtggaaataataaaaggaaatcttgttcataaaatccaacagaatgatttttttcctccctgcaaaatcttctcgttaaagctgaaacataagacctcataaaattcaatttctactgagtgatattccaattaagagtactaattcatattatattaatcaaattagtatttgttcctcttctgctaaaatgtgatcgagaaattcatgcgtatcagttcaccagcaccattcgttccctactgagataataaatgatgggaaagtattttttggttcatttcatgctgcttccctagatctgcttactgcaaaggcaaacttacctgaatacttttgttgagattttcagccagccattctttgctgtcagtgtggggatcagaatgagtaggggagcaaacttacctgaatactgttgttgagattttcagccagccattctttgctgtcagtgtggggatcagaatgagtaggggagcaaacttacctgaatactgttgttgagattttcagccagccattctttgctgtcagtgtggggatcagaatgagtaggggagcaaacttacctgaatactgttgttgagattttcagccagccattctttgctgtcagtgtgtggatcagagtgagtaggggagcaaacttacctgaatactgttgttgagattttcagccagccatcctttgctgtcagtgtgtggatcagaatgagtaggggagcaaacttacctgaatactgttgttgagattttcagccagccatcctttgctgtcagtgtagggaacagagtgagtaggggagcaaacttacctgaatactgttgttgagattttcagccagccatcctttgctgtcagtgtgtggatcagagtgagtaggggagcaaacttacctgaatactgttgttgagattttcagccagccatcctttgctgtcagtgtgtggatcagagtgagtaggggagcaaacttacctgcatactgttgttgagattttcagccagccatcctttgctgtcagtgtgtggatcagagtgagtaggggagcaaacttacctgaatactgttgttgagattttcagccagccatcctttgctgtcagtgtgtggatcagagtgagtaggggagcaaacttacctgaatactgttgttgagattttcagccagccatcctttgctgtcagtgtgtggatcagagtgagtaggggagcaaacttacctgaatactgttgttgagattttcagccagccatcctttgctgtcagtgtggggatcagagtgagtagggtttttttttctgagtgtgaacagcacaccctacctaaggccacttaagagacactggagtcagaatctctggagaaaggatctgatacagtgctatcttaaagagatcttcagataattctgaggttaagcagcatggctctaggctgtatttataaaacagaaattatgctggagagaagagcgttgtccgagttactattttacttatattactcttgtcttatccaagaagtatctgaagtccttacaatatagcacacccagatttctttaaaaaataaggaaacactagtgaagattggaatgaagtgtattgcgtaaggttttataaatttctctagaggaagcaggcagagttggctctggaacttctctacactgtctacaagttaaaaataagctgatgttccaggagagtacggttggatcctgagagtaagacctggtagaataaacagtatcgtcagtgttctcagattccttgaaagcaggaactaggtgatattcttttttttttttctgagacagtttcactttgttgcccaggctgaagtgcagtggcatgatcttagctcactgcctgccgggttcaagcaattcttgtgcctcagcctcctgagtagctgagactacaggcatataccaccacactgggctgatttttttgtattttagtagagacaaggcttcaccatgttgatcagtcttgaactcaaattcctgagctcaggcagtcctcccacctcagcctcccaaagtgctaggattacaggcatgaagccaccatgccaggcctggtggtgttcttatttatatctccagcatctagtataataaacgacatatgatagatgttccttgaaagttttctgttaataagttcattccctatggagatttccaataatgaatttcttaggggtgatcctcagtgtaggagaacataaaattttaaagtagaaacaaaatagtcacacaataaggaggcaggccaaatacatggggtgaggatgtagctctttgtcccggataaatttatggtttgactctggtttctaaacctctctcccccacacccctcagactttcttcggaatggggcccaggaatctgaagtttcaaaaattccaccagcgattctatgcaaccacctaagcgtggctctttgtaggctcttacagggtattgtggacttttaaatacatttctagaaatggatgcactgtgtatctctcaagcagtccgctttaaatcttcttcagtgtgaacgtaataagtattgacttactagtaagtcaaaaaaataaagacttctgaaagatatcagagatgttggtcttatttttatagttaagagcaacccttactctttaatagaaagccaattggtggtaaagttgaccttcttaaaagattgaagaccataaccaggaaatatgcataagtaaagcacccccaaacctcctcaatagcctgtttcaacatgaagatggacaaaaggagcagactcagagttccctcagaatgttgagttgtcttctataacagctagagaagcatggccggaaaatcactctgtggaggccagtcatttgaaaatcctagagaaatacccatagaacagatgagtgattggagagagactttaggaataaggatattatttacctccatagagaactggtcattcatggtgaaatgagtgcatttaaattttttgtttgtttgtttccagtctcccagggtttcaaaccattgtgggtttacctaccgtgactacaacaccactcatctaagttccctgggaggtatatacacagggaaaaccctagagaaaattgttctgtatggcatttagggaatttatagctgtgggccactagtgatggggtttttaatagggttagaggatgaacaacaattgtattatatggtaaaagccgaacttgttctgctgttgttcctaacacagaaatagaaattactaaagtgtatggtagggtattagttgcgtgagccttccatacagaacaacacaatataaccagtacatgttacattgaatagagagtaattctttttgtttaaaaatatgagtaggtaggtacagtctggaaataatgtatcagaaatattaatagtgcttatctctgagtaatgcaaagagttttaaattttccacatttttcttgtttgttctagtaaacatttttattctttggtttgataaattgaagacaaaacctctttttttgtcttctttgacagtttttttatacggactttattttataatctgattcccttgtaattcttctaagaccacttccctgtgagtagcctgtgtttcatctacaccagattactcatcgtttctattgcatataggaaattttcctgtcattatggcatgttcatgaagtatccttcatcttaaaaatgttcttttatctttagtgttcatgaattttttcatattctttaagatcttcctcatatcccagagtctttgtgagtttctctgagagcacttctctagtagctattgtcttttccctcttaattccaaccttttcttactaccaaatgtattatgttcttctctattgtacttatattttggcttgccttccagtgtagagtctcatatatagcagggattttatgaatctttgatcagaccttacaatgtgctattccttctgcctggaatcttttctattcttttctccaagataatcctctacaaatccttcaagactcatctaagttagcacctcttctagaaagtgtttcttaacaggcagcattatctcaagtatgtgtattgggtccacagtgcttttataaaaccttgtgcgtaacttttattgaatttagcacattgtattataatagaatgtatatttatcagattttactcagagttccttaaaattagtgaagtatgtaatcttttttgttttttatatttttaatacctaatatagtactgaaaatggcacaggttcaataaacatgttgggaatgcaatttgaattttttgtttccaatctcccagggtgtcaaatattgtaggttcaactcccgtgacaacgaaaccactcacttaagttccctaggaggtatatacatagggcaaaccccagagaaaattgttctgtatgacatttagccagaagcattcagtgttactcataacgtttttgtactcaaactcctttatggaaggaaaccttggccctggtgacctaaggtggatttgacatgtgttgatcagataacattactcttggtcctaagaaccaattttacaaagattctaggtttcagtgggtcattagaccaatgtcagaccagatggatttattgctttaagttcacatccaattattaaccgttgacattatctgctatggtgaagagaggaagagtgccaaacacaaggaaaagttttatcaacaaggagtttctctcccagccctaaagcagctggcatgagccacctatcatgaagtcttccagaagcagaagtattgctaagctgatggtagccaaagattttctttatctattactcatgggcattgaaaggctattgcagtccaaaatcaggaaatgatttaatgaggacattaaacttcttttaacttctctccttcctttttgtacacattgtaagcatcctcacctctggttttccttatcacatagttttacctccatgatcttagttaactctgtcaaaaacttggtgtgttcatgtgcagtctccacacctttgtgtccaaaatatgtcttgattctagccaattttgtgtccccctgttgctctctctcttaatcagaaagcacatttatttctttttcatgttgctctactgccttctattaccttcaccgatctctagttttactttcctctctaattcgttcttcacaatatccccagaataattttttaaaaactgctatgttgccattatattatgtactatattatatacctgcatcatctcttgccatttctccactctcatactgtagtccagtcatattattcttttttttgaatgtagtccatgcttactgcatggactctccattcttccacctggaaaaacagctcattcattattcagcttaataggtcactttaggtcacatccaaattgctcacatcacttcactgccattgttcccatataaagtgttataatattgtcaaaatttatatatatgattatttggttagtggtgttctccacagatgactgtgagcttcatggagacagagactggctgctttgtcagagactcactgagataaaccctttaggtcatgtaaggattttgggcttgtctcatctagggaacacccagtggatgttcattgtacattgttggatatataagtctggaactcaaaagatggataggagatatcgtgaatttttattggtaccagtttgcctttcctctgacaacactcagctactggggcaagtacagaaaagatggaaggttaggttcattcagggttaagattttgtcaggaagtgtgaaggaagatgctgtggccagagaaaaatagctcctgtgcactctatggaaagtcagcccaagattgctgttcaaaccaaattcttttggtaaaatgctggcaattttccaaaatgagcttttgttatttctcatggcagaaaaatttactgtgaattccttaccataaactataatgagagctttctttcataattattggagtactcttagttctgggtttttgttttttaataaattctgggaagaagtgctatacgtggaaagatatattttactttgaatggaagactaaaattggttcttacataacttcagacatagaaatgaataaaagatttatcttagtatagactctgtggtttatattagatatataattgattcttttctcatgaagcacaagcagcaggagacccagaatatctagagcagccatcaagaagtgatttctcaaagcacttgaaagaagaaactattcaaataattaccaaggcatcacatgagcatgaagataaaagtcctgaaacagttttgcagtcggtaagaacttttcttttggctctctgaacatagccatggtcacgacatttcctccagtatagtggagagggacctgtcagggagtcaggagagacggggcccagtgatggctctgccatgggcatgatcagtgaccatgggcaagtcatctcatgcccaggctgtgatttcctcagctgtgattttaaagacacttttctcttaagtttctgtctttctgctagagaattctaatgaatcataatcatagattaaattgaccatttgatctggaacttaaaaagagaagtgtaaaatttagcagtatttctcctgtctctcacccattcctccatctgtaatctgattacatgggaatagttgagaatttaagacctaattgtcataatttcatgaaatgtgtttaacaataaaactactagatactgtagattagagtattatttaaaactactagatactgtagattagagtattattagaaggataagtaggatgttgcaaaactgtttgtgaatattttaagaacgtcctgtgcaaaaacgtcattaggctactctattgtagttttcaactacatctttttatagcggtaaattgagcatgtttggtgttatactgtgttatcagtgaatatggcattctgagagaagctatttcaagaatttgttactactaaaccttttagttcctgtagtcatttatcttttattagtgagcataagcagctctaatgcagattttgtggtagttccttttaatatttgaagattccccttgacaactaaaaagagtacgacatatcataattttacaacacgtaattttctgcttagtaagtgaattcagtgccagcaataacctgctaattgcaatgaggccttaaatatataataagacttcctttagccaaaatgttcaagagatatggtactctgttaattttgttttgatgaactaaataacaatacaaattattttttgtttgaacaattttgaaaatgtattaatatatcatcttattaaaatgtattaatttaaatagatatttgatgattccaaattttgcaaatgccttagaagctttaaatgaatttgatgtgaacatcactaactctaaagcttttcctggaaaatgctttgtttagtggatctgggatgtctgcttcttgggtgatggtaagaggaaaacctagggaaggagaaagaacagaggagtaggtacaaggggaaatagttttgtctgacaaaaactgcatttgcaaggcctctgctaattagaacttttatttgttaaaggcctaaattatgattaatgagtgtcactttttaagctggtattagaaaaccaaaagcattacttagcttaatgtagaatcctgattttaagtttggaaaatcatatggaatttaaatttgcagaagtcagctaaattttgattgctcagcttcataatatggatatcgtcttataaggtagcaacctactacctcatctttacttcagaaaggaggatgacagggagactatatgatatagacaaatacactatttgtctattcatttaattgttttctggagtggcatccacagttagccccattgcatatgtaaatcctgaagcaagtctgagaattcattaaccgtggcttgatcttacagtcagttgcttagcgtcatggtaactacttcatagcggtttttttcatttaaacttagcgtacactagaagctaaattgcacaggtgaaaagtatcttcagactttgggattaaacatttctggattttggaatattagttttatttattatgaatgcaaccttgaataaattgccaaatttctccagatagacctcagtcttcttttccataaaatgaaggtaattgtaggattagtcaagagcattatttgtaagtgcctggcatggcatgtagtaggcactgagtaactgttggtttccttctgttacatcagtcctagccgcttttcaaatatgcaatatattaaaatcaactttaatataagaaaaatttcctggaaagcgtagaatcatggaaattagagaaagtcttcaagtgtttaggcaccctgctttttagaaaaatgtctttaattttaaatggaatacttaggatattttcaatatagaagagtagaccctgagaaaaagtcatgcatagtcccactcactactcatagttaattattgtaaatatgttggtatttatttcacttttattttaatatgtagatttgggatttatttttatagttgagttgcatacaaaattttgtgttgccttcttttaatcacttaccttttataaccatttccccatgttgtaaactcagtgaaaacatttagtggctgagtattattccattgaataattaacttcttgtttatgtatctgctactcaatcgtatatttgtgtctacttttacattataaataggctgctagaaatgaaaacttttttcatatttcaggttatttccttagaatagatttcccatgctagaaatgaaaacttttttcatatttcaggttatttccttagaatagatttcccatggttgaattactagcttaaaaggtaaaggcacattaatgtggccgtggacttagatagcttttttgtcacccttcttatgagaccactttttaagaagtcatataattaatggatttcaggcaagtcataaaaatcttcgtattttaattatttttgcagcatattaactgagaaacttatttttaactcttttcaagtttagcctttgttaatgtattcatataagacctgaaaacaatagaaaaagataaataaacatgtattttactctagtgagcccttaaattctttacatggaaaatttttatggtactttgggatatctaaatttggcaaatgatactacagaattattatatgtggcaaagtttcttccccctttcagcttttacccatgtatttaatcagcattatgctgttgaaattcttcaatagtaactgaaaaggtttataaaacatttatgttccctaagtgcaatttttttcccccaaagggaatctgttttgtaaggattaatattctaagtgataaccatttgcttcaaatttatattttcttttcctaagatagaattgttttggattggtttgctagtgagaaatcatcaccacaaactccgaacagatttctgaatttacctgtttatatttcactcttgtgtacagagacctagcacagttcgtctcttatatgctagaaagattaaaaatccttaattaaatgtcatggaccaagcacatctctgtagaatgtgtgtgatagtagtattaggttaaaattattcaaatataaacaatttaaagtagcacaacaaagtagtacaatgactcatagctgtcattttatagaacagccgttacatacctggtgttggcttagctgcatattatctctcatgatcatgatacctgttcatgctgatcatttcctgttgaaaagttgtggattttgataaattaaggataagttgtggattttgatatatgtgtgtgtgtgtgtgtatatatatatatatatatatatatatatattattttttttttttttttttttttgagacagagtcttactctgtaacccaggctggagtgcagtggtgcagtctcagctctctgcaacctccgcctcccaggttcaagcaattctcatgcctcagcttcccaagtagctgggattacaggcatgtgccaccatgcctggctaatctttgtatatttagtagggacggatttcgccatgttggctaggctgatctccagctactgacctcaagtgatacgcccatcttgacctcccaaactgctgggattataggtctaagctaccacgccatgccaaaaatagtgtttattttaaaaggggcagtaccagttgcagctattggttttgttttgttttattgttcagttaaactctttttctatatatgcttccaggaagccaggaaatgttcacattgctaaaatttacccatatttctaatggaaatgaaacctctttaattgctgttataaaaatgttttttgtaatatcaaaacaaaagtttatctttgtgtatgaaaacttatgcaattcagttacttaagttgttttcaagcaccttcagtacttttggcttttttaataggtaaatagtggatatgctagttataaatatgttgaataagataaataagtatgtaaacatctgtatggtattttgaatgaatcatattagtgtcatgaagttttgaatgaaattttctgaattttacactgacttctgtattagtgtagattactgaaatacatagaatttgttaacaataaaaagaaaaaaaggaataaatctgattgagttgttaaaaatgggtatcagcttccaacagctttttcttattttcagcaggtgtttgttgaacacttaagatataaatatactggagcctcataggctgtatataataagttaaacaaaatagaatatggatattaactggatacacaattgattaccaaaaacaatagaaggataaaattataaggaaaaaaaccctacaaattctgatgagtttagaggaggtcatatcttattttggttgagatatcaagaaaggtttttgggagctattggactttttaaaaaattgtcagctatacagacaataatagaaaatacaactccactattttttatcttaagtacttaaagttctaaatactttcagggaaaaatgtaatgatattggtaatacccagtttgaggatgtaaagggaaaactgcagattttgtattactacttgatgaatgcatttgcttctgatgttcagttttaagtggtttcatttgataccaagtcaatgcaggtatttttaaaagatttaagagtatgtgcttaaacagtttaatagtgcatgtgcgttggaacttttaaaaataagtcatatggatacagggctgctgcttagggatgtgcaggttatacagttgtgcaaggatgccattgttctccactgttctcttttctaatgtttatattaatgatttccttctgcagaaacctgaaaatactacaagccaaccactttctaatcagcgagttgtagaggtggcgatccctcatgtagggaaatttatgattgaatcaaaggagggggggtatgatgacgaggtaccttttacagccctctgcaccattgctacttaacttttgctatttaatacaaatactttgggcatgcctgcaccctcatacttaatgtctattgccacataacatacagctttgccccctcatagtccaaaattactttaccaattattaacagaactttgaatttcaaatgaaaatttaagtagaaaacttatggaatttgtcaaaagaattttctgtttgtggagttaattcttttatgcagaaatagtaccagtttacttccaggttggcagattacaataagatttgtttaattagtacaaaaattttttgcatttaaaaataattttttatattccattcttgttttactggaattacttataatccttttcccactatctcctgccagaaaatcccacagcatgattgcaggatggataattgatatttttgcttctacagcctctccatgtgactgtgagtggagtaagtcatcaccgttactgagtgcctaccgttaataggacctccatgtttattcttatctcttcactgttaattctcatttacttagttttccaacagtatggaggcatttttgtttttcatgatttagttctttggaatccagatgaaaatgatctattgtcttattctatcagatgattttctccccttttccacttttctcttgagacacttaatattactctttttgaggaacggccagtaaagctgtttttgaacaggaacacagaggaggccgtaactattgggtagtgggggaggggggtgatttggaaaaatgcttgttggattctagtttttgtgggtttgtataagaattgcatttatgttaagttttttttcacgtaactttttttctgacttactccaatgttactatcatgctagagttaatcaccaaagtcagaagtgtcataaagacatatcactgtaccagtgtaagaaatcacacgccataaagagaataagcagatttgtgagataaactggtcagagagttttctcaagcaggtgttagatatattgcaattctcagtatataatccaaagtaaatacaatgagtaataggttcagtgaatcagaggtgacggaggcaatctcttgatttctgtaagatagcttcatagggctttgagtaatttcactttgcagatattttaaaatgtaaacagctaaaaataataagctattatgaaaacaaaaaaaatgcttaagtatttgtacttaatggctctacattgttctagttaactattttataaacatgctggctcttgaaaattatgggaactggcatgtttttaataaacctatcaatttattgattaagcagttaagtacttgttttaggatgtgccctctctcatttaaaaaagttgaattgtgattaatcatttaacactatcttttttgcaagtgcttatgtgacagagttgtgtgttttgtcgttttttaaaatttattgcagtgacagtttaacagtgcatgtgcattggaacttttaaaaatgagttgttatggatacagggctgctgttcagggatgtgcaggttgtacagttctgcaaggatgactagacaaggggcagaagtgggaagcaaattgagttcatgatgagctctctgaggcttgaggaagaggtaccttttttaattggtaaaaagggatgttgctttttctaaatagttcactcagaggatagcacatttttctaatttgtttgtctagaagcagggtgcctttttcaaattctccaattcagagaggatgcctttttgcagtttgcacaaaggctccgtatgagccagctgtgccctgtatggatgatcttaaaaggtgcttacatgcatattggattaaatttggtattaaaagtgcaacatttgatttataaatatggaaaacaaaagagtttcagcttgcatgtgaataaattattttagtttaaaaacctttttttaatgttaactatcttctgtggcagatcatgatgacaccgaacatgcaaggtattatcatggcgataggtaaatccaggagtgtatatgacaggtgtggccctgaagcagggttctttaaggtacaatgaacattttcattttcgtgtcttttctttttcaaaattaaacttcttaaaatattttatttctttgaattcagtttggttttctgtataatttctcttttcctatcttagttatggccaccggatatcctagggttttattttatgtattaattaacctaatactgattgtttttctcttaatccaggtaattcaagaaaaaaatctttttatttgagtcactctaatagtgtgcttttgatttgtcagcagaaatttgaattgtattttttatttgaagggaatgaggacattaatgaacaataataagaactgagtaaattgccctggtaatagtttattttatcttcattgttcatattattggtcaatatcataatattctttaattttattatcattaggtactaaattgctttttcgtttataaaatgatttatttattatattatttttgttatgtttccccataattaatttttgataacctagtcagttcaagacatgtgagaacatcaagctgaacacgattccatgatttacccacatctttttccctctaatatcagagctttacaatgttttgattacaattttttccttttacagatttgaaagatgaaaataccatgtatgttttgtcattttatttacattaactgaaaatcttcaagtttttttttttttcactcttttcaaacccttcttagtggttttaaaaagcagcttttttgaggtccagtttgctacagtgaactatgcatttctttctttttgacattaaaaatctaacatttttcattttctgtattttgccattatccaacttggtctttcaaaaactggttcttttttcactgtttctttcagtatacagtacaaaacaaaagccttgtacatagtagtagacctatcaataagcatttttgagtttgctaagattagggtgactaactctcctgatatgcccgggactgagggatttcctggactacaggatttaaagtgctaaactgggaaagttctaagcaaactggtcccaggacaagttgatcaccctattatgatcccataagaaaggttgaaaatctacttctaaaaaaagaagaaaaatgtattttttatagttttctgttttaatacatttctttatagtttctaggtttctaactggcttcctaatttttaccattagaaattccttcttatgcccagatagtctacattttcttttcttaaaaaaaaaacactgaatatatgtcctctaaagtatttatttcttgtggaaaagttatttatgatttacagtgccattgtcatttctgaccagattgggtcttcttatgttgaattgcaaatctcatttttattaagttaatatctgcatataaataatcacctaattgtatatattacaacagttagtaagcccccagtggataatgactttcagttatttaatctgtttggcattaattcatatctttaaatagaatatttgggttttttattcacagtttacacattacctgttgaatttgcttctgtggaatatgaatgatgagctctctttcttttcctgcgtcgcatacatacactgagagacacagctcctatcccccatacacacacacacacacacacacacgtaaaatcttgtaattttgattatatcagaattctgcatttgtaatattattatgtatgctatatgtgattgagttatattataaatattactactttctgtttttcccttaacttttgttttccttaaacttagttgttttgttttttggtttgcttagtttatgtgtattactgatttagttcaaagctgtccactgcttgtttaaatctcctctcattctgcctttaccagttttatcttcttgggacatctattctggagctttatgacctgccccaatctgtattggtttttcttttctcctgatccataactagtaacttgagatctcctttcaccatcattctggggattccctttgcatcctttcctttgtgtattttccatatttcatatatttttctttattggtttgctctatgattttgatagtacagcaagaaagcatgggcaagaatcaagtttgtggaagagggacagagcattttcttaaataagttatgttatattgcaactctcagcacataatctaaataaatactgtggttaataaacttcagtgaatctgaggtaaaagttttcaagttgctttggagattgagtcgaatttgacgttttactcatagcataaggaaactgtgctctttgtcagatgttaaaaataattactacagaatttctatttcactaaccattctccttactatcatcatactccctttcttgcttttttttttctgctggaaaaacacttacaagaatagtgggaatgtacattaggaaggaagtagtttatatgttgatattagcagccagactgcctgggccgactgctttctagctttgattttgggcaaattattcaatctttgtatctcagtttcccgaggtgttaaataactatttattttattgagtcattgtgagctttaaataaattgtatcaatgttacgcttttaaagtagtatctggttgatagtaaatgctcagaatttagctgttattgttgttagtattatcacgaagcttatcttatgtgtccagttctggtccacatatagtcggagatgaaaaatgagaaaaatgaatgtgccatatctgtgtcaaggacctttatttgctaatagaatttttttaactcatttgttagaaattgtcagtaccattttggagtaacaaaattagcagttttgtttggcttaacctaataattactatcataaaaccctctttctacctttttatgtctttagtgtgtgtatatgtttataaaatttctgaagtttgtgtacatttgcacctatctgtgattgagtaatacatgagtgtaacccctttatgtaaacatacatcaagttgtttctaattaatgcatgtttttggtaaaggtagaagcatttggacacaactctagctgataatatgtcaccttaaaaattttttcgtataaaaaatgaaagtaatgtatacaaaatgcagttgtattcagtaatatagaggtgtctaaaataaaactaacaatgacagtctctgccactgccatggccctattgtaaccattcttagcactgtgtatcttgtttttttctttttgtttataacaatgcacatatacagagacttaaaatttttttaatgtagattttactgttcataatattttgtaacttatatcactcagaaatctattgtgggcttaaagtttagacagtatcacattatctttactagctgtctgtatacacacatacacatgtgtacacatgtgtacacacaggtacacacatgtacacgcacacgtgtacacatacatgtacacacacatgcacacatgtacacccacacagtattccatgctatagatatattctcatttcttgtatcttaccctctttatggacatgtgtcctatattttctcccagtctaccatttctatttgaattagtttagagtactttttcttaaacaggttttaaaatagtatgttcgttttcctactttatggattttttttgccatattaaaagatctactcttacccaaagttatataaattttcccactacttacttaaaatacttttcttagtaaatttttattttttaaattcaaatgcttactgtttaactcattagcattttatttgggctttctgcgttctgtattaaatgaatttggtgtttttctattttgtgctgtcttcatcaagtttgcaattagggttatgttagctttggtaaatgaatttgagagctttcctgttttttttaatacttaaccgtgttagcgttggaatgatctgttctgttagttagaactcactcgtaagatcatacgagcctagcgccttcttgcggggtagatcttttaacacatttttttggttcattccatagttattggcatgtttaaatattcttcctttttttgattgattctaatcatcatcatcattcagtattaattcataaaatatgtacacaccatagaatctaacatatggttgctgcttctgtcttcctgtttcccctcaattagatatagtatttttaaatttttgttcttttttgtgcttagtgtattataaattgagggaaaagttgtttgttttgttttgttttgttttgtttgaggcaaagtctcactctgtcgcccaggctggagtgcagtggtgcgatcttggctcactgcaacctctgcctcccaggttcgagcagttctcctgcctcagcctcctgagtagctgagactacaggggcccgccaccacacccaggtaatttttgtatttttagtagagacggggtttcaccatattggccaggctggcctcaaactcctgaccttgtgatctgccctcttcggcctcccaaagtgctgggattacagatgtgagccaccacgcccggccgtgtttttgtttttttttaatatctcttctgtcctgccacgtcctgaaaaaatcttggtcgggtctattttacattagctttttggctatgaaagaaagctttttaactctgtgcctgtttaggtacttctgaatatggatttccttatgtattatgattagaccaactttttaatactctgaatgtttgctagtgataagaatagtgatgccactgtcagccttgttataagaaacttaggtctgagtaagtggacttgctaaagtttaacctccgaattaggaagttaccaacccagtcataggaactctttcaaccacaggccatcatcccacgtgaacgtctacccaataagaatgcagtatgaaaaagttaataggcaaagttgatctggaaaaaaaaatgcaatgggctacactacactaacttgagtccttcttcaaattgactttaatggttaaaactagtttctactatagaaaatccccaaataatagtggcttacggagagaagattctgttgtgtaaaaatgaaattcagaggaaagcaatacaaagttactatgataagcaaaaataaaagccagaagataaaaacaaaatattttcaaagtactcgttgcttgtatatatgtgtagaggtgggagggtcatattataattacaattatgggattagtgtaagttttttcatttattttaaaagacattaaaatttctttttttgtaaaaattttgtcggtatcaaagtacccttagggttttattgaagtaatacttttgtattataaaaattttttcttaatagttgtttcattgcttcataataatggtgtccctacttgccgtaactttatcacccttttttgcttttgaaatgtctcttaatcaccttgtttattcaatagatataaaaatgtttattagaatataaaacatgttgaaaagtacaactcggtgaatttttttttgagtgatactttccttatttacatggcctttaaggaatgtgaagaggaagaattatttatcaacatggtattaatgaaatcttgttccctaaaggtatacgcaggcctaaatcgttaatgcaaaaaatatacttctccatgcatcttgttaaattcaagacagcggtccaacatttccatgcttagccaaagaagactcttttcctcttggttgtgtacatttgtagcctgagttttaagtgccacatctttcaagtcagttacacatcctgcctttaggctctcagacttgtacttccaactctgggttatcacagtgtgtgtttacccatgtgaccaccaactaggccaagaggtagaacaggagtactccagaagtaccttttttccgccttcccatcactacagtctgtccgtacccaaaagtagccattatctggacttctaacaacatacgttagttttcttgttggcctttatacacttggcatcttttactctaggtccttttttgtctgactgcttttactcaacagtgtgtttggagcttcatccatgttatacagttgtcatttcttccctctcatggtattttgttgtatgactataatttttttctatccttctgttgatggacatgctaaaaaggtattgcctgtttatatgcagggcattgtcctaaatccagggatgtagctgggataatgatggactgagttcctaccttaatgaacctcattttctgctagggaaagaaacattaattagagttattagtatgataaagaaccagtgtaatgtggaaaaagaacataaaataagaaaacagagctagtacctagagggcttcttagaaaaagtgacttgtaaactagtaatacataatccaaaatgtagaatgtaaatgtttttctctcacttcctaattctcactccacagtgagcatctattcattgtttcttgtatatcctagagagatagatgagactggcttacattcaggcattcatcctgtatttataatttaaataaaagtaggagtatactctttctttttttttctttttttttttgagacggagtctcgctctgtcgcccaggctggagtgcagtggcgcagtctcggctcactgcaagctccgcctcccgggttcacgccattctcctgcctcagcctcccaagtagctgggactacaggtgcccgctaccacgcccggctaattttttgtatttttagtagagacagggtttcaccgtgttagccaggatggtctcgatctcctgacctcgtgatccgcctgcctcggcctcccaaagtgctgggagtacaggcgtgagccaccgcacccggccagaagtatactctatttgcttctttttcttgagtttatttttcatgtatatgtaattattcatatcaggatttgtagatttatctcagtatttttcctttgtttcctagggtttatcaaaatttatttaaatattctcctagaatagggtattcatgttacaacaaatttgaagaaagttaatacatttccacccaccatagaggctgatgggagcagtatgtcagcacactgataacttactcatactctaatttaggaaactgtctcctactagctgttaccagcaaggtctccatagtcctaggtttaaatcctaacattatcatttaataattgtgacctcaggcaatttattaaattatcagaaccagtttattcacttatatgagaagttatcttgagaattaaatgagataattcacgtggaactcttcaggcagtgtctgtcacataaagaacacctaagttgttacctattcttattaaatttatcagcattgttgttgctgaatatttgagttattttcaatatcgtgaacatttttgtgcatatattattgaacacttgcgtgaacatagcagagttgacaagtcaaagtgcttgcaaattttaaatactagtattatcaaattgcctacatgtagttatattgatttattctactattgatatttgcctaaaaaaagacattaaaaatgtaatctcatatttcaaaatgtatttctttgatctttgtgagggtcagtttttttcataaatattttggcaattggtatttatgttgactgtcattcatctttatacgtttattacactgagtttcttttagttaagtgaacattgatcttctaagacaattgattcatctgtaatttgcaaattatattttgtggtttataatttgtcttttaaatttattttttgtgtcttactatacataattttttagatcttataaaatacagcaactctttttatagatttggtcctgtgatcacttataaaattatgcaaaattttaattctgctgctttcatggttttataatactttttgttttgattacaggatagaagattttagttttctctgaatagtaaaatatccagatagtctaaacataaaatactgactaatgcctccttttcacgctgacttgacacatatactaaatcatacctatactaaatcccttatcagggatttatacttaatgatatactaaatccctacttataagtagctctaactgggtctctgtattccactgatctagttttctgtttttggacaatacactgaataccagtgatcttattgtagatcgtttgtaatacactttcacattttgttagaagaacacttagtaatttttgttcttttataaacaggaagtttggcaagcctcatttttcttctgatgatttttaaaatcaattgccacttcctttccaaatccttttagaattgtatttatgtattaatttaacatgaagcagataattttttttttagtattttgagtcttgcccaaaaggaacatgatacgccttttcacttttattgtcttctgttgtgttctttagtgaggttttataattttatttcataatagtcttatgtccttttgtttaatttattcctacataattttttttgcctttatgaatagggtcatttacttccattttttttttaaccaggttattgaaagggtaggtaacgggataattaattttacatgtttatgttgtatttagttaactttattgaactctttgttttctaatggtttttcattttattttcttgattatttcagtaaactgtctcccaaaaattattttctatatctttatttcttatttcatttctggttttattgcggtgatcagaaatttttattacatattctcaatattgaaataatggtagtaggtgcctttgtctagtttctgattttaatgtctccagtgttttagtattatgtataatgtgtagttttggttccgctttatgaattttaaaatactctcaaattagtagataagggtttccagctaaactgattggtattgaaatttagaaattttataatatacctattaagatgctgaatagatttctccttcttaatacttgtaaacccttaattcttaataattgtaaaggtgttaactttgatctatgtttaaaaaaattattgtaaacactttttgttatctcatatattttttgtacaccacactgtttgtttaccaaaagtgggtgtgggtgttggcatctgggtacatagacaaaattgatctatagtttctttctttatatttgtcaattttggatatacaaattatatatatataatatatctatattatatagccttttataaccattaaggaggctttctcttgttttgttttgtgtttttttttttgagacggggtctcgctctgtcgcccaggctggagtgcagtggtgccatcttggctcactgcaggctccgcctcccgggttcacgccattctcctgcctcagcctcctgagtagctgggactacaggctcccgccaccacgcctggctaagttttttttgtatttttagtagaaatggggtttcaccgtgttagccagggtggtctcaatcttctgacctcgtgatctgcccatctcggcctcccaaagtgctgggattacaggcgtgagccactgcgcccggccgctttctcttgtttttctggctctgtggcagtttagatatcacagaaattatctgatccttgaagatttgacataacagcccagctcgaaaacatcgtgggcttgatatctttcgtgttaccagatttctagggcaaacttttaagttttacagagtctgttcagtttttctgcctctgaaagcagttctggtagtttatatttttctagattattatctgttgggatactgtagtctattaacaaagttatatgtgttattcttcaagaaattttaaaacattttttctgtattatcacctttcttatttctaccgatgagttttcttcccctttttggtcttccatccaactttttggaaagaaaaagcctttgactatcaaattgttacattatattttatttctcctactttatattttatttttctaaattcttgaaatcttttctatatttaaattggatatatatatgtatatatatatatatatctatattttttttttttttttggatggcgtctcgctctgtcgcctaggctagaatgcaatggcacagtatcggctcactgcaacctttgcctcccgggttcaagtgattctcctgcctcagctcccaagcagctgggattacaggctcccgccaccatacccagctaattttgtttgtttgtttgagacggagtctcacactgtttcccaggctggagtgcaatggcatgatctcagctcaccacaacctctgcctcctgggttcaagcaattgtcctgcctcagcctcccgagtagctgggattacaggcgcccatcaccatgcctggctaatttttcctattttttagtagagacagggtttcactgtgttggccaggctggtcttgaactcctgacttcaggtgatctgcccaccttggcctcccaaagtgctgggattacaggtgtgagccactgtgcctggcctggaaatttttttgactaacagcccaataggttttgatatctgatattcccatattagtatagttttttatttctttggctcaagaataatttagagccatattttaaattttctaagtatttaggttggaagatatctctatttataattcctatttgtattacagtgtggtcaaagaatatggccaatattatttcagtcctctggaatttgaagtaagttttcttcatttcttggcactgtcagtttttaaaaaatagcccataagcattttaaaatacacataaactctcttaaccaactttattttagagataagagcaatcagacttagaagattatgtgccttattctatgtcacaattaattataaatgatgtatctagctttttgaattttaatctcatcagtttcccattagatttaactgcctccagaatataaatgtttatatttttggtatccacatactcacatatatatatatttggtatcttcatatatatatatatatatatatagagagagagagagagagagtttacataaaaaattaagtccataagaagttataaatttagaatatggttttacagtattacttagaaaagtagaaaaaagtctaggtagaaattatttgcatctttagaactgaacaaggtctcaaaagcatgacttaaactaattttgctgatgggtcatctgtaggtagatggggaatgaacaagaaaggatatcacacatatggagaacttaagaaacaaaggcatgtgtgcatttgtgaggagacaagcctaacctagataggagggagatccttgttgcaggatgataggaaataagattgaataaatggcattaagcctgattaaaggtctagtgaaaaagttaaaaaagttaaaaaaattaaatagcagttctgtcatctaatgactagtatcacatttcattttgcacatgcgtggtgatttcattgcagtgtctgtgataattaacttaaaataattagcatagaccgccaaaaaatatgggcaaatataattctagaacaggattctgaggaggtagtatgagacaaatataatgttaatttactcataatggcagattgtgtagaactctgctaaatatactagcatggaacatctgttgagaatttgaataaatatgattccagtatattttaaaagccaaaaatttcttaaggaagtgtgtaaaaaatagttaaggaatgcatttatgctagtgaaaatgtttttttgtatgtttgaaaaacagcttctagaaatttagaaggtaatttcttaagaaggaagtgtataaaaaatagttaagaattgcatttatggtggtaaaaatgttttcttgtgtgattgaaaaacagctcctagaaatttagaagtgtctttctacctctgctggtttaaacacctatatactgaaaaatactgtgactttggcaatttgcttgtgaaaattaggagagtcttaaattcagcaaaatcaagaggtgaacatataatcttagagtataagaggttatatatttcagttctataatagaaatctgctatttattaaaacagcttctattttgaaagtaggtaggggaatgatgaccatttagtggaatcactccgtgcatgtaaacctgcaatattaatttaagagactcagtacaaatttgttttattttggtcatgctattttgtactaaagtatgatatacgaaatatttgaatattctaaaagtctattacaggttgagtatcccaaatccagaattcaaaatctgaaatattgcaaaatccaaaacattttgagtgccaacatgatactcaaaggaaatgttcattggagtatcatggattttggatttttggattcggaatgctcaaccagcataatgcaaacattccaaaatctgaaaaaaatctaaaattggaaacacttctggtcccaggtatttcagattagggatactcaacctgtagcctgtgacaatcattatcgaaggttcatatcaacaagaacagtaattgaattgttaatgttttagatttattctcaaattcttcctactttgattattatgtttggtctccccccttccccgtttttttttttttttccgaatttggataataggaagatttttaaagagctctaagagaagcttatgtgtgctacctaggcacacagtaagcgttgataatcttaaatattaaaatacagttgatatttatggctgttatttattcacataagactttggaatgacatgtatatcctcaaaaaaaaaaaagtcagttttttcaagggaaaagtattttaaaataatttgttctcttattctatttataatcttatgctgcatagaaagaacatattagccttcctttttaatgagtatgatattacataactagaatatttcatttaatgtttatcagttattttttctcccatctgtacaatacaaccatatagatcataacatctagacgtcaaagaattacttaagaaaggcatgcattttttaaattaaaaaaactttttaattgaatggattttttgtaatcttgcctgaagcccaaaatgtttatgcttattagagctagaatttacatataagtataatataaatgaatataaaaagctttatcttaatcatatggtcctcttgtacatagcaatatgtacaatatgtgtaaatctatacatatttctatatggtcagatattttctagattttgcttgtatattaaaacatgcattagtatttgttatttcccattattatttgtatattatgaggtatttttgtttataaagaaaaactaagtttaaaccttaaggtaataatagtgataatatattatcattattattcttacattaataaaatgtacgtactgttggagcaataaatacttctttttgtgataattataaccccggggcttgatgttgcattccttatttgtgggctattcagctaaaagttaattgcaataatacgactatgcatttaagaacaattttctttcagatttgagtattgttgggagctatatatcaactctagaattttagtgttcaaactgatgcttagaaaggtaaaacagaacgggaaaacttaccatctccatcttatgatgtctgtgaatagactttgactaggctctgataaattttacagaattactcacattgtaagtttagacatattttaccgctttcatgtgtggaagcaaaaagaacgtttatatagtgaagggataaagaagggcctttgtggccaggcacgtggctcacgcctgtaatcccagcactttgggaggccaaggcgggcggattatgaggtcaggagtttgagaccagcctggccaacatagtgaaaccccatctctactaaaaatacaaaaaatttagctgggcgtggtggtgggcgcctgtaatcccagctacttgggaggctgaggcaggagattcacttgaacctgagaggtggaggttgcagtgagccgagatcacgccactgcaatccatcctgggggagagtgggagacttcttttttttttttttttttttttaaaagaagggcctttgtggtcagttattcagaaaattccttgagtctatggaacatgggactgtgttcttagttgtactgccttgtttgtgatactttaaaagccaaaaaaaaaaaaaagatttaaatgcaagaagaattaaactcataatattgaaggattttttggtgttcaaataattaaccaaaattatcattttcattgcattttccaggcaattaagttggaatatgcaaggttggttaagttggcccaagaagacaccccaccagaaaccgattatcgtttacatcatgtagtggtctactttatccagaaccaggcaccaaagaaaattattgagaaaacattactagaacaatttggagatagaaatttgagttttgatgaaaggtaatttgaaagtataaaattcatatgctcaaatcgttctttttttttttcctgcagattcccaggataattttttgagtatttattttatatatgcatgggcacatattttaataaatacgtaacaaaatttgaactcaatgtgactagttgctggagtctgtggccttttgaagtttgaactgaaaataacttagatcattttaataaattttaattgtgaatcaagtaatcactgcacttattacactcaatattttagaaacaaaaatgggcttctcaacctctgtactatatagacagtttaaattagataaatctttgttgttggggctgtcctatgattgtaggatatttaataatatccctcatctcttcgttagatgacagtagcagctcccaagttgtggcataccaaaatatctccaggtattgccaaataactcctaggggagcaaagtcacccttattagagaatcactggagaaaagttttcagtcttgcagataaaataattaaacattctttgacataaagaggaggcttagaagggttaaattagattcacgcagacatattttctctggaaagagaaaatattctatagaaatttctgtagaatttctgtagaatatagaaaatattctatagaatatttccagagaatgttttctctagattatattagtagttttataaagaattattcagaaagtcctattaaactactaatgttaaaaatcacaatttaattagaatgagtgacactagaaaataatttcagggcccatgtgaaattttagagtattgaaagttattttcatatataaaaacatttatgctgttgcagttcattgtaattttaattctgaaatgatcatccttttatgagtgtctcaaaaatactgagttaaaagtgtatagcaaagaatatgaggggaggcaaagcatctggattgatcctaccttattagatatgtgccgtgaaatgtaggattctgtgcataatacaaataaatagttgtgaacaatatctgataggtggttgaatgctcagtgaatgttggccactactgtttatattagtagcagtgtggacatcatttattttgatacatgcgactgcagagagttcagaaacagggttgttgtgaccctcgttatctgtgctatcagtgtactgagttccattggatctatgctgtttaatttggagaagatattaatggagtaatcacattgacttttcagtcttttgcagttctctgactataactagttaatctgttttgataacctgacttgtgcttgaaagacagagttatgcacatgtgaataaatacatttcgtgaggatttctttatcactgattctgatcataaaatccagtgggatgtttccatttttacctgagatgataggcacgttttagactctttagtatttaagaataaataataccatgtggggggaaaagaagatgcagtgtctcttgagcttgcttaatagatgcacattattttttaaaagtttcatttttttcctatgcaaactgtgttaattagaatgtaatttaaaagccatatatcaatacaacacagtaaatttgaattagaattattgctcctgtcttctttgtaattccccaacattggtcccaaaaatgtttttcacttaaggttatttaggagttgtttctatacaaaagtactgctgtttttgctcagtgtttatggattttgcttttgatttacaaatatatatatatatatatacacacacatacacacacgctcatatgtatgtgtttttttttaaggtgtcacaacataatgaaagttgctcaagccaaactggaaatgataaaacctgaagaagtaaacttggaggaatatgaggtaatgtgctttcttagaggttaaactacagatttagggattctgtaattcactgatattcctttcgtttcagcccaactgaagttgaatttgttatgaatgatgagtaaaaaaattaagtttccaagtcaatgctcaagtaattaataattttatatgtgattttaggattaacatgatatgatagcatgtagaccaaaaagtttaaaatcaaaaaaggaagatttttggttttttatttcaatactaattctcaagtactttttaaatgaacttttctagcttaaaaacagaataacaaatgcattgttaattttgaaatcaacttagaaattgctgttacataataccaacaagtaatatttatcaagaccctactatatgccaggcatttgtctaagccctttacatatattaactgatttaattcagacagtaacactgtaagataggtagtgttcttattcccatttgacacacgagaaaataaggcatagagcagtgaagtaacctgcctaaggttttcacagccacaagtttacagcttggctaatagaacctacattcttaactgttgcactacactgtgcaactgtaccctgtgggctgtattttttccttcactttgattcatcagatatattttggggaagttaattcattttagtccctatatgccatatatgtttgtcatgagacagtgttgtgtgtgagagagcacttacataggtacttgtacatgtgcttgtgggatttttttgtgcacaaaattattttttgtcaactttggctttaaaatattctttattttaattgatgaattcatacacctagtatttcttcacatttttaaatttaatcttatgcattgtcttttttttaatttataagtctagtaaattttaagttgttttcttgggtgcctttgcttaatatttagttccatttacaaacttaattatggtactttagattccctaaataattagtgtaattcactacacaaacagggaagaggaaagagagagaaaacactcattattgatgaaaaccttagctagtttggcgtataaggtaactaccttaattcactaaagagtgtctctaaaaacaaaaataggaaataataaaactgcagcaaatatatagaattgtgagcactgaaagcttaaaatttttgttgtcaaaagcaaggcaatgaaaataagcgaaaagtaaaatactggaaaagaagaaacaaagacatcattatttgtagttttttttaccttgaaattcaaataaaatctacaactgatgtattagaactagtaagacagctttgcagcatgcaaacttgtgtcagacatcaattttattcccttttgccagtaaaaaaagtatgagaaagtataaaagtgagaccatttacaatagtatctgaaactatggagtatatagaaataaatttaacaaaaggtgcgtgtgacttctgtggggaaaattataaaacttattgggagacattaacaaagacctaaataaatgggcatacatatggtatttggaaaacttgatattattaatatatagatatcacttttcccccaaatgctttataaattcagtgcaggctgtatgaaaattccagcaagatgttttatggagcttgataagccaactgaaaaatgttacggaaatgcaaagatcccagtccacctcccatctctgacaagcaagttagtgaacagtataaagactttttaataaatggttctgggaaataaataaaatttgatttcttctttattccatatgcaaaaattcatttcaattgtgaaagactcctgtgtaaagctgtttagaagtcaacataggtagaagcccaaagacattcatttatccataagaggcactcactgaccagatatttttgaccaggatatgtaatctagagccagagaaattcaaaatttgttttctcttgaccctgaggagcaagtcaagtcatcttttagctaataatgactccaaatctgtgccctccacattgattgagagctcttcccttgtccccaagattcgtgttcatggaacttgatttttaattgtgacttgattctgcaatgcttccttcagtttgcttcaacagattggactcattatgttttttttcataaaatcttctcatattctaactgcagggctgttaaatcatacaagtatttaaatgacttgtttttagattctgcatattcctcctatctttgtcttgctctaagttcagggttcagtaaaccatagcctgcagaccagcttaccacctgtttttgtaaataaacttttattggaacatggccatttgtatacatattgtctgtggatactttcacactgcagttacagagttgagtaactgaagaagatgaggcttgcaaagtctaaaatattatctggccttttacagaaaaagtttgcctactcacaacttctaaggtgattctaatgacaacaaggaatgacagtttgaataccttccccagaaaagctaacttcatacttgcaggacaaattttacctttatttgttatgaagatctactaatagcatgaaaattatgtcttgaaaattaaaattaagactggatgtggtggctcatgcttataatcccagcacttttggaaatcaaggcacagggagttgtttgaggccaggaatttgagaccggcctggccaacatagcaagaccctgtctatacaaaacagattaagtaattaactggaactgggagcatgcacctgtaattcaagctacttgggagacagaggtaggaggattgctggagcccagaaggtcaagtctgcagttagccgtgatcgtgccactgcactgcagactgggcaactgagtgagaccctgtctccaaaaaaaaaaaaaaaagtttatattcaaggagaatatcgttggctaataactatgtttcttatttttgtttataatgtttatataaaagccttaacacttttgttatcagtattcactttccaatttatcctacattgaatttcagttatttttcttgagtcaattattataaagtaagctaagaaaatcttgactttggtatcaccttagaattatttagtcctattacatgccctatagttgttttgggggtggggaggggcattgaaatgtgaactgcagttattcttttaccatatctcatgtaaataaactattcgcctacacacttaaagtcaaatttaccacatatttgcgaagttaaaaggttaaataaatctaactttttttagtttcttaaaattatgtattaagtatgtgtccaagctttgattcatactcagcgtaatatttcattttcttccatcagttgatgtagatataataatagttcaataatatgattttatactgatgaatttttgagatgacctgattgattatcctgcctttatatttctgttatctgctagtaaaatctttattgtttaaaacatttcatatccatgcctaataatttttagatttaatgttgtattaataaatagtcttgtgtgccagaaagtaaagtcttgttttagttctgatgtatcttcattttgaactctttatttctattaattcagatagtagcgaaacagtgcattactttttgtacagtttcatagtactttttaaatcttactctgaacatttttaatattttctttcacctacaggagtggcatcaggattataggaaattcagggaaacaactatgtatctcataattgggctagaaaattttcaaagagaaaggtaaggcaaagtggacaaatatgaaaagagcataatttttgcacttaattctattcaggtgtgacctcatccatggaaaagattttattcatactctgtatttttaataaatgttttattttagatcagttttaaatttacagaaaaattacacagttgatatagagacttcccatataccccacataaaatatattttccatttaaaactccgtaaggttggcattagtgtctgtgtttattagctctcaaacactacccttgaagctgagtctgatcttgatatcaagtcagagatagtgtttgcagtctgtctttgtgaactttcaggttctgtaaaaagtgtagctgtagaaaatttttgtgtactgtgactttaaacaaattttggattaattttcatttaaattaaggatggtcttaaaggaatatctacttatttaattatactattattttaattgttattaagaagaaaggatacattttgctttacttacattttaggttatttactagtttgcatgtatttctccacatatttcttaatgcgtgttgttgaacattaacttccctagtgattgttttttgagaaaatgctttattttcaatgcagtgtatattgcagccaagtaaaagggatattgaatttttcctttcttttttgttttatgaaatttaagaagctcccacttaggtaatgatgcttctttttcaaaaaaagaaacaaagatcagtgtttaattctggagctatgctgtccaacatagcggccacctgacaaaacttaaataactaaaacttttaaaaccaaagttcagttcatcggttacaccggccacgtttcagtagttcagtagcctcatgtggttagtggcctctatttttagccagcacagaacatttccataatcacagaaatttctattggacagtactattctagaggacagtactttcatttttatattaatagttatcaaaatttttagttatcacacaaaaggaaaaattaatgttttacttaacaatttgtcttaagtacttaagtacaaattatttaaagtcctagtcattgtgctatttataagataatttcactttagtcattgatgtagaaaacttactttgatcaatacctccaatttatgagttatgtcaatcaagattttatttctttaataggaatattcaaatgtactattagaatttatatttgtgctgatttgagaaaaataatgtgatcgtataattcaatagagtgagatataaaaaggcatttcagtgttacagataaagaaatcagacttcacagagatgtagtaactttgtcaaggtcacacagctaactaggagaagaaaaattaaaatagagacctcgtattcttgtataatttaatgaaatcatgtaagtacaaaatgtattcatttatctcaataagaattaaaaagatgaaactgtcactttgtacctatccggatagcttctgtattagttgttcccagttaacatacattaaaggaatttgagatataacttggaaatatgtttaaatattacaatttgcttgtcagttttcaaatacatacttattcagaaagttaatattctagtatagtaaatacttaccaaattagaaggattaactagaaaatcaataatggtgacagatattacttgtggaatatcttttaaagaaatattggtgtgtgtgcgactgtgatcccagctactcaggaggctgaggcaggagaatcacttgaacccgggaggcggaggttgtggtgagccaagatcgcgccactgcactccagcctgggcgacagagcgagacactgtctcaaaaaaaaaaagaaagaaatactgttttttttttttttttttttttttttactttaaatctttaaatatagcagttattgtagctagctgtttgtaaaatattgccaaaagattctgtcaaaattgtttttaatgaaaatgtaaacatttaaaggcttgaatgaaatactgatggacccttgtgagtcctgagaacagtgaagtgaaatcatggttgcaagaaccataattttatagagtgtaccaggctacatgatcttattttatcttagataagaatatggtaattggactgctaaatcttattctaaatttatttgaatatacattcgtaagcactttaaagtttgataacatatggaacattttgcgtacctcagtagagaattggaacaaggtcatggtttcagagcaattctcaaagaggtgactcaggtctagaaagccagatgtcagtgtcattcaggagagatcttcttaacaggaaactcagtagctataaaggaaaagatagatgtgctagttacttattaattaacgaactactacaacttaatgttgtaaaacaacttttaatattatcacttccttcgtttttcataaataacatctttaactgagaatatgtttattaacctaatatcatttcaaaataaaatgttatacttaatctcaaaaacaaattcctagaaagccgttttcaaaaaatgtataaaatagacctatttatcatgacaccttcaggtgtgtaatttgatttgccatgaatgtatacattaatttttaaataattttacatttaacatttgggatgtggaatggatttattttgtatctaagtacatgaattaagtaataaacagtaattattggcaggagcgtctagagtttaaaattgtgtttctttacaatatttcattttttaaaatatatttttccatattaatctgtgaaaaaatatattaatgaaaaactgacgcaaaggaaatattttaaaataatattttttatttcagttatacaaatacttggctagatatagtttttattttgacatgttagaaggatagttttgaggtaaaagtaattctttattaaatatttttttcttccatttttgttttgttttgtatttttgagttggggtcttgctctgttgcgcaggctggaatgcagtggtatgatcatggctcactacaacctcttaccttctcagctcaagaagtccttcctcctcagcctcctgagtagctggtactacaggcatgtaccacgatgcccagctaatttttttttttttaatgtttttgtagagatgggggtgtcaactatgttggccaggcaggtcttgaacttctggcctcagctgatcctgtcaccaccacctcccaaagtattgggattacaggcatgagcgactgtgcctggccccttttcttccctttttaaaacctaatttgaatttcataatatctagacttacattaatataacacatatgcctaattctatcacttcttttttttttgagacggagttttgctcttgttgcccaggctggagtgcagtggcgtgatctcagctcacctcaccctccacctcccgggattctgctacctcagcctgccgagtagctgggactacaggcatgtgtcaccatgcccggctaatcttgtatttttagtagaggcggggtttctccatgttggtcaggctggtctcgaactccctacgtcaggtggtccgtctgcctcagcctcccaaagtgctgggattacaggtgtgagccgccgcacccggcctctatcagcttttttatgtttgcaggctttttgtttttgctttattccactaggtttcccagatttagaagaaatctttcattgtccacttcctctatttcctttagatattcttatttctattttttttttacatttttctcagtaactaaaactgtctgcacatagaaaagaacctgtctaagttgtcattgaacaaaccaaatgatgtttgtgatcatttacttcatataaatgtgacattgcgttaaacaattagattgttggctttcacattagctccaattttgagtttaaatggaagacatcaggaaaataaataccaaggaaaacagaactatctgactttatcagttattgcctcttttcccagattttttcttaatttatagctcttctttttttacttttaagataactatctctgggtttcagatgttgctgttgctaaaaaggcgctctcaagcatacactgcgtcagatgatattttttattataatgtagattatcaaaacttaagcatatacttaaaatgtttcataattatagctgactttgtttctacaaaggtgaaatactaatgttatatgtttctttttaattttcaagttatatagattccttgctgttcctcatctgtgcttatcagaataacaaagaactcttgtctaaaggcttatacagaggacatgatgaagaattgatatcacattatagaagagaatgtttgctagtaagttgaatgcatatagtatgatcttatcattttgtctgacattgggcaagttttccagactcatatataagtgattgactccataaactctgaggggataagaacatgatgatgtctataaactggttctagtcccttcagatggaaaagtacactcagtactttattcttttctctttatgaatcccaagtactataggtgataaatgagaaatgttcttaaaatagcatcagtttgtttacatttctgtatttagatttcgtcatcacactaccactcctttttttggtgggagaggaagggatgcatagataagccttaaaaaatgttttatgtaagtctataagaatatgcaggctggcgcagcagctcatgcctgtaatcctagcactttggaaggctgaggctggtggatcacaaagtcaggagatcgagaccatcctggccaacgtggtgaaaccccatctcgactaaaatacacaaacacaaaaattagctggatatggtggtgtgcgcctgtagtctcaactactcaggaggctgaggcaggggaatcgcatgaacctgggaagtggaggttgccttgagccaagatcgcgccactgcattccatcctggcaaccaggtgacagagcaagactctgtctcaaaaaaacaagaatatacatagaatgtattagagtaatttgtttaacttaaaaaattgaattttcaggtacaagaatagtatagctgactttaaacatacatagaaccaaaacctgatggttcctctgaaaccttcaaaaaatggtataatgtttctcatcattttttgtagtaacccagccacatttggttatttgttttacataggaattgaaatgaaacctcgtcaagattactttagtgttcctttcagattttttcacgttgtatatttacaaagtgtcaggttctgagggatacaaacatgagtaagatgtacttcctgtcctcagaaaactcagtctggtaggagacataattgtttgttctggaataagtgccattatgagaaatatgcacaatgatatgcctgaaatatttgggaagaaccttaagagacaaggtaaacctcgtctggatcttgatggataaatagaagttttattcatgatagagaagggagaatattccagtacacaacagaaaatcaagataaattcactgtggctatccaggttatgaggaagtggggtaaggtggaagtgatgaagctgacaatacttgtcgatgtcagatgatgaagaaacttagatgacattcaaatgagtttgcaccagtgtaagtttgattaggtttggcataatgaggtttgttttcagaaaataattctggtaataataatagcattctagaggatgaacaggaaagaagtagattgaagtcaagaaccttagaggggaaagtcaagggacggagagtgaggacctcaactcatgtagtacggtaggtatgatggtgaaggaaatgaaatcggcatgtcatagctgttgggtgagtgggaagaaggaaatggaagagtcaaagctgccaaacttactagtttttcgtttaatattagggagtctaataggaggaacaaggttggctttgaacatgttttatttaagagatttccaggacattctttgattcagtgaacttaacattaaacttgtcattaaattttatatatcatttaatgcatacttccaaaaattgtagtaaatacttgaagatttatctcattttattctcttaacccctatggttggaagataaaataccctattattaatataaagaaagtgaagctaacagatttagctaatctgttcacgattggtgtattagtccgttctcacactgctataaagatactacacaagactgggtaatttataaaggaaagaggtttaactgactcacagttccacatggttggggaggcctcaggaaacttaaaatgatggcggaaggtgaaggggaagcaaggaccttcatcacatggtggcaggagagagaagtgcaagcagaggaaatgccagatgcttatgaaaccatcagatctcatgagactcactccctgtcacaagaacagcactggggaaactgtccctatgatctgatcacctcccaccaggtctcttcctcaacacctgggggttacaattcaagataagatttgggtggagacacaaagcctaaccatatcaattgggtaattgattcatggccaagttggacttaatagcacaaccatctttccaaaatcaaaataaattgcataagaattatgtggtgtaaatctaaatatataactttttttatttgaaattcagcttaaaagtcatgtttatcatgctgtaaacataagattttaaataagaacccttaaatattataggtcttatacctgtatttatctcttatgtttcttattgcatggatttctctgttctactagatcagtgatcagcacactatggcttgtgctccacctaccacttgtttttatagataagttttattgaaacatagccatgcacattcatttatatattgggtattattgtctttgtactacaatggcagagttgaatagttgcaacagaaacttcatggccttcaaagcctataatagtcctcgtctggcccttcacagaaaaagtttgccaatccttgtaccaaattgtaagctccatgagagttttctgtattaatcacttgagtgcccctgcatctgcagaaatttctggcacgtggtgttgactctgtaggaagtttttgaagggaaaagtgaattgattacctttatatttctgtatcaaggaatacaatagtatatattcagttgccattaatggagatgagtttttcaaaaattaatatggattctgaatttctttatttttaaaactattttgagtgcttatacaattttataatttggggaagttaatctctagagaagaaaaaatggcccctgtgttgatgatcggcataagccaaacatgactgaaaaacacaataatgttttctccaccgctgttgcttttgtttctgttgttgccatatgcatagctttttctaaagagagattttcagttctagataggttgagattgttttctctaaataccgtttgttctaatactgtttgtgaacatatttatgttgtcttccttattaatacttacagatccttaatttaaaaaggaaacaaaaacctattcttttttttttcctgcattgcattaagaaattaaatgagcaagccgcagaactcttcgaatctggagaggatcgagaagtaaacaatggtttgattatcatgaatgagtttattgtcccatttttgccattattactggtggatgaaatggaagaaaaggatatactagctgtagaagatatgagaaatcgatggtgttcctaccttggtcaagaaatggaacgtaagtttaaacaatggtagtaggcacctgagatgtccggattaaatgcagttagaattagatgttatttattcttgccattttttatattaaatacaatattaagtattaatattttcacattcacatgattactctttttccatattgatgaactaagctgtgtgcattgcagttgccatttatgtttttgtctccccaaaatggcaattatcttacctattagagtaagttaatattagtaaatcatgttgacaatgatcgtgtaataatttctatctttagttagatttaattgtttgtatttgcagcacacctccaagaaaagctgacagattttttgccaaaactgcttgattgttctatggagattaaaagtttccatgagccaccgaagttaccttcatattccacgcatgaactctgtgagcgatttgcccgaatcatgttgtccctcagtcgaactcctgctgatggaagataaactgcacactttccctgaacacactgtataaactctttttagttcttaacccttgccttcctgtcacagggtttgcttgttgctgctatagtttttaacttttttttattttaataactgcaaaagacaaaatgactatacagactttagtcagactgcagacaataaagctgaaaatcgcatggcgctcagacattttaaccggaactgatgtataatcacaaatctaattgattttattatggcaaaactatgcttttgccaccttcctgttgcagtattactttgcttttatcttttctttctcaacagctttccattcagtctggatccttccatgactacagccatttaagtgttcagcactgtgtacgatacataatatttggtagcttgtaaatgaaataaagaataaagttttatttatggctacctatgtgtttgtaagcaggtatattgtatattagtgtattagtaatactagataaatgaattttgtctggggattaagattggatagttaatagattaatacaatcttttaattctgctctaatgctagcaaattggaaaatgtttaagtctttgacacttaaatttatctatatttttaacaaagttcttgaacttagtatggcaccggaacctgttttgaattcagtcaggtttttactcaagtaagtggttgattttttttaagtcaaactacactgaaacttttatccttttcttagattaatcttactttttaaatgtatttacaatatacagcaaggtgattatttcaagagaatcccaaagtacttgaataagggctattgtaaaatttaaaagaaatatttatatatacacatatatacacatacacacatgtatatatatattcttcataatggaggacaatgttttgcaatatataaatcattctatttttgtaaattgtatatcactttaattgaaaatgttctctactaattaatactgtgaaacaaaattgatgttgtttaactagaagttatgagtatcttaactgcctttattccttttcaaaaaggaaaaagctgtagaacattttgtagatgaaactactgtttaagattaatgaattaatattgtgaatgaaaatcaaaatccatactttaaaggtaatcatgttactaacaacctatttttgaattcataaaaatttctttataaatgatgttttgtgaacatagtaaaatagaccattatactatgtgtatgtttgatacagcgtcgccaaaactagtgttctttattagtgcctctcacaaaagatcctggatggaggagtaagatgaaatattatgctattatatgatgctgtttgtaaaggtattaatgtactagtaaggtgttaatgacaaggaattagtactattcctgttgtaaagttagattttgcatattgtatctatcaaaatatgtttgggtttagattttaagttgtctactgagcagatttctgcattggttttccagtcctgttaaaagtttagaaacttcatatgtgtcatcacagcttttgtaaagaaagtatccttaatattttatgacattctaccacagtggtaaagttgtttgtgtttgtgtataattgactgctgagatacaaagtgcccaaacactatatggaaattattccttcaaagtcacatccagagaatcatgtcactcttgtgctgaaggtaagtattataattgtatttactatgtacttaaaaaccagattatttattcctagtaatgaatttgaaataacttatttaaagaaaagtgacctttttcaagacctacagaaacaacttattttaatattggtttttaatctaattgtaaggtttagatcattgaaatttctttttttttttttttttaaatttccaacttttaagttcaggggtccatgtgcaggacatgcaggtttcttacagaggtacatgtgtgtcatggtggtttgctgcacaaatcatcccatcacccaggtattaaccccagcatccactagctattctaactgatcctcttcctcctcccagcccccaccctctgccagacaccagtgtgtgttgttccttccaccattgagtccaatatgttcttatcgtttagctcccgcttatgagaacatgcagtagttggttttctgttcctatgttagtttgttcaggataatgatctccagcttcatctgtgtccctgcaaaggacatgatcccattcctttttatgactgcatagtattccatggcgtatatgtacgttttctttatccagtctatcactgactggcatttaggttagattccatgcctttgctattgtgaatagtgctgcagtgaacatacacgtgcatgtttttataagagaacaatttgcattcctttgagcatatatccagttacgggtttgctggctcaaatggtatttctctctttaggtctttgaggaaccatcacagtctttcacaatggttgaactaatttacacttccaccaacagtgtaaaagtgttcctttttctccataacctcgctaccatctgttgtttttatgacttttaataatagccattctgactggtgtgaggtggtgtctcattgtggttttgatttgcatttctctaatgatcagtgatactgagctttttttcatatacttgttggcctcatgtatgtcttcttttgagaagtgtctgttcatgtcgtttgcccactttttaatgggttttcttttttcttgtcaatatcataagttctttatagatgctgcatatgagacctttgtcatatgcacagattgtaaaaattgtctcccattctgtaggttgtcttttttactctgttgttagttttgccatgcagaagttctttagtttaatcagatcccgtgtgtcagtttttgcttttgttgcaattgcttttgacacttcgtcatgcaatctttgcccattcctatgtcctgaatggtattgcctaggttttcttctagcgtttttatagttttgagttttaaatttaagtctttaatccatcttgagttgatttttgtatatggtgtaaggaaggtgtccagtttcagttttctgcatatggctagtcagttctcctagcaccatttattaaataagaaatatttttcccattatttgtttttgtcaggtttgtagaagatcagatggctataggtaggtgtgtggtcttatttccgagttctctattctgttccattggtctctatgtgtctgttcttgtaacagcaccatgctgttttggttactgttgccttgtactgtagtttgaatttgggtagtgtgatgcctccagctttgttcattttgcttaggattgccttggctactcaggtttggttttttgtttcgttttgttttgtttggttccatatgaattttaaaagttttttctaattctgtgaataatgttattggtagtttaatgggaatagcactgaatctataaattgctttgggcagtatggatatttctacaatattgattcttcctatccatgagcatgaattttattttccatttgtttgtgtcctctctgatttccttgagcagtggtttatagttcttgaagagctccttcacgtcccttattagctgtattcctaggtattgtattctttttgtggcagttgcgaatgggagttcacttgtgatttgactcttggcttgcctgtttttggtgtatgggaatgctagcacttagtgcacattgattttgtatcctgagattttgttgaagttgcttatcagcttaagaagcttttgggctgagatgggattttctagatacaggatcatgtcatctgcagacaaagatagtttgatttccgtcttcctatttgaatacctttatttatttctcttgcctgattgctcttgtcagagcttccaatactatggggaataagagtggtgagagagacagccttgtcttttacaggttttcaagggaagtgctttcagcttttgcccattcaatgtgatgctggctgagggtttgtcataggtggcttttattattttgcagtatgttcatttaatacctagtttattgagaatttttaacatgaagtgatattgaattttatcagaggccttttccacatctattgaggtaatcatgtggttttcgtctgtagttctgtttatgcaatgaatctcatttattgatttttgtatgttgaaccaaccttgtatcccaggaatgaagcctacttgatcgtggtggataagctttttgatgtgctactgtattcagtttgccagtattttgtttaggatttttgcatcagtgttcatcagggatattggcctgaagtttttgttgttgttgttgacgttgtatgtctgctaggttttggtatcaggctgatgctgccctcatagaatgagttagggaggagtccctccttttcaatcttttgaaatcgtttcaggagcagtgatagcaactgacccttctttgtacctctggtggaattcatctgggaatctgcctggtcttggactttccttggttggtaggctgttactactgccttagtttcagaactcattattggtctgttcagggattcaatttcttcctgtttcagccttgagagggtgtatatgtccaggaatgtatgatttttttctagattttctaatttatgtgaatagaggtgttcataatattatctgacttgtctttctatggggttagtggtaagagcccacttatttctgattgtgtttatttgaatcttctctcttttcttcattagtctagtggtctcctagtggctcacgcctgtaatcccagcactttgggaggccaaggcgggtagatcacgaggtcaggagattgagatcatcctggctaacacagtgaagccctgtctctactaaaaatacaaaaaaaaaaaaaaaaaaattagccgggcatggtggcgggtgcctgtaatcccagctactcgggaggctgaggcgggagaacggcatgaactcgggaggcagagcttgcagtgagctgggatcgtgccactgcactccagtctgggtgacagagcgagactctgtctcaaaaaaaaaaaaaaattagctcctggattgtgtgattttgatttttttttgaagggcttttttttgggggggtctctatctttagttcagctctgatattggttatttcttgttttctgctaagctttggggtttgtttgcccttggttttctagttactttagttgggatattaggttgttgagatctttccagctttttgatattgtcatttagtgctataaatttccctcttaacactgctttagctgtgtcccagagatgctggtatgttgtatttgaaatttctttatataatttaccatgttaaatataacttatagctaataacttcggaatttgaacctcatagaactgtagtccatagcagatttcatttgatttaaatgactcttattttggttactatgttattccttcctaccccaaaaaagttacgttttgaaataattcagggtagaattcatatagatagaacttcagacatctcaggagaccagtacgcatgaatgaacatgtagggacccctctaatacgtttcacatccattatgatacaacaatgaccatacactttagtagttctcagtgtgtgttctccagatcagtagacagcttcagcagcttgggaacatgttagaattgaaaatttttgagtcccacctcagagctgccagttcagaaactcttcacgtaacctgtgttacaacaagtccttcagataattttgatgtttactagtttcagagccactgcactaaatgaaactattggtagcatttgtgcactgtaaattgatgctgtttaattttcattcacttgtgctctgttggaagcttttttgtgtttccttcacttgggatttcaaggaagtatctaatttttttttttttttttttgctcaattacatgtaattgagaataagataggtatctgattctccaaaagttcagcatctttattttatgatttaaacttgtcgagttatgcctctgggtcctgtcattctcccagcgaataaaaatgtggatgcttggggaagtggaggtggatggtaaatgggaatactcttgtttgaatttttaaaaatttacattgtaaataacattaaataccatttgttgtgcccatgataacttcatccaaaatatatatattagtctgctaagatatgccataacaaaataacacaggcttggtgccttaaacaacagaaatttttcttctggttctggaagctggaagtctaagatcaagctgttggtggatttgatttcccctaaggcctctctccttggcctgcagaccaccaccttctctctgtgtcctcacctagccttttctctgtgtcctcacctagccttttctgtgtgctgcatccctggcctctcttccagttcttataaggaccccagtcacattggatttgagccccatccttatgaactcacttaaccttaattatctctttaagggccctgtctccaaacacagtcatgttagggggttagggcttcaatttatgaatctgggggacaatttagtaaaaaaaatagtatgtgacagcccagtttatatacctgctttccagaaacaagaatatggttgttaatgtcttctctttagcctcaagatacagtgcaaatatctgtagttccgttcttacgtaagctttattttactttttctaaaaactatattgaaagtatagcaatccgagttagaaattgcttataatgcattcatctaatcagctcagtgttcttactgaacaaacttttatttccatgtttactcatgtttatttcatcagtttcacctgacattataccatgaatatatttctgttttgctagtgtttttattcttactgatcacatgtccctttttcgtcttccataccactcccagcctagagttaatgaccactaaccaccgtagccacatacttttccatgtttggataaccttatgcagcatatacacctaaagggtggtggtttttttagggggtggtggtggaaggggggagacggtcattgtttttacaaaaattaaatttcatctattttacacatcctttcccctgtcttccccttgtactttccaaccttcagtttcttctttttctaattagctttgtaggagtgacttaaaatataataaagtgaaataacatagcagtgataataatagaataaaaataaacgaaacgtgattggagaaactgcacacatgcacaccaagatttcagatattcttattccttccatgtacagttctcagtgggtatttcagaccttcactcccatcctcagcctctcctattcagtgccagcttctgtaacgctggatgatcttttctttgcctaacgaagaaaactggagatgttaggtatgatcctcctttcaacttttgtgcctcctatctaaattagttgttaaccagcttgtaatgaagggataaacattgataacccaatattatttagaaaatagaaatagaatcagaatatactatgaaatgagcttacaaatttcaacaagtgtccactattttgggagtgtgtttgctcttctccagcagtaatccagaaagctcactttttcccccgagactatctcatacaacatgtttgccctgtagcaaacagctccttattttttcagtaatgtagagctagaccagtattcttctgttgtttttattttgtggagtttttgtgtgtatttttagttttttgaaacagggtctcgctctgtttcccaggctggagtgcagtggtgcagtctcctctcattgcaacctccaactctctggctcaaacaatcctcccacttcagcctctgaagtagctgggactatatgtgcaagccactgtgcttggctaattttttaattttttgtagagatgaggtctcactatgttgtccaggctagtctcaaacttctggactcaagtgatcctgccacctccgcctcccatacccctgcgattacaggtgcaagctactgcacctgacctagacccatattcctaacctagttcgtcaaaagcatatgaggaacttttttttctttaaagtgtccagatgttatctctcatgtgtattacagggcttcaaatgtgagaattggagtttagatagttgtttttccaattttaatttaagatttgcctgtggccctactatgtgattgagcctagctaaagtagtgtggaggaatttgctttttacagtactgtatgtcacatgaaagggcaggggtcttcagattgctgatgttccctcagccatagaccatgcccacttttgacgtgctctagccaaagctgcatgaaaatatttttcagtccctactggatttttctcttatgaatggttaacagtgcaggttctggaaccaaactacctggattcagattctggctctgccgtttattcgctgtgtgttgaccttgaatgagtgatttaacttttccgtgcctcagattcttcatctataaaatgggcattatgacataacacaccttagaggattttttaaaagattaaatgggtttccagatataaaacgtttagaaactgtctgccacattaagtattcaataattgtgagccctttttatagtttgtcagtattgtttactcctgttctggttttgaggatctttagcttccatcctctacctgcattcctagtgtttttttttttctccctacttcttaaagttgtgctcaaggtttggtacttggccccttcctcatgcttttcactttttctggttgtgtctgttagtttgtcttcttattctgcctccatgaatcacaggtcattgttttctaatcatacccatgtgagttctaaaccaatacatatttgcagttgtcttttcatcacatatacctggatgtttcgcagacactttcgacttggcacatctgaattcatcactttttcccaaatctgattgtctcatactcccttgatgaaatgatgtaataatcccaaaatgaattattctcaattctacttttacctcccattgattaccaagtgtcagcatgtcagattttttaatactccttagtactatggctgatgaggtccgtcatctcttagtttgactgttagatttgtccctgagtagcactgtctttgattttgcccctgaaattcatcttcacactgttgacagaataatcttttaaagtggtttgttttacatgtctgtcttccactgctggactgagctcttaacaggagattgtatctcttgtttttgtaatcctagcacctgttaaaataactagcaacttagaggtgcagtcttgcaggttttctgaccctccagtcaccctagacctgcactgatacagttttcgttagccatttaaatttaaataaaattgaacattctgttaattagtaatactagctatatttcaaatgctcatagccacatgttactgttgactactatattggacaacattttagaacatttcgattatcataggaagtttcattggacagagctgccccagcagacctttgctgatgtggatgtctttctgtattaacatccttttaacattcagacacctcccaaatgctaaccttaatagattggccttcagcatttatgtctctctatcttgatcctgcaattgatgactttactatgtctgctctgcagagagcaccactaccagcatgtgtccaatcaggaaagccgacactacatatttcaacagaggagatgtgagtacagaggcattagagagtaacccggggatcacaactgtaggatgcagctactagtcctaagggtaagaaaacaaatgggaaaaaattggggctgccagagccttaaagctccaaaaagggtcatcatggcattagtgctcagacccctgaggaggcttaccacctacctgctcatggtaattctgaggggtaaagtaacgacagttctagaagtttcgaagtagttgaaggctggaatttgctgccgttattacaaagctgataggactagccatcagagatgaactagatcttttttcatcttcctgccaacttccctgtagtacttcctactggcagaacctaataagcagcagtcagaggggtcagagaagtgtagtttgcagagtcccggcctcagcacacagagcagaggacagaagggtggaattggagctgagaaacaatagatgaagaaccagcacactggtttccttcaaagactcatttttatctaaaggtattagtccctaaaacgccagatactcaggaatttgtagagaaattctgggccctcaagaataagtgtactagttcgaattgaaatcttgttactcttttctgttaaacgagactgtaatgctgctatatagtgcttaacttttaaaattgacagtggatgaatctgcatattatagtcaggtgttcatgtccatccattcatttattgagtgcctaccacatgccacacaatctatcaggtggtatgtatataaaataaaacttagataataagacaaaagtaataattcacccaaattcatctataaatccagacttagggactgttgacatttttgtgttcgtgcctgtggacatctttctgtgcatatgcatgtacacacatcacaatatcataaaaagtttataaatgcagatgtttccaagaaagtgtgtattcatctacctctctcctgctgtatagtatttgattataaggagaatgctccattactatttacctgtggacatagagcataggctgctacatatgtctctatatactttatgcactttgtctttccactaaaatttctcaaggtataatttctgtctgggtcactgaatatgtagatttaaaattttgagctacatttttcaaactgcccttcaccaaagatgttacagtttacactgccaccaatagtacatgagactgttctttcatacattcaataacagaatattattgacctttaatttgtttgatagccaaaagtgtgttcttcgcatttcaaaatttttagtgagagcatattccaatatgttaattgactatttgtatttcttgtatagttaactacctgtttacatcctttacactttttcttttgggtgtttatgtctgtaacttggcagtagctcatattaggaatcattattatacacgttgcaaatatttttacaattagtttatttattattgcattataaccatgcttacgtagtggtgctctactatttctgccttaggtataatgtttagaattttctctggtcagggttataaaaatactcatgtttctcctgatatttttatgatttcatttttagatcagtctttaatgcagttgacagttacattaaagtagtgaaatagtcaacattttctgtcagtattatctggttgtcataataccatttataaaataattc

SEQ ID NO: 25 - DNA, 3009 bp, Homo sapiens
gaggcggccgccgtggccctcacagtcggcgtttcgccgcctgcccgcggtgcccgcgcacgccggccgccatcgaccgtggagcagaacgtgctgcagcagagcgcggcgcagaagcaccagcagacgtttttgaatcaactgagagaaattacggggattaatgacacccagatactacagcaagccttgaaggatagtaatggaaacttggaattagcagtggctttccttactgcgaagaatgctaagacccctcagcaggaggagacaacttactaccaaacagcacttcctggcaatgatagatacatcagtgtgggaagccaagcagatacaaatgtgattgatctcactggagatgataaagatgatcttcagagagcaattgccttgagtttggccgaatcaaacagggcattcagggagactggaataactgatgaggaacaagccattagcagagttcttgaagccagcatagcagagaataaagcatgtttgaagaggacacctacagaagtttggagggattctcgaaacccttatgatagaaaaagacaggacaaagctcccgttgggctaaagaatgttggcaatacttgttggtttagtgctgttattcagtcattatttaatcttttggaatttagaagattagttctgaattacaagcctccatcaaatgctcaagatttaccccgaaaccaaaaggaacatcggaatttgccttttatgcgtgagctgaggtatctatttgcacttcttgttggtaccaaaaggaagtatgttgatccatcaagagcagttgaaattcttaaggatgctttcaaatcaaatgactcacagcaggagtggcatcaggattataggaaattcagggaaacaactatgtatctcataattgggctagaaaattttcaaagagaaagttatatagattccttgctgttcctcatctgtgcttatcagaataacaaagaactcttgtctaaaggcttatacagaggacatgatgaagaattgatatcacattatagaagagaatgtttgctaaaattaaatgagcaagccgcagaactcttcgaatctggagaggatcgagaagtaaacaatggtttgattatcatgaatgagtttattgtcccatttttgccattattactggtggatgaaatggaagaaaaggatatactagctgtagaagatatgagaaatcgatggtgttcctaccttggtcaagaaatggaaccacacctccaagaaaagctgacagattttttgccaaaactgcttgattgttctatggagattaaaagtttccatgagccaccgaagttaccttcatattccacgcatgaactctgtgagcgatttgcccgaatcatgttgtccctcagtcgaactcctgctgatggaagataaactgcacactttccctgaacacactgtataaactctttttagttcttaacccttgccttcctgtcacagggtttgcttgttgctgctatagtttttaacttttttttattttaataactgcaaaagacaaaatgactatacagactttagtcagactgcagacaataaagctgaaaatcgcatggcgctcagacattttaaccggaactgatgtataatcacaaatctaattgattttattatggcaaaactatgcttttgccaccttcctgttgcagtattactttgcttttatcttttctttctcaacagctttccattcagtctggatccttccatgactacagccatttaagtgttcagcactgtgtacgatacataatatttggtagcttgtaaatgaaataaagaataaagttttatttatggctacctatgtgtttgtaagcaggtatattgtatattagtgtattagtaatactagataaatgaattttgtctggggattaagattggatagttaatagattaatacaatcttttaattctgctctaatgctagcaaattggaaaatgtttaagtctttgacacttaaatttatctatatttttaacaaagttcttgaacttagtatggcaccggaacctgttttgaattcagtcaggtttttactcaagtaagtggttgattttttttaagtcaaactacactgaaacttttatccttttcttagattaatcttactttttaaatgtatttacaatatacagcaaggtgattatttcaagagaatcccaaagtacttgaataagggctattgtaaaatttaaaagaaatatttatatatacacatatatacacatacacacatgtatatatatattcttcataatggaggacaatgttttgcaatatataaatcattctatttttgtaaattgtatatcactttaattgaaaatgttctctactaattaatactgtgaaacaaaattgatgttgtttaactagaagttatgagtatcttaactgcctttattccttttcaaaaaggaaaaagctgtagaacattttgtagatgaaactactgtttaagattaatgaattaatattgtgaatgaaaatcaaaatccatactttaaaggtaatcatgttactaacaacctatttttgaattcataaaaatttctttataaatgatgttttgtgaacatagtaaaatagaccattatactatgtgtatgtttgatacagcgtcgccaaaactagtgttctttattagtgcctctcacaaaagatcctggatggaggagtaagatgaaatattatgctattatatgatgctgtttgtaaaggtattaatgtactagtaaggtgttaatgacaaggaattagtactattcctgttgtaaagttagattttgcatattgtatctatcaaaatatgtttgggtttagattttaagttgtctactgagcagatttctgcattggttttccagtcctgttaaaagtttagaaacttcatatgtgtcatcacagcttttgtaaagaaagtatccttaatattttatgacattcta

SEQ ID NO: 26 - protein, 468 aa, Homo sapiens
EAAAVTVGVSPPRARARRPPSTVEQNVLQQSAAQKHQQTFLNQLREITGINDTQILQQALKDSNGNLELAVAFLTAKNAKTPQQEETTYYQTALPGNDRYISVGSQADTNVIDLTGDDKDDLQRAIALSLAESNRAFRETGITDEEQAISRVLEASIAENKACLKRTPTEVWRDSRNPYDRKRQDKAPVGLKNVGNTCWFSAVIQSLFNLLEFRRLVLNYKPPSNAQDLPRNQKEHRNLPFMRELRYLFALLVGTKRKYVDPSRAVEILKDAFKSNDSQQEWHQDYRKFRETTMYLIIGLENFQRESYIDSLLFLICAYQNNKELLSKGRGHDEELISHYRRECLLKLNEQAAELFESGEDREVNNGLIIMNEFIVPFLPLLLVDEMEEKDILAVEDMRNRWCSYLGQEMEPHLQEKLTDFLPKLLDCSMEIKSFHEPPKLPSYSTHELCERFARIMLSLSRTPADGR

SEQ ID NO: 27 - DNA, 4824 bp, Homo sapiens
gaggcggccgccgtggccctcacagtcggcgtttcgccgcctgcccgcggtgcccgcgcacgccggccgccatcgaccgtggagcagaacgtgctgcagcagagcgcggcgcagaagcaccagcagacgtttttgaatcaactgagagaaattacggggattaatgacacccagatactacagcaagccttgaaggatagtaatggaaacttggaattagcagtggctttccttactgcgaagaatgctaagacccctcagcaggaggagacaacttactaccaaacagcacttcctggcaatgatagatacatcagtgtgggaagccaagcagatacaaatgtgattgatctcactggagatgataaagatgatcttcagagagcaattgccttgagtttggccgaatcaaacagggcattcagggagactggaataactgatgaggaacaagccattagcagagttcttgaagccagcatagcagagaataaagcatgtttgaagaggacacctacagaagtttggagggattctcgaaacccttatgatagaaaaagacaggacaaagctcccgttgggctaaagaatgttggcaatacttgttggtttagtgctgttattcagtcattatttaatcttttggaatttagaagattagttctgaattacaagcctccatcaaatgctcaagatttaccccgaaaccaaaaggaacatcggaatttgccttttatgcgtgagctgaggtatctatttgcacttcttgttggtaccaaaaggaagtatgttgatccatcaagagcagttgaaattcttaaggatgctttcaaatcaaatgactcacagcagcaagatgtgagtgagtttacacacaaattattagattggttagaagatgccttccaaatgaaagctgaagaggagacggatgaagagaagccaaagaaccccatggtagagttgttctatggcagattcctggctgtgggagtacttgaaggtaaaaaatttgaaaacactgaaatgtttggtcagtacccacttcaggtcaatgggttcaaagatctgcatgagtgcctagaagctgcaatgattgaaggagaaattgagtctttacattcagagaattcaggaaaatcaggccaagagcattggtttactgaattaccacctgtgttaacatttgaattgtcaagatttgaatttaatcaggcattgggaagaccagaaaaaattcacaacaaattagaatttccccaagttttatatttggacagatacatgcacagaaacagagaaataacaagaattaagagggaagagatcaagagactgaaagattacctcacggtattacaacaaaggctagaaagatatttaagctatggttccggtcccaaacgattccccttggtagatgttcttcagtatgcattggaatttgcctcaagtaaacctgtttgcacttctcctgttgacgatattgacgctagttccccacctagtggttccataccatcacagacattaccaagcacaacagaacaacagggagccctatcttcagaactgccaagcacatcaccttcatcagttgctgccatttcatcgagatcagtaatacacaaaccatttactcagtcccggatacctccagatttgcccatgcatccggcaccaaggcacataacggaggaagaactttctgtgctggaaagttgtttacatcgctggaggacagaaatagaaaatgacaccagagatttgcaggaaagcatatccagaatccatcgaacaattgaattaatgtactctgacaaatctatgatacaagttccttatcgattacatgccgttttagttcacgaaggccaagctaatgctgggcactactgggcatatatttttgatcatcgtgaaagcagatggatgaagtacaatgatattgctgtgacaaaatcatcatgggaagagctagtgagggactcttttggtggttatagaaatgccagtgcatactgtttaatgtacataaatgataaggcacagttcctaatacaagaggagtttaataaagaaactgggcagccccttgttggtatagaaacattaccaccggatttgagagattttgttgaggaagacaaccaacgatttgaaaaagaactagaagaatgggatgcacaacttgcccagaaagctttgcaggaaaagcttttagcgtctcagaaattgagagagtcagagacttctgtgacaacagcacaagcagcaggagacccagaatatctagagcagccatcaagaagtgatttctcaaagcacttgaaagaagaaactattcaaataattaccaaggcatcacatgagcatgaagataaaagtcctgaaacagttttgcagtcggcaattaagttggaatatgcaaggttggttaagttggcccaagaagacaccccaccagaaaccgattatcgtttacatcatgtagtggtctactttatccagaaccaggcaccaaagaaaattattgagaaaacattactagaacaatttggagatagaaatttgagttttgatgaaaggtgtcacaacataatgaaagttgctcaagccaaactggaaatgataaaacctgaagaagtaaacttggaggaatatgaggagtggcatcaggattataggaaattcagggaaacaactatgtatctcataattgggctagaaaattttcaaagagaaagttatatagattccttgctgttcctcatctgtgcttatcagaataacaaagaactcttgtctaaaggcttatacagaggacatgatgaagaattgatatcacattatagaagagaatgtttgctaaaattaaatgagcaagccgcagaactcttcgaatctggagaggatcgagaagtaaacaatggtttgattatcatgaatgagtttattgtcccatttttgccattattactggtggatgaaatggaagaaaaggatatactagctgtagaagatatgagaaatcgatggtgttcctaccttggtcaagaaatggaaccacacctccaagaaaagctgacagattttttgccaaaactgcttgattgttctatggagattaaaagtttccatgagccaccgaagttaccttcatattccacgcatgaactctgtgagcgatttgcccgaatcatgttgtccctcagtcgaactcctgctgatggaagataaactgcacactttccctgaacacactgtataaactctttttagttcttaacccttgccttcctgtcacagggtttgcttgttgctgctatagtttttaacttttttttattttaataactgcaaaagacaaaatgactatacagactttagtcagactgcagacaataaagctgaaaatcgcatggcgctcagacattttaaccggaactgatgtataatcacaaatctaattgattttattatggcaaaactatgcttttgccaccttcctgttgcagtattactttgcttttatcttttctttctcaacagctttccattcagtctggatccttccatgactacagccatttaagtgttcagcactgtgtacgatacataatatttggtagcttgtaaatgaaataaagaataaagttttatttatggctacctatgtgtttgtaagcaggtatattgtatattagtgtattagtaatactagataaatgaattttgtctggggattaagattggatagttaatagattaatacaatcttttaattctgctctaatgctagcaaattggaaaatgtttaagtctttgacacttaaatttatctatatttttaacaaagttcttgaacttagtatggcaccggaacctgttttgaattcagtcaggtttttactcaagtaagtggttgattttttttaagtcaaactacactgaaacttttatccttttcttagattaatcttactttttaaatgtatttacaatatacagcaaggtgattatttcaagagaatcccaaagtacttgaataagggctattgtaaaatttaaaagaaatatttatatatacacatatatacacatacacacatgtatatatatattcttcataatggaggacaatgttttgcaatatataaatcattctatttttgtaaattgtatatcactttaattgaaaatgttctctactaattaatactgtgaaacaaaattgatgttgtttaactagaagttatgagtatcttaactgcctttattccttttcaaaaaggaaaaagctgtagaacattttgtagatgaaactactgtttaagattaatgaattaatattgtgaatgaaaatcaaaatccatactttaaaggtaatcatgttactaacaacctatttttgaattcataaaaatttctttataaatgatgttttgtgaacatagtaaaatagaccattatactatgtgtatgtttgatacagcgtcgccaaaactagtgttctttattagtgcctctcacaaaagatcctggatggaggagtaagatgaaatattatgctattatatgatgctgtttgtaaaggtattaatgtactagtaaggtgttaatgacaaggaattagtactattcctgttgtaaagttagattttgcatattgtatctatcaaaatatgtttgggtttagattttaagttgtctactgagcagatttctgcattggttttccagtcctgttaaaagtttagaaacttcatatgtgtcatcacagcttttgtaaagaaagtatccttaatattttatgacattcta

SEQ ID NO: 28 - protein, 832 aa, Homo sapiens
MRELRYLFALLVGTKRKYVDPSRAVEILKDAFKSNDSQQQDVSEFTHKLLDWLEDAFQMKAEEETDEEKPKNPMVELFYGRFLAVGVLEGKKFENTEMFGQYPLQVNGFKDLHECLEAAMIEGEIESLHSENSGKSGQEHWFTELPPVLTFELSRFEFNQALGRPEKIHNKLEFPQVLYLDRYMHRNREITRIKREEIKRLKDYLTVLQQRLERYLSYGSGPKRFPLVDVLQYALEFASSKPVCTSPVDDIDASSPPSGSIPSQTLPSTTEQQGALSSELPSTSPSSVAAISSRSVIHKPFTQSRIPPDLPMHPAPRHITEEELSVLESCLHRWRTEIENDTRDLQESISRIHRTIELMYSDKSMIQVPYRLHAVLVHEGQANAGHYWAYIFDHRESRWMKYNDIAVTKSSWEELVRDSFGGYRNASAYCLMYINDKAQFLIQEEFNKETGQPLVGIETLPPDLRDFVEEDNQRFEKELEEWDAQLAQKALQEKLLASQKLRESETSVTTAQAAGDPEYLEQPSRSDFSKHLKEETIQIITKASHEHEDKSPETVLQSAIKLEYARLVKLAQEDTPPETDYRLHHVVVYFIQNQAPKKIIEKTLLEQFGDRNLSFDERCHNIMKVAQAKLEMIKPEEVNLEEYEEWHQDYRKFRETTMYLIIGLENFQRESYIDSLLFLICAYQNNKELLSKGRGHDEELISHYRRECLLKLNEQAAELFESGEDREVNNGLIIMNEFIVPFLPLLLVDEMEEKDILAVEDMRNRWCSYLGQEMEPHLQEKLTDFLPKLLDCSMEIKSFHEPPKLPSYSTHELCERFARIMLSLSRTPADGR

SEQ ID NO: 29 - DNA, 5217 bp, Homo sapiens
aagcagcccgcggaccggcagcaaaggaacgtgcgaacgcgtgacgccgcccgactggctcgcgctctcccgtgccccggcgtcctccgcccgctcatggcccgggccgccgcggacgagcggcgctgaggcgggccgcgtggagacgtgaggcggccgccgtggccctcacagtcggcgtttcgccgcctgcccgcggtgcccgcgcacgccggccgccatcgccttcgcgcctggctggcgggggcgctgtcctcccaggccgtccgcgccgctccctggagctcggcggagcgcggcagccagggccggcggaggcgcgaggagccgggcgccaccgccgccgccgccgccgccgccgcgggggccatgaccgtggagcagaacgtgctgcagcagagcgcggcgcagaagcaccagcagacgtttttgaatcaactgagagaaattacggggattaatgacacccagatactacagcaagccttgaaggatagtaatggaaacttggaattagcagtggctttccttactgcgaagaatgctaagacccctcagcaggaggagacaacttactaccaaacagcacttcctggcaatgatagatacatcagtgtgggaagccaagcagatacaaatgtgattgatctcactggagatgataaagatgatcttcagagagcaattgccttgagtttggccgaatcaaacagggcattcagggagactggaataactgatgaggaacaagccattagcagagttcttgaagccagcatagcagagaataaagcatgtttgaagaggacacctacagaagtttggagggattctcgaaacccttatgatagaaaaagacaggacaaagctcccgttgggctaaagaatgttggcaatacttgttggtttagtgctgttattcagtcattatttaatcttttggaatttagaagattagttctgaattacaagcctccatcaaatgctcaagatttaccccgaaaccaaaaggaacatcggaatttgccttttatgcgtgagctgaggtatctatttgcacttcttgttggtaccaaaaggaagtatgttgatccatcaagagcagttgaaattcttaaggatgctttcaaatcaaatgactcacagcagcaagatgtgagtgagtttacacacaaattattagattggttagaagatgccttccaaatgaaagctgaagaggagacggatgaagagaagccaaagaaccccatggtagagttgttctatggcagattcctggctgtgggagtacttgaaggtaaaaaatttgaaaacactgaaatgtttggtcagtacccacttcaggtcaatgggttcaaagatctgcatgagtgcctagaagctgcaatgattgaaggagaaattgagtctttacattcagagaattcaggaaaatcaggccaagagcattggtttactgaattaccacctgtgttaacatttgaattgtcaagatttgaatttaatcaggcattgggaagaccagaaaaaattcacaacaaattagaatttccccaagttttatatttggacagatacatgcacagaaacagagaaataacaagaattaagagggaagagatcaagagactgaaagattacctcacggtattacaacaaaggctagaaagatatttaagctatggttccggtcccaaacgattccccttggtagatgttcttcagtatgcattggaatttgcctcaagtaaacctgtttgcacttctcctgttgacgatattgacgctagttccccacctagtggttccataccatcacagacattaccaagcacaacagaacaacagggagccctatcttcagaactgccaagcacatcaccttcatcagttgctgccatttcatcgagatcagtaatacacaaaccatttactcagtcccggatacctccagatttgcccatgcatccggcaccaaggcacataacggaggaagaactttctgtgctggaaagttgtttacatcgctggaggacagaaatagaaaatgacaccagagatttgcaggaaagcatatccagaatccatcgaacaattgaattaatgtactctgacaaatctatgatacaagttccttatcgattacatgccgttttagttcacgaaggccaagctaatgctgggcactactgggcatatatttttgatcatcgtgaaagcagatggatgaagtacaatgatattgctgtgacaaaatcatcatgggaagagctagtgagggactcttttggtggttatagaaatgccagtgcatactgtttaatgtacataaatgataaggcacagttcctaatacaagaggagtttaataaagaaactgggcagccccttgttggtatagaaacattaccaccggatttgagagattttgttgaggaagacaaccaacgatttgaaaaagaactagaagaatgggatgcacaacttgcccagaaagctttgcaggaaaagcttttagcgtctcagaaattgagagagtcagagacttctgtgacaacagcacaagcagcaggagacccagaatatctagagcagccatcaagaagtgatttctcaaagcacttgaaagaagaaactattcaaataattaccaaggcatcacatgagcatgaagataaaagtcctgaaacagttttgcagtcgatcatgatgacaccgaacatgcaaggtattatcatggcgataggtaaatccaggagtgtatatgacaggtgtggccctgaagcagggttctttaaggcaattaagttggaatatgcaaggttggttaagttggcccaagaagacaccccaccagaaaccgattatcgtttacatcatgtagtggtctactttatccagaaccaggcaccaaagaaaattattgagaaaacattactagaacaatttggagatagaaatttgagttttgatgaaaggtgtcacaacataatgaaagttgctcaagccaaactggaaatgataaaacctgaagaagtaaacttggaggaatatgaggagtggcatcaggattataggaaattcagggaaacaactatgtatctcataattgggctagaaaattttcaaagagaaagttatatagattccttgctgttcctcatctgtgcttatcagaataacaaagaactcttgtctaaaggcttatacagaggacatgatgaagaattgatatcacattatagaagagaatgtttgctaaaattaaatgagcaagccgcagaactcttcgaatctggagaggatcgagaagtaaacaatggtttgattatcatgaatgagtttattgtcccatttttgccattattactggtggatgaaatggaagaaaaggatatactagctgtagaagatatgagaaatcgatggtgttcctaccttggtcaagaaatggaaccacacctccaagaaaagctgacagattttttgccaaaactgcttgattgttctatggagattaaaagtttccatgagccaccgaagttaccttcatattccacgcatgaactctgtgagcgatttgcccgaatcatgttgtccctcagtcgaactcctgctgatggaagataaactgcacactttccctgaacacactgtataaactctttttagttcttaacccttgccttcctgtcacagggtttgcttgttgctgctatagtttttaacttttttttattttaataactgcaaaagacaaaatgactatacagactttagtcagactgcagacaataaagctgaaaatcgcatggcgctcagacattttaaccggaactgatgtataatcacaaatctaattgattttattatggcaaaactatgcttttgccaccttcctgttgcagtattactttgcttttatcttttctttctcaacagctttccattcagtctggatccttccatgactacagccatttaagtgttcagcactgtgtacgatacataatatttggtagcttgtaaatgaaataaagaataaagttttatttatggctacctatgtgtttgtaagcaggtatattgtatattagtgtattagtaatactagataaatgaattttgtctggggattaagattggatagttaatagattaatacaatcttttaattctgctctaatgctagcaaattggaaaatgtttaagtctttgacacttaaatttatctatatttttaacaaagttcttgaacttagtatggcaccggaacctgttttgaattcagtcaggtttttactcaagtaagtggttgattttttttaagtcaaactacactgaaacttttatccttttcttagattaatcttactttttaaatgtatttacaatatacagcaaggtgattatttcaagagaatcccaaagtacttgaataagggctattgtaaaatttaaaagaaatatttatatatacacatatatacacatacacacatgtatatatatattcttcataatggaggacaatgttttgcaatatataaatcattctatttttgtaaattgtatatcactttaattgaaaatgttctctactaattaatactgtgaaacaaaattgatgttgtttaactagaagttatgagtatcttaactgcctttattccttttcaaaaaggaaaaagctgtagaacattttgtagatgaaactactgtttaagattaatgaattaatattgtgaatgaaaatcaaaatccatactttaaaggtaatcatgttactaacaacctatttttgaattcataaaaatttctttataaatgatgttttgtgaacatagtaaaatagaccattatactatgtgtatgtttgatacagcgtcgccaaaactagtgttctttattagtgcctctcacaaaagatcctggatggaggagtaagatgaaatattatgctattatatgatgctgtttgtaaaggtattaatgtactagtaaggtgttaatgacaaggaattagtactattcctgttgtaaagttagattttgcatattgtatctatcaaaatatgtttgggtttagattttaagttgtctactgagcagatttctgcattggttttccagtcctgttaaaagtttagaaacttcatatgtgtcatcacagcttttgtaaagaaagtatccttaatattttatgacattcta

SEQ ID NO: 30 - protein, 1085 aa, Homo sapiens
MTVEQNVLQQSAAQKHQQTFLNQLREITGINDTQILQQALKDSNGNLELAVAFLTAKNAKTPQQEETTYYQTALPGNDRYISVGSQADTNVIDLTGDDKDDLQRAIALSLAESNRAFRETGITDEEQAISRVLEASIAENKACLKRTPTEVWRDSRNPYDRKRQDKAPVGLKNVGNTCWFSAVIQSLFNLLEFRRLVLNYKPPSNAQDLPRNQKEHRNLPFMRELRYLFALLVGTKRKYVDPSRAVEILKDAFKSNDSQQQDVSEFTHKLLDWLEDAFQMKAEEETDEEKPKNPMVELFYGRFLAVGVLEGKKFENTEMFGQYPLQVNGFKDLHECLEAAMIEGEIESLHSENSGKSGQEHWFTELPPVLTFELSRFEFNQALGRPEKIHNKLEFPQVLYLDRYMHRNREITRIKREEIKRLKDYLTVLQQRLERYLSYGSGPKRFPLVDVLQYALEFASSKPVCTSPVDDIDASSPPSGSIPSQTLPSTTEQQGALSSELPSTSPSSVAAISSRSVIHKPFTQSRIPPDLPMHPAPRHITEEELSVLESCLHRWRTEIENDTRDLQESISRIHRTIELMYSDKSMIQVPYRLHAVLVHEGQANAGHYWAYIFDHRESRWMKYNDIAVTKSSWEELVRDSFGGYRNASAYCLMYINDKAQFLIQEEFNKETGQPLVGIETLPPDLRDFVEEDNQRFEKELEEWDAQLAQKALQEKLLASQKLRESETSVTTAQAAGDPEYLEQPSRSDFSKHLKEETIQIITKASHEHEDKSPETVLQSIMMTPNMQGIIMAIGKSRSVYDRCGPEAGFFKAIKLEYARLVKLAQEDTPPETDYRLHHVVVYFIQNQAPKKIIEKTLLEQFGDRNLSFDERCHNIMKVAQAKLEMIKPEEVNLEEYEEWHQDYRKFRETTMYLIIGLENFQRESYIDSLLFLICAYQNNKELLSKGRGHDEELISHYRRECLLKLNEQAAELFESGEDREVNNGLIIMNEFIVPFLPLLLVDEMEEKDILAVEDMRNRWCSYLGQEMEPHLQEKLTDFLPKLLDCSMEIKSFHEPPKLPSYSTHELCERFARIMLSLSRTPADGR

SEQ ID NO: 31 - DNA, 5121 bp, Homo sapiens
aagcagcccgcggaccggcagcaaaggaacgtgcgaacgcgtgacgccgcccgactggctcgcgctctcccgtgccccggcgtcctccgcccgctcatggcccgggccgccgcggacgagcggcgctgaggcgggccgcgtggagacgtgaggcggccgccgtggccctcacagtcggcgtttcgccgcctgcccgcggtgcccgcgcacgccggccgccatcgccttcgcgcctggctggcgggggcgctgtcctcccaggccgtccgcgccgctccctggagctcggcggagcgcggcagccagggccggcggaggcgcgaggagccgggcgccaccgccgccgccgccgccgccgccgcgggggccatgaccgtggagcagaacgtgctgcagcagagcgcggcgcagaagcaccagcagacgtttttgaatcaactgagagaaattacggggattaatgacacccagatactacagcaagccttgaaggatagtaatggaaacttggaattagcagtggctttccttactgcgaagaatgctaagacccctcagcaggaggagacaacttactaccaaacagcacttcctggcaatgatagatacatcagtgtgggaagccaagcagatacaaatgtgattgatctcactggagatgataaagatgatcttcagagagcaattgccttgagtttggccgaatcaaacagggcattcagggagactggaataactgatgaggaacaagccattagcagagttcttgaagccagcatagcagagaataaagcatgtttgaagaggacacctacagaagtttggagggattctcgaaacccttatgatagaaaaagacaggacaaagctcccgttgggctaaagaatgttggcaatacttgttggtttagtgctgttattcagtcattatttaatcttttggaatttagaagattagttctgaattacaagcctccatcaaatgctcaagatttaccccgaaaccaaaaggaacatcggaatttgccttttatgcgtgagctgaggtatctatttgcacttcttgttggtaccaaaaggaagtatgttgatccatcaagagcagttgaaattcttaaggatgctttcaaatcaaatgactcacagcagcaagatgtgagtgagtttacacacaaattattagattggttagaagatgccttccaaatgaaagctgaagaggagacggatgaagagaagccaaagaaccccatggtagagttgttctatggcagattcctggctgtgggagtacttgaaggtaaaaaatttgaaaacactgaaatgtttggtcagtacccacttcaggtcaatgggttcaaagatctgcatgagtgcctagaagctgcaatgattgaaggagaaattgagtctttacattcagagaattcaggaaaatcaggccaagagcattggtttactgaattaccacctgtgttaacatttgaattgtcaagatttgaatttaatcaggcattgggaagaccagaaaaaattcacaacaaattagaatttccccaagttttatatttggacagatacatgcacagaaacagagaaataacaagaattaagagggaagagatcaagagactgaaagattacctcacggtattacaacaaaggctagaaagatatttaagctatggttccggtcccaaacgattccccttggtagatgttcttcagtatgcattggaatttgcctcaagtaaacctgtttgcacttctcctgttgacgatattgacgctagttccccacctagtggttccataccatcacagacattaccaagcacaacagaacaacagggagccctatcttcagaactgccaagcacatcaccttcatcagttgctgccatttcatcgagatcagtaatacacaaaccatttactcagtcccggatacctccagatttgcccatgcatccggcaccaaggcacataacggaggaagaactttctgtgctggaaagttgtttacatcgctggaggacagaaatagaaaatgacaccagagatttgcaggaaagcatatccagaatccatcgaacaattgaattaatgtactctgacaaatctatgatacaagttccttatcgattacatgccgttttagttcacgaaggccaagctaatgctgggcactactgggcatatatttttgatcatcgtgaaagcagatggatgaagtacaatgatattgctgtgacaaaatcatcatgggaagagctagtgagggactcttttggtggttatagaaatgccagtgcatactgtttaatgtacataaatgataaggcacagttcctaatacaagaggagtttaataaagaaactgggcagccccttgttggtatagaaacattaccaccggatttgagagattttgttgaggaagacaaccaacgatttgaaaaagaactagaagaatgggatgcacaacttgcccagaaagctttgcaggaaaagcttttagcgtctcagaaattgagagagtcagagacttctgtgacaacagcacaagcagcaggagacccagaatatctagagcagccatcaagaagtgatttctcaaagcacttgaaagaagaaactattcaaataattaccaaggcatcacatgagcatgaagataaaagtcctgaaacagttttgcagtcggcaattaagttggaatatgcaaggttggttaagttggcccaagaagacaccccaccagaaaccgattatcgtttacatcatgtagtggtctactttatccagaaccaggcaccaaagaaaattattgagaaaacattactagaacaatttggagatagaaatttgagttttgatgaaaggtgtcacaacataatgaaagttgctcaagccaaactggaaatgataaaacctgaagaagtaaacttggaggaatatgaggagtggcatcaggattataggaaattcagggaaacaactatgtatctcataattgggctagaaaattttcaaagagaaagttatatagattccttgctgttcctcatctgtgcttatcagaataacaaagaactcttgtctaaaggcttatacagaggacatgatgaagaattgatatcacattatagaagagaatgtttgctaaaattaaatgagcaagccgcagaactcttcgaatctggagaggatcgagaagtaaacaatggtttgattatcatgaatgagtttattgtcccatttttgccattattactggtggatgaaatggaagaaaaggatatactagctgtagaagatatgagaaatcgatggtgttcctaccttggtcaagaaatggaaccacacctccaagaaaagctgacagattttttgccaaaactgcttgattgttctatggagattaaaagtttccatgagccaccgaagttaccttcatattccacgcatgaactctgtgagcgatttgcccgaatcatgttgtccctcagtcgaactcctgctgatggaagataaactgcacactttccctgaacacactgtataaactctttttagttcttaacccttgccttcctgtcacagggtttgcttgttgctgctatagtttttaacttttttttattttaataactgcaaaagacaaaatgactatacagactttagtcagactgcagacaataaagctgaaaatcgcatggcgctcagacattttaaccggaactgatgtataatcacaaatctaattgattttattatggcaaaactatgcttttgccaccttcctgttgcagtattactttgcttttatcttttctttctcaacagctttccattcagtctggatccttccatgactacagccatttaagtgttcagcactgtgtacgatacataatatttggtagcttgtaaatgaaataaagaataaagttttatttatggctacctatgtgtttgtaagcaggtatattgtatattagtgtattagtaatactagataaatgaattttgtctggggattaagattggatagttaatagattaatacaatcttttaattctgctctaatgctagcaaattggaaaatgtttaagtctttgacacttaaatttatctatatttttaacaaagttcttgaacttagtatggcaccggaacctgttttgaattcagtcaggtttttactcaagtaagtggttgattttttttaagtcaaactacactgaaacttttatccttttcttagattaatcttactttttaaatgtatttacaatatacagcaaggtgattatttcaagagaatcccaaagtacttgaataagggctattgtaaaatttaaaagaaatatttatatatacacatatatacacatacacacatgtatatatatattcttcataatggaggacaatgttttgcaatatataaatcattctatttttgtaaattgtatatcactttaattgaaaatgttctctactaattaatactgtgaaacaaaattgatgttgtttaactagaagttatgagtatcttaactgcctttattccttttcaaaaaggaaaaagctgtagaacattttgtagatgaaactactgtttaagattaatgaattaatattgtgaatgaaaatcaaaatccatactttaaaggtaatcatgttactaacaacctatttttgaattcataaaaatttctttataaatgatgttttgtgaacatagtaaaatagaccattatactatgtgtatgtttgatacagcgtcgccaaaactagtgttctttattagtgcctctcacaaaagatcctggatggaggagtaagatgaaatattatgctattatatgatgctgtttgtaaaggtattaatgtactagtaaggtgttaatgacaaggaattagtactattcctgttgtaaagttagattttgcatattgtatctatcaaaatatgtttgggtttagattttaagttgtctactgagcagatttctgcattggttttccagtcctgttaaaagtttagaaacttcatatgtgtcatcacagcttttgtaaagaaagtatccttaatattttatgacattcta

SEQ ID NO: 32 - protein, 1053 aa, Homo sapiens
MTVEQNVLQQSAAQKHQQTFLNQLREITGINDTQILQQALKDSNGNLELAVAFLTAKNAKTPQQEETTYYQTALPGNDRYISVGSQADTNVIDLTGDDKDDLQRAIALSLAESNRAFRETGITDEEQAISRVLEASIAENKACLKRTPTEVWRDSRNPYDRKRQDKAPVGLKNVGNTCWFSAVIQSLFNLLEFRRLVLNYKPPSNAQDLPRNQKEHRNLPFMRELRYLFALLVGTKRKYVDPSRAVEILKDAFKSNDSQQQDVSEFTHKLLDWLEDAFQMKAEEETDEEKPKNPMVELFYGRFLAVGVLEGKKFENTEMFGQYPLQVNGFKDLHECLEAAMIEGEIESLHSENSGKSGQEHWFTELPPVLTFELSRFEFNQALGRPEKIHNKLEFPQVLYLDRYMHRNREITRIKREEIKRLKDYLTVLQQRLERYLSYGSGPKRFPLVDVLQYALEFASSKPVCTSPVDDIDASSPPSGSIPSQTLPSTTEQQGALSSELPSTSPSSVAAISSRSVIHKPFTQSRIPPDLPMHPAPRHITEEELSVLESCLHRWRTEIENDTRDLQESISRIHRTIELMYSDKSMIQVPYRLHAVLVHEGQANAGHYWAYIFDHRESRWMKYNDIAVTKSSWEELVRDSFGGYRNASAYCLMYINDKAQFLIQEEFNKETGQPLVGIETLPPDLRDFVEEDNQRFEKELEEWDAQLAQKALQEKLLASQKLRESETSVTTAQAAGDPEYLEQPSRSDFSKHLKEETIQIITKASHEHEDKSPETVLQSAIKLEYARLVKLAQEDTPPETDYRLHHVVVYFIQNQAPKKIIEKTLLEQFGDRNLSFDERCHNIMKVAQAKLEMIKPEEVNLEEYEEWHQDYRKFRETTMYLIIGLENFQRESYIDSLLFLICAYQNNKELLSKGRGHDEELISHYRRECLLKLNEQAAELFESGEDREVNNGLIIMNEFIVPFLPLLLVDEMEEKDILAVEDMRNRWCSYLGQEMEPHLQEKLTDFLPKLLDCSMEIKSFHEPPKLPSYSTHELCERFARIMLSLSRTPADGR

SEQ ID NO: 33 - DNA, 4920 bp, Homo sapiens
gaggcggccgccgtggccctcacagtcggcgtttcgccgcctgcccgcggtgcccgcgcacgccggccgccatcgaccgtggagcagaacgtgctgcagcagagcgcggcgcagaagcaccagcagacgtttttgaatcaactgagagaaattacggggattaatgacacccagatactacagcaagccttgaaggatagtaatggaaacttggaattagcagtggctttccttactgcgaagaatgctaagacccctcagcaggaggagacaacttactaccaaacagcacttcctggcaatgatagatacatcagtgtgggaagccaagcagatacaaatgtgattgatctcactggagatgataaagatgatcttcagagagcaattgccttgagtttggccgaatcaaacagggcattcagggagactggaataactgatgaggaacaagccattagcagagttcttgaagccagcatagcagagaataaagcatgtttgaagaggacacctacagaagtttggagggattctcgaaacccttatgatagaaaaagacaggacaaagctcccgttgggctaaagaatgttggcaatacttgttggtttagtgctgttattcagtcattatttaatcttttggaatttagaagattagttctgaattacaagcctccatcaaatgctcaagatttaccccgaaaccaaaaggaacatcggaatttgccttttatgcgtgagctgaggtatctatttgcacttcttgttggtaccaaaaggaagtatgttgatccatcaagagcagttgaaattcttaaggatgctttcaaatcaaatgactcacagcagcaagatgtgagtgagtttacacacaaattattagattggttagaagatgccttccaaatgaaagctgaagaggagacggatgaagagaagccaaagaaccccatggtagagttgttctatggcagattcctggctgtgggagtacttgaaggtaaaaaatttgaaaacactgaaatgtttggtcagtacccacttcaggtcaatgggttcaaagatctgcatgagtgcctagaagctgcaatgattgaaggagaaattgagtctttacattcagagaattcaggaaaatcaggccaagagcattggtttactgaattaccacctgtgttaacatttgaattgtcaagatttgaatttaatcaggcattgggaagaccagaaaaaattcacaacaaattagaatttccccaagttttatatttggacagatacatgcacagaaacagagaaataacaagaattaagagggaagagatcaagagactgaaagattacctcacggtattacaacaaaggctagaaagatatttaagctatggttccggtcccaaacgattccccttggtagatgttcttcagtatgcattggaatttgcctcaagtaaacctgtttgcacttctcctgttgacgatattgacgctagttccccacctagtggttccataccatcacagacattaccaagcacaacagaacaacagggagccctatcttcagaactgccaagcacatcaccttcatcagttgctgccatttcatcgagatcagtaatacacaaaccatttactcagtcccggatacctccagatttgcccatgcatccggcaccaaggcacataacggaggaagaactttctgtgctggaaagttgtttacatcgctggaggacagaaatagaaaatgacaccagagatttgcaggaaagcatatccagaatccatcgaacaattgaattaatgtactctgacaaatctatgatacaagttccttatcgattacatgccgttttagttcacgaaggccaagctaatgctgggcactactgggcatatatttttgatcatcgtgaaagcagatggatgaagtacaatgatattgctgtgacaaaatcatcatgggaagagctagtgagggactcttttggtggttatagaaatgccagtgcatactgtttaatgtacataaatgataaggcacagttcctaatacaagaggagtttaataaagaaactgggcagccccttgttggtatagaaacattaccaccggatttgagagattttgttgaggaagacaaccaacgatttgaaaaagaactagaagaatgggatgcacaacttgcccagaaagctttgcaggaaaagcttttagcgtctcagaaattgagagagtcagagacttctgtgacaacagcacaagcagcaggagacccagaatatctagagcagccatcaagaagtgatttctcaaagcacttgaaagaagaaactattcaaataattaccaaggcatcacatgagcatgaagataaaagtcctgaaacagttttgcagtcgatcatgatgacaccgaacatgcaaggtattatcatggcgataggtaaatccaggagtgtatatgacaggtgtggccctgaagcagggttctttaaggcaattaagttggaatatgcaaggttggttaagttggcccaagaagacaccccaccagaaaccgattatcgtttacatcatgtagtggtctactttatccagaaccaggcaccaaagaaaattattgagaaaacattactagaacaatttggagatagaaatttgagttttgatgaaaggtgtcacaacataatgaaagttgctcaagccaaactggaaatgataaaacctgaagaagtaaacttggaggaatatgaggagtggcatcaggattataggaaattcagggaaacaactatgtatctcataattgggctagaaaattttcaaagagaaagttatatagattccttgctgttcctcatctgtgcttatcagaataacaaagaactcttgtctaaaggcttatacagaggacatgatgaagaattgatatcacattatagaagagaatgtttgctaaaattaaatgagcaagccgcagaactcttcgaatctggagaggatcgagaagtaaacaatggtttgattatcatgaatgagtttattgtcccatttttgccattattactggtggatgaaatggaagaaaaggatatactagctgtagaagatatgagaaatcgatggtgttcctaccttggtcaagaaatggaaccacacctccaagaaaagctgacagattttttgccaaaactgcttgattgttctatggagattaaaagtttccatgagccaccgaagttaccttcatattccacgcatgaactctgtgagcgatttgcccgaatcatgttgtccctcagtcgaactcctgctgatggaagataaactgcacactttccctgaacacactgtataaactctttttagttcttaacccttgccttcctgtcacagggtttgcttgttgctgctatagtttttaacttttttttattttaataactgcaaaagacaaaatgactatacagactttagtcagactgcagacaataaagctgaaaatcgcatggcgctcagacattttaaccggaactgatgtataatcacaaatctaattgattttattatggcaaaactatgcttttgccaccttcctgttgcagtattactttgcttttatcttttctttctcaacagctttccattcagtctggatccttccatgactacagccatttaagtgttcagcactgtgtacgatacataatatttggtagcttgtaaatgaaataaagaataaagttttatttatggctacctatgtgtttgtaagcaggtatattgtatattagtgtattagtaatactagataaatgaattttgtctggggattaagattggatagttaatagattaatacaatcttttaattctgctctaatgctagcaaattggaaaatgtttaagtctttgacacttaaatttatctatatttttaacaaagttcttgaacttagtatggcaccggaacctgttttgaattcagtcaggtttttactcaagtaagtggttgattttttttaagtcaaactacactgaaacttttatccttttcttagattaatcttactttttaaatgtatttacaatatacagcaaggtgattatttcaagagaatcccaaagtacttgaataagggctattgtaaaatttaaaagaaatatttatatatacacatatatacacatacacacatgtatatatatattcttcataatggaggacaatgttttgcaatatataaatcattctatttttgtaaattgtatatcactttaattgaaaatgttctctactaattaatactgtgaaacaaaattgatgttgtttaactagaagttatgagtatcttaactgcctttattccttttcaaaaaggaaaaagctgtagaacattttgtagatgaaactactgtttaagattaatgaattaatattgtgaatgaaaatcaaaatccatactttaaaggtaatcatgttactaacaacctatttttgaattcataaaaatttctttataaatgatgttttgtgaacatagtaaaatagaccattatactatgtgtatgtttgatacagcgtcgccaaaactagtgttctttattagtgcctctcacaaaagatcctggatggaggagtaagatgaaatattatgctattatatgatgctgtttgtaaaggtattaatgtactagtaaggtgttaatgacaaggaattagtactattcctgttgtaaagttagattttgcatattgtatctatcaaaatatgtttgggtttagattttaagttgtctactgagcagatttctgcattggttttccagtcctgttaaaagtttagaaacttcatatgtgtcatcacagcttttgtaaagaaagtatccttaatattttatgacattcta

SEQ ID NO: 34 - protein, 864 aa, Homo sapiens
MRELRYLFALLVGTKRKYVDPSRAVEILKDAFKSNDSQQQDVSEFTHKLLDWLEDAFQMKAEEETDEEKPKNPMVELFYGRFLAVGVLEGKKFENTEMFGQYPLQVNGFKDLHECLEAAMIEGEIESLHSENSGKSGQEHWFTELPPVLTFELSRFEFNQALGRPEKIHNKLEFPQVLYLDRYMHRNREITRIKREEIKRLKDYLTVLQQRLERYLSYGSGPKRFPLVDVLQYALEFASSKPVCTSPVDDIDASSPPSGSIPSQTLPSTTEQQGALSSELPSTSPSSVAAISSRSVIHKPFTQSRIPPDLPMHPAPRHITEEELSVLESCLHRWRTEIENDTRDLQESISRIHRTIELMYSDKSMIQVPYRLHAVLVHEGQANAGHYWAYIFDHRESRWMKYNDIAVTKSSWEELVRDSFGGYRNASAYCLMYINDKAQFLIQEEFNKETGQPLVGIETLPPDLRDFVEEDNQRFEKELEEWDAQLAQKALQEKLLASQKLRESETSVTTAQAAGDPEYLEQPSRSDFSKHLKEETIQIITKASHEHEDKSPETVLQSIMMTPNMQGIIMAIGKSRSVYDRCGPEAGFFKAIKLEYARLVKLAQEDTPPETDYRLHHVVVYFIQNQAPKKIIEKTLLEQFGDRNLSFDERCHNIMKVAQAKLEMIKPEEVNLEEYEEWHQDYRKFRETTMYLIIGLENFQRESYIDSLLFLICAYQNNKELLSKGRGHDEELISHYRRECLLKLNEQAAELFESGEDREVNNGLIIMNEFIVPFLPLLLVDEMEEKDILAVEDMRNRWCSYLGQEMEPHLQEKLTDFLPKLLDCSMEIKSFHEPPKLPSYSTHELCERFARIMLSLSRTPADGR

SEQ ID NO: 35 - DNA, 125987 bp, Mus musculus
  misc_feature (1)...(125987): n = A,T,C or G
ggtttctggcacattctcccagactcaggtgagaccccgatgggcaccccgtggggcaggtcctgacacacgtcccgactccagccactgacaccattgccagcctcagtctctaaatgccacaccgctcctggggccagttgggctgggcaccactgttgcctttgaaggtaggtcccgtgcatgcagatttgaacccctgtgtgtctgtgtgtctgaggaggacttgaaagatgttgtgacacatacagtagagtacagcccttgaaactgcaatgcctgatagacatgatgggacaggagttcccagtcacttctgcagcttagagttgcaggtctctaacaattgagaggcgttagcttaacccaaaatgcaatgggaagcttgaactggtactgtgaagcctttttcctgtgtgaatcgccctcagggtcttttagattctcactggctttagataggattatgcttgttaaaagaaaaaaaaaaaaaaaaaagcaaagcaaagcaaactgggttcccaaacccagcctcaaaacaatgatagattcctgctccgcgttgtctttaaagagcagagataaatacagtcacaatactaatctaaattgaagatcattgcctctctgctataaagcttgtttagtttcttgggttaagggtatttatgtgtgacttggcaaaagctctgctcaggcattgtattgaattagtacaaactttcaaagcttcatttcagtttaatcttagcttccccccagacccccccccccacctccccagcttcaggcaccgcatccagtagggaaaaaacaggctcgaaaccaagacctcccaccagaatctaattttaaatttgcaatctgttgtcttgtgatttttcccccctcccgcttcaaatttaactttgaaataaatacatctcatctttgccactgcagcctcggaggtctgtcttccagtcacgaaagggtaatcgctgcatttattttaataaaattcttgataccacgggggagtggaaagcgatgttaataattttaactcacatccaccgtcagctggctcatggatggggctcgcacagcctccatccacagaaatgaaatgtggcttgtgcagttaacttttgacttcagtgaggcaggagtgggatttatctaatgtaaattacagaccttgcaatccagttcatgctttgagaccatctgaagggtgagcaggactgaaatttctgtgaaaagaaggtgcgtgtaccaggactgcccgcctccatgggaccatacagcaaaggggaggggcgacatggtgaggtccaagtagagggatccgatccagagatccaagtgagggagcgtcttccttaactcagatatttgcccaaagccatctattcagagtttacattctattgtagctgtctttgtagtgtgacatcattactctttgaaatttaaaaaaaaaaaaaaagattggcttaaaacttgttgatatgtttcgtttatttgtctttccttaagaaagaaatgtagtggctggagtagtgactcatcccttaggagcactggctgctcctctcaaggaccagagctttggtcgctggcatgaaaatgacaggcgactcacaacagcctgttactcaagctccagggcagtctgctgtgtgtgtgtgtgtgtgtgtgtgtgtgtgtnnnnnnnnnnnnnnnnnnnnnnnnnnnnnnnnnnnnnnnnnnnnnnnnnnnnnnnnnnnnnnnnnnnnnnnnnnnnnnnnnnnnnnnnnnnnnnnnnnnnnnnnnnnnnnnnnnnnnnnnnnnnnnnnnnnnnnnnnnnnnnnnnnnnnnnnnnnnnnnnnnnnnnnnnnnnnnnnnnnnnnnnnnnnnnnnnnnnnnnnnnnnnnnnnnnnnnnnnnnnnnnnnnnnnnnnnnnnnnnnnnnnnnnnnnnnnnnnnnnnnnnnnnnnnnnnnnnnnnnnnnnnnnnnnnnnnnnnnnnnnnnnnnnnnnnnnnnnnnnnnnnnnnnnnnnnnnnnnnnnnnnnnnnnnnnnnnnnnnnnnnnnncaaataaaaataaactaagtcttatttaacaaaatgggttgtgtggggttgtagctcagtggtagaacacttacctagcctagtgtaagatcttggattgagtcctacctctacagaaaaataagcaactgaggtgaaaattagttccctataagcaccccgcccagagtaactccttcacacatttcccactttactactgtggcttagatctcatctctagtagagttttcatttgtgggtaagaggagttttgttccagagaagtttaatcgtaatggtgggatcctggtcttgataaacgtttactcctggccagggcaggctatggccagccagtctactgtccgggttttggtcactgactctcctgttcttgtatttgggatggaacatcctactgcctgcctgtttcttcacagaaagccctggtgtctagtggactagacatcataagtcataaaaatattatcctaatcttttagtgttgacggatgcggctattcacaaggatgctcttacccgcctctcccacaagcatctaagttaccaaactcttcgttatcattgcccaggacttggaccaaactggagtgttgtttcttatagtactaagaaatggcgttttaaaattgtaatatacatgatacattttaggtcatccaagatttgccaccccatctgatattaatgatagcttgggttttttcaagcttaaattcatggcaggaggttgtgttttcagagggctcatgtgttcccaaacaacttgaagaaaaggctcacaggctaagcaggcttttatgtgtgtaactcagacttttatacaatgcctttttgaaaaatgttgggggggttgctggagagatggcctagggaccaggttcaattcccagcacccacgtggtggctcacaaccatctatgagcctgtgattctataccagaggatcagatgtcttctgacctctgtaggcaaaacaccatgaacataagatacatttaaaaatgcattctgtttttctgaacacatgccatcattgttgttaatgataatcccacagagcaagcagttactccctccctccctgccttctccccctcccctcctctttctctttctctttctctttctctttctctttctctttctctttctctttctctttctctctttctctttctccttctctttctccttctccttctttctctctctctnnnnnnnnnnnnnnnnnnnnaaaattataccataaagccatatacacttataccacttaacacacattacacctttaacccctatatccccttaacccccaatacacacaaaataaataatttcactatataccattttaccatatataccacaatattaccactattaacccaatatacccatttatacacgcttatttacactttatacacttttacacccctattaaccatttaaccctatatacccctatattatccctatttaccacatatattcaccatttttccaccatttaatcccttatatacaccatataaccctatttattccttattaaccatatttttacacctttataccttatttaaccttatttccctaatttaatataaccatatattttccctttatattaccattaatttacaccatttaaaccttaatataccaattttatccccttttcacacttatttccacattaaccccatttaccattattattacccctatttttcccaatattcccactttttccatattttaccattttcacatttatccccattttaccctaaatccaatatattaacattattttaccaataattaacccaattttaccattttatccattatttaccctttttacatttttccctatatccctttttcccaatatcccttatatatcccatataccaatattccctttatccaattttccctttccctttccctttcccttcacgatgtcctgaaacttgctctgtagtccaagctaacctccaactgagagatctgcctctgcctctgcctctgcctctgcctctgcctctgcctctctgcctctctgcctctctctctgcctctctctctgcctctctctctgcctctctctctgcctctctgcctctctctctgcctctctctgcgcctctctctgcgcccctctctgcctctctgcctctctctgcgcctctctctgcgcctctctctctgcctctctctctgcctctctctctgcctctctctgcctctctctctgcctctctctctgcctctctctctgcctctctctctgcctctctctctgcctctctctctgcctctctgcctctctgcctctgcctcctgagctgggattaaagcctgggccaccactgcctggcctagcagttatgtttttcatgtgtttcaattgtgtttgtgtttacttgagacagctgctttaaaattctttgcatcataattccagtgtctgggccacctggagtttggcatctattttcctagatatttgggatgctccaagggcattttgaacattacgttgtaagattctaggtcttgttggaaatttctcaatggacatggattgtgtggcggctgttttctccttcagggagtctgaaagttgatggctggcttaggaatttagatctcaggccccatgtcagccaagtctccaaagccttagctgtggtactttgggcttgcgccatgtttgtaaccacaaggtcagcctgagactggggctgctcagccctatgccattgctgtggtttttagagtcagtcccaggcccgtgcgcccgtgcgcccgagctgtgtgtgggtttgcacacacgaggagaggcttgttttcatcgctttacttcctgaggtccccactcgttcttggctcccaggttccgttcttcgttcttctgctcagaagcacagggtctgctgcccactggttcttaaaggcggaggagctcctgctcggtgaatgtcttcttcacgtctggactcctcctcagtctggatgcttctgtttagttttggtttagggtttctagttgtgacttatggagtggggtagtgtcttgcttcttattgatggcagatattagcagttcatttttgttcactgccgtaacacaagtgcgcagtgtccctggatagcccctcccccgtgtttacttagccacgacttttgtctgtgcatcacctggcaacagtgttctcacggctgcctactaagtgcccgcttgttccttaatttcttggtttattgaggagatagtagaatgttctaggtgcttttttaaggttaaaaaagagaaagggttgggatgattataaatatatttcttcagagaaactccctacttttagatttaattttttaaccaaactattctgtttaattaaggcttgatttgtttgtttgagtttttttttttttaattatttcaaaataattgcagagtcatggctaattttacaaaggggtttatccattacctgtttctcagctacgtgttttgtcactttcttttccttttctctgtctgtgtctctcctactctgtctgtctgcctctctctctgtgtatgtgtctgtcctttagaagatctgtatcactttctcttacagcgatagtatataatatagtatctgcatcatttcatcacatggatttagtaagctaaggaatcctacagaagcaatcgaggctcccttccagatgtgtgtgtgtgtgtgtgtgtgtgtgtgtgtaacaccataatgaaggtttgtgcattttgataaccttcctaaacacaactcctagctcttttcctgtgtatttaatttgacggagtgtgaggcccatttagtatagaagagtcatggtgtccctgagaagcccttagtcattctgccattgacccttggcccccagagacccagcgctctctgaaccttccaagtccacatgtaccactctgaaatgttgctccagtccaccatgctgctacgcttcccctgagtcatcctggatcccagcatgtctgccctgtggccctgactagtgggtttctaagcttctgccagatggtttcaaacccaggaagaaagcagaaagtgcaggcaggattcactggaacgaggctgtgtgaggaagcacggtggaggggtacaggtcacagatcagggcagcatggaacccagtccctattgtctgtcttttacattttaatttcatgtgtatgcgtgtttcacttgcatctgtatctgtagtctgtgtgcatgaggtgcccaaggagtccagaggagggcagcactgcccgctggagttccagacgattgtgcgacgccttgtgggttcttgggattgtaagaaggtcaagtgttgttgaacactgagccgtctctccagcctccgtgtctgactttattgcatgatctgtcacctagatttagggtgttttcttttcagtatttcttctgtttgtttatttgttttctttttattgagtgcccacttcttgccagcctctgttctgggtccctccttcattaggggctcagaacgggaggaaacaaaataagtgcagtgtctggttttcctgatatttggtttttgtgggaaagcacagaattaagataataagcaaatgaactatatatcatgtgctatgttatgtgaaatattataatgaacgttaaggaagacatcaatcagggtagagtggttctgcaagagaggttggtattcaaatccaaaggccggggaaggtcttcctgctggcaccaggttgtcctctggtgtcagtgatctgagggaatttgtgagtcggatgccagggaggaggggctccaggcagaaggaagagcgcaagtaggcccttaagataggccaggaaagcccaaataccgctgggattttagtattaaaagctatactccctccagttacctcctggatgcaaagctgtctagatccaagtgagcgtgcccctgaaaatgaagaaggaatcagtgttggtttcccagctgggaggcagacacagctctcatagcttgtcaccaaatgctagggactggaagtggctgagagttcacatttaagatacctgagatagtttggggaggggacccaagtgtaaatgcataattcctttatatttcatatacatctcccacataggctgaagctggcttcacctgatatctttaaggcatctgtgtttttcatacaacctgttgtgttgaggggaagttgagtgttgagccttctgcctggggcatcgtattgtctcggtcagggatgctaagcctctatttctggtggggctgtgtgtatttaatctagattcctacgtttttaatctgtctttccatacatttatgtctgtccttacttgggattgtattgcgtggcgtctgtttatctgaggttttgatcacctctggtttttattgaacttgatacatagatacgtatttattaactctctggccccagtgcagagtttgcaatgtttcatagagaatttttttttaaaggccactttctgcactggaaataatgaagctgttctcaccaaaaaaaaaaaaaaaaaaaaaaaaaagagtaaaaaccaggatttgtgtgtttgaaaagtaaataaagctcaaattgcaggtgggatggaacagtaaggtgacagacggggcggctggcatcttacctatgtgggagcagggctgtgggttcgcagctctctggggattgctgcccggacagggttcatctcctctgcagggagcaggcttaattttttcagccttatattctttacagagtctatcctcactcccgacctgccctgcagggaccttcgggggaaagcatttaacttgaggagtgttcctggagcccctagaaacttgcttctggagcccctagaaactaatttttcttaccttttgttgcttaacacttggtgctggccgtgccaaagtcatcccctgagaatctgtcctgataggatctaggagatttggcacttgtctttaagttcttatgccacagataaaagtggtttccttcctaccttggctcgtgaagagaatcgcactgctaaaagtgctattaatccagcagagctgtcagcgtgatgcatggaccattataattcttgcgtgttaggccgtttcctttaggaaccctctcttgggggcttttaagttgattagttttctcttggctgaaggaagcctgcccagaaagctggcgtttatattcttggcctttggatggatgtgtgatgccgtgggtcagagtggcaacagcttccccttttctcccattctgttcattcgttaggattccttccaggttttaattccagcctgtgtgagtctcagactgagactcacaactaacgtttgctttcggtcttctgtccaccgacaaagcacacagaaaccttatagttaatttagcgttttggaaacttaagagcagggattgggggtgtagttcagtttctcttgtttagcatgcacaaggccctgggttcaaaacccaattcttccttctctctgaaaataaagagctgtgtgagatggcgtgtaactccgtgaagaacatgcatctaccatgtgcaaggttctatgctcgattcctaactcctcaaaagtaaataaaataataacatgaattttaggaaattggccatgcctttactgttagtaaaatctgtgtttacttgtgcttgtaaaacatgtagcaagtgctagacttaggaattcaggaaggaattaaggatgcatcgtgatgcatcgttgacgtggaccgtcagccttttaagtttgcttagacatcacctagagaggtgtgagcatactgctttctcccgatggtgaagagggtgtcctctttcctggaagatccctttgagaatcacgatgtgtggctagtggggaacatgctagtacagcgatagcttgacctctggtatcccgatgaatcaccctgaattcactagcacatcacccggaagtttttctggtgtgccgaatgaccaagtacacaataagatatcttgtcagagccgaagccatgttagagtcaacagtgggactgtagtgatttctggaccaataggaaggcgccttacgttagtacacttgcatcttttttgctgtggtcatcaacctcaattcctgtttcctggggtgccatttactgtcttggtgactgtgtcccttctgtggtttcttaagagtagagactgtgtctctgtcatttactgctcaactctggcttctagaatgctgtagtcctcaccaactacctctcaaatgcttagatctgcatgctgttgacagagctagcgcggtgcttcccagggagacagaccctctttttcttatttcatttcatgtgttttcacatgtgttgtcttgcgtgtgtacacttggaagagaactgggcagactctgcaacagggtcgaggccaaatagagtcacagttgtgaagctgtgaagatgccctccccctacccccctttcttgcagttatgggtgacagaattgtgccttcaggacagggatggagactaggaatgctgtctgggaggcctgagtgaaccgggagtgtcccacttgctggtttccagggtgcgtttctgtctccgggccactgtgtaccagattcatgctcacaggttggatttgctcccagattaaacctgttagtcagctgccgagcgagcgaggtttgcatttgtcccttcttagcccttcctccccgccctcccacacatcagaggtacccgagtggctgagaagtgaacagtagcagcctattttctttatgatttcaattcgttaggaaaatttgattagatatgcatcttgaagctttctagttttgactgattttttttttgaggtttgatagaattaaaaaaacaaaagggcaaaaaacaaacaaacaaacaaacaaaacaacaacaaccaaaacccatctccccaaaccatggagcagataaaagggcatagatgaaaccaagaaaacaaacagaagccctggcaggaagggaaggaaagaatgctcctttgtcttttagttttcagtaagcgtccactttgcagtgtatcactgtgactcttcggaagaaagccagggtgagcagagtggtcacctgcacacacgcaacacactggtgtctcttggcatctactctttgggcaaagacagccctctcattactgaatttatgtgactgtttcacataaacatctatctgtattgatattgattattatctattgataatggtattctcacctgttgccttgtatcagtcctgggggccatgtctggggccaaagcaattagaaatgtttttatttacctaaccccatacccaaagtgtctgcttatactgattctaagcccttactcttaaggtttttatacccattttaatacagactcaattatctcatgctttttctttcccctttgctacagaccataaaaccatgggaaacgcagaaagccaaaatgtagaccacgagttttatggagaaaagcatgccagcctggggcggaagcacacttcacgctccctgcggctgtcacacaagacccggaggacacggcatgcttcctccgggaaggcgatccacaggaactctgaagtgagcacccggtccagcagcacgcccagcatcccccagtccctggctgaaaatggcctggagcccttctcccaagaaggcgccctagacgacttcggggaccccatctgggtggaccgagtagatatgggcttgagacccgtatcttacaccgattcttccgtcactcccagcgtagatggcagcatcgtcctcactgcagcctctgtgcagagcatgccagactcagaggagagccggctttacggggatgacgctacgtacttggctgagggaggcaggaggcagtgtccctatacatccaatgggcccacattcatggagacagcgagctttaagaagaagcgctccaaatctgcagacatctggcgggaggacagcctggaattctcactctcagatctgagccaagaacatttaacaagcaacgaagaaatcttgggttccgcggaagagaaggattgcgaggaggctcgggggatggaaacagaggcgagtccccggcagctcagcacctgtcagcgagccaactccctgggtgacttgtatgctcagaaaaactctggggtgaaggctaatggaggaccgaggaacagattctcaagctactgccggaatttggtgtcggatattcccgatcttgcaaagcataagatgccaccggctgctgccgaagagactcctccgtacagtaattacaacacgcttccctgtaggaagtcgcactgtctttccgagggtgccaccaacccacaaattagccttagcaagagcatgcaaggcagaagagcaaaaaccacccaggtaaagcctcagagatgtttcagtattttggaagtggtgcgcgcctcttaaagtgcatgattttgctcttatcggtttctctctctctctcttttttttttttttttttgaaatcgggctgtacccgggtttgtctggcagctgctgcagctggcatcgcttctgctgcgcccctcttacagttctgtgggtagggggtggagattaaggggtgtgtatgcagcggggtgggagggtgtgctaggaatggcaatagagctattaagttcatactgggagactgcctctcaactcagtccctccacaacacctccctgatgggactctgtcacctaatcatctctggacgagcaggcatggtgggttgcaggcgctcggagctcatatccacactgcagcaggtgggaagaagtccgtgggcgggccctcggaagaggcatcctttgaatcagggcggtctgcggtcacttgtcagcttctctctggtgttggcaggctcgccgtcttaccaggagccatttcaatttcctgttcctcacgatgcggccagccccgtctctggagggaggtgtagcagaaggaataatatgggtgggttcccagtttctagcttgcagccaagttgcttgaccttgggcaaaccctgacttctagaggctccctctggaaggtggggatgaagagacttagtcggcttgcttggcagtttaatgcaggagagaaggggcgtgagcagatttttaggagacttgaaaagtatcttaccagggaaagggtggcccactagcttgtctggcaataatagcgggagtgaatgtcagacggccctgcatgctttggtcctttgctgttccttgcggcaggttttggggagctggggattctgaccaggctaagaagccggtagtggattgtgcttctgatccaagagtgggtgcgcttctttactttgaaagacagtgggcatcgaggtgacctgcaaaggctgctgcactccgacctgcccagtagggggcagtgctgcactctggccagttcgagtccaatgggcagtggcagtgttacttttaaggtgggccaggtggtggagggcctggagtgacaccgggtttctttctgaagaaccctgaagatggattttgctgacacgaaagccagtcttctagacccttcaccccttcctacctggttgactctgggcaagttagtggttgttttaaagccttgatttcttcacctgtctaagtggaggtattgtgactggagactctagctcagtggcaggacctcgcttgaatggcttccaaggggctctgtgtcagatccttggcatcatggatgtacacactcagtagggataataataggactattcgagagaatggaattgtccgggagtccggaagcctagtacttaggaagcagccagggaccgggaatttggtcgccggcgtaacactcgcattggtagtggtgctgtgtgggtagatgactcggaccattggatgttggtgcccagatcttgtatcacctgagaaggtaaactttaacctctctttactctgatttgagattataaccaaagtgagattgtgacagaactaacaggttaactaaccacccagggtcactactgaacggtcagtttggcaggtcacaacaggtgccctgttaaagggtcccatggaaagccctgaagcatggccgtgaagctgtctgccatcagactggcattagacgcctggttcagagagatactctgcctgccttgaacttggcaaagggtgtgttgatgcaggcaacacctctgcctggactgagtagcctgtgccctatgtaaggttggcaagggctgcccagctgtgttctagagcgctgtctctaactccagagatagctggacacactgttgcccttaaataccaaccacccatggaagaggggcagagtgagccagcgctctcctcccctgggagactgtggtgtgaaatctccatcccttgcctcacgacttcccaagttaatatacagaagtgagatcatctgagtgtggtgtctcataaagccacggcttaatgcaatgcagagtgctgcacacacggaattctaaggaggccattagcatgctggcttgtctgctcacccacccggtgaccttgggtaagtcacttcctcctgtagctctttcccctgtccagggagagtgacaccatcctccagcagagctgtatgaggtgagccaaaagagatgccgggcttggaagccttttgtggagctaacataatgaacggaagtattattttggtattgacattatatgttgagtaaggatctttaatgacttgaaacaaaccccagaattatgcacaacactatccatccacccacattttcctaggctaagtttgagcccactgtgttccaaacagtgtattttaagagacagtgggtgtggaagcttccttgaaaagaattctttttcttctcaaagtttttgacccaagggacctctgtcgcaagcttgaatcgtagatctcagcctccttgtcggccctggagatgcagtccagtctctaacagccccgtcagccacttcactcccaccggaaaaatctcctggcaaacatttggctaagagcgtgacctctcagcttggagaaaatgtgctggatccaaactaatgcggacaatttcatttgattcaaaaatgatcaaaaaagaggtcttggccatttttcctgtttgtgtgtgttcagtggttggatttgtttccgaaatgggcaggctgtggagttcacatgttaactttggaagtagcacgttggacgagccttggcatctggcacacagttatttaattcatgtgctttttatgtgtacacatgttgtgtgtagtttgtgctgagagcttcccaccattgaagcagggtttagttactgatttcaacccaggacacaatacacactaggttgctccttagatttaattgatggcttgatggattttgtccctttggttattctttctttggtaacagactgaggagagggcagcctggggtcatgcagaatccagggtgtcagcaagtctgggcttggagtttttgcctcctgcgtcctggttatttaacctcatgaatttgggttctttttaaaggaagcttataggaagatccagcattctgggatgaaataaatgtaaaccttagatcactgactctggaaggttgttacagatgcccactgaatagtgggtttagtagggaggtcaaggcgtggcttcaggttctagagttcctcctctgcagctctggggctttcaaaggataagtaggaaaggggagacgtgccattggtgatctgccctgtgaccaggcacagaatgtctacggggtgcctgagggaaacttaggctgggggccattgtgcacacttgaggagaccttcattgaacctaactaggagatggaagaatgtgacttggctctactactactgttgtaagaagccacagaatctagagagctgcaaggagacttgggctgaagggtgatggccagaagtcagtatttcccagaagtctgtgcaccccagtgtctagtgggaggcggagggctctgttagagtttatggattcatttcagcctagtttcaagataccaacttcctgaagaacctcacagaccctctctatctgactctgtagctttccaggggagaatggttgtcctagtgttgtgttggtgtgaaaagacatcagggccaaggcaactcttatagcagaaaacatttacttggggctgacatacagattcagaggtctgttaccatcgtggtgggaagcatggtggcaccaggcagacatagtgctggagaagtaattgacagttctacctctggatccgcaggaagcaggaagagagagtgacactgggcttggcttgagcttttgaaacctcaaagcccaccccccagtgacgcacttctcccacaaggccacgcctcctgttcctttcagatagttggtaaccaagcattcaaatgtataaccctatgggagcgtgttgttgttgttgttgtttttaatgtatgaatgccgtgttgtgtatatatccgcctgcctgaagagggcatcagatctccctgtagatggttgtgagccaccatgtggttgctgggaattgaactcaggacccctgaaagagtgaccagtgctcctaaacacagagccatctcaccggccctgggagccactcttatttgaaaccaccacaaagggtgacctaaagagattaggtgtacggtctccaccctcaggtcttctgcacttccttctaaggcactcccaacatggaggagcctctcacagccttagcctaaggttaaagacttcaattctggtgaagaaaaaaaaaatcaccttatcaattaagaaggaaattagtgctgcccattccaaattagatgactaggaaaattctaaaagctgtccctggtttcccttgaccagcgaataataaggttgatggtcttactaggatagagagcctagtattaaatccaaacagggtcctgagttccttgaaaaatcattttgattttaaaaagtttgttttgttaggccacttaacttaaatgacttcgaaataagtgtactgcctgagctgataattgacccccataggtcaatgagtctttacccatgtcctaggcactttgagaacagctaaaaaccttgcttgcactttgttcagatataaacacatggatcactcttctgtatatcatctttggggttcacgggttccctaaatccatttagggatgcctggttaagagttcttttgataaatgctagagagctggccctgcagttgagagcactggcttttcttgctgaggacctgggttcagtttccagcacaagaaaagctactcacccccaactgaaattccagtttcagggaatctgatacctgcttctggccttagtgtgatactgcatacacatggtacacacatacacactcaggcaaacaggctttcaaaataaaatagatctcttttaaaggaacactttaaaacaatttcttacattaatgcttcatgaaacaaaatattttcatatagaatctattttttaaactcccccttcctccttgtacctatagtgtttgtttgtttgtcagtttgtttgttgtctgtctgtctgtttgttttcatacttctgtctctttctcactttttttggcatgtaaattctgcctgagatacttgttttgaaaacaagccctttcatttccaacaaggatgtctgacttttttgccaagatctttttggaggaggcgggcggtaggtgggcagttagttgggggattggctgacagcagcactcctcagtccactttgtgcacttcagaaatattgtagacaccaaggagcctctgtttgttcatgtgagctgcatcttgaataatcattcctttaggagttgaaatggaaatgtaagaaatgctcattaattcatcttaaattaagaatagtcccatttcacattcatgtaaatctctatatttaggggttttttttggggggtgggtgggagggttcgagacagggtttctctgtagccctggctggcctcgaactcagaaatccgcctgcctctgcctcccaagtgctgggattaaaggtgtgtgccaccatgcccagcttatatttaggttttttattatctgaaattacacatggctgtgtggatgagaggttctgtttggtatgtgtgtctggttctgtgacttctggtccactgtagggcatccttgtctcccctctgattctcaccccttcacagggtgccacttggctgtactatgtaggatgcagcctctgcacagggcactggcagaggaagagctgcagggacccacccctgcagggacccacccccaaaggtatcctagggatcccagagccattcctggattgcaacttatttttattaaaagaggttgggaaagttcaaccttgtgcaaagtcatatgtgcccctcagttcaatttgcgtcaccataatgtgtgaggtgtgattgtatagcctagccaggcaaagggctgcaatcatgagcagcatccgggatgttataaggccttgttggttgtggccatgaggccagcctgctacaagggtctgacacagtctgcagaactcaaaaactgactcacttttcattcttcaactgagcacagttgatgttggaccacccaccggcacgagagctgggaccctgagataacccagtttccccttcatttatataagctctttaaaaaattagataaaaaactcaaatgaattgtggtggtctccccagaagatgcccagagctgctccaagttgcagacgtaagctttacagcgaagacttcgccatcgcaaccccagcagagcctcaggaagcttggcagtgactaaacctttacatcaaactcccatgtttttccacgatgttttcctttttttgagatagggatgggaaatgagcagccgttagttcattcagtaattatttttgaagagcttaccccatgccaggcgctattcttggcactcgggatgcgttgacaaaaactccagagctcgtggagggagttgtggtgaaacgggggtgtttgtggcacagacaagaaagtgcaatagtaagcgctgtgctatagaagcaggcctggggtggcccggagctggggtatacagcaggcaggcaacttcagattgggaggtcagggtgtgacctcgaggaaggtcagacttggggctcgaaggagaggagagagctggctattgagttgtaagatgggaggctgcctggcacattccaggagaggcaaggagcccagtgtggctgcaggagggctgttagggcaagcagagatggtgctgaggagttggcatggcaaccacaggagggatagggaaggtatgtggctgtagaaaacgaggaacatgtatattcccagaagagagggctgtaggaaccatgctcttgaaggggcatcgaagttcagccaaagcccaagtgcggacactggacgtttatgcagggtcttgagtggcaggcgctggtaagccttcctgttgttctgggaaagcttatctggccatggtgtgtggccctgtaatgtggaaggaagccccttccgatgtggatgtgagctagcaagggaagaagaggactgggtaggtggtataggaagtagagggaggaaggctgactctgaggtggccacacatccagagaggagcagaggaagggctgggggtgactcatgccaggcggaggtggagcactctctaatcaggagttacctgaggcagtgctgccagcattgactaccccgtactgcatccccttttcagcaactgagaatctcagttccaggggttggtattgagagaagttgtgagtcactcccacgggggctccttggaggaggaatggctgttggaaactcagaaatccacggagcaaccagctgccttgagtgaggaggggaagggaagagagcccgtctcctatttctagcaagttagtagtgataattatcagcagtgcccaatagctgctaattcagtgaggatgatgtcagcattttcttatttgccgtgccgtttcgagtgcaaagatgattttaaagcatcgctagcctttcaagctcccgctgatctgcctgcgtgtttttctcatgagatcttgtttgtgccagattcctaagagtcaagctcccctccatgttgttacaggaagcttgtagctatggccaggccgtgccttttatcccatgtaagtaagggctcaggtggtgaagatggcaattacagtgaacatttttgtgctggtacagggtgctgagcatgtctgaggcaccattcctgggttatttctgttgcttaggatctcatggagtgctttcttaagtagacataggtgtagtagctagaggctctgtggttgaggacttgcttgccgtgtgaccggctcaggattcctgccagtgagcctttggtgagaaccaaaagaatgtgtgtgtgtgtgtgtatggtatacacatatggatggaagtgagaacacatatgtgggaatatgcatgtttttgcatatgtgcacatttatggtgtgtgtgtctggtattccaagtgagcacttctcccacttggcatttatgaaggttgctgggtcttgaactctgatcctcacgcttgcaggacaagcactttaacctctgagccagctccccccgcccccgccccagctctactctgaatttttaatttaaagtttagcacctgactaagtagggtagaagagtcaggctgctgagatgcttagttaggcggggaggatcgggcctccattacttcctggcatcagtcttcactactgcttgctgtttggatgagccctgaggttgctaggggcttctccttgtggcaagaattgggtttctcggtcttgaactgcctaggcctgagaaagacgagaggagcccttccaaaaacaatgaccaaaagaacatgcgtgtcacagagagaagcacatggaacaatgtctctggctggatccacccgtcaccatctgtgctcgaggacgggctttagggcatccaggagagcccgggcttcccgactaagtagaggttggagcagggcagctgacatctctttcccaatgggttaggtcacacatggggggaatgtgcactgctcagcccagtcacctacttctgggatgaggtggtaacgtcttgggcagatctaaggacactccccagccatgacactaagccatgtgctgcagaagtatgtgagctgacctggggcccacgttcatacatcagttgccacaggtttcctacctggagcagtctcctcagtttggtgaccatctcagagctgaacacacacaacctgtaccattgttacagcttcagctggcatgagcagatgttcaggtgtgacgtagaggtgagtgaacacggagaccctaactcttagcttatgtggagacaaggaatgaatggttcgtgggcgtgtggtagactgtaaatgatggctgccgagagctggctggccagctctttccctctgtgtcctgtcatctctgtatagctcgtcccttctgcggttggcttggacaggttaaaacaaatagatatatagctttttcccagagaaaaccggagatcctgttaaacaaagtggggaaggatgggagtgaataacgcaggcaaaaatctggtcagacgctgatccacagctttcttagcaggcaaggttctcagcagcacgggttcaaacctcctatctgccactaaccagacttaggactttatgagccctggtattcacatcttttgacaaacagtctgggttttcaggttccttctgagatgtgtgaagttgtctcttttcttctgtcttctgaagtcgctccggtggaggctgttgccatgtggcttctcagagtggatctagctggctccttcatacactctgtggtggtttgagcgaattcttccccacggtctcaggcatttaaatactttgtctgcagttagtgttgctgtctgagattcaggaggtgtggtcttggaacaagcaaatcttgtcactgtaagatttaagagtttaaaagaccatttcaagactgtcatggtgggggacacctttaatccctatactcaggaggtggaggtaggcagatcattgagtttgaggctgacctggtctatagagtgagttctgttccaggatagccagggctacacagagaaactctgtttcataaagaccaaacaaattaataacaaaaaaggaaggatgttgaaaaccccttcccctctttctgcctgttagctatgttgccttgggtaaacaatagaggccattccaagttccttctcttggcttcctgcttgtggtttaagacataaattcttagcttctgtttcagccactgtgcctgcctcttactgccctgcttcctggacttgagggaatctaatctctctgcaaccataagcccaaataaactcctccttctgcatcacaaaagtaggaaaaagcagttaatgtacagatccagccttcttcagagggccgagacccatgaagtcaaattccagaagttcacagatttcttaccctccatggcttctggttatccaaaattgtcagattcccttactgtcttacgcctacaaggacacacatggtaaatgtccctgccggagagaaatgtgggttgctaatagtgctttttgtgtagtggatttttttactaactgaatctgggttctttgtgaccattcacggctgttattaagcagaggaacatgaaacaaagtgatgtgccagccagtagacacagggtacgcgggtctgtttcccactgttagaatggaatgcccgaggctagttaatttgtaaagaaaaggcatccatttagcttagtttgggaggtggagaccttggttccagcatctgctggctttgttgaggttcttttaacatatagcatcacactgtgagtcagagagagagaggagagagagagaggagagagagggggggagaggagagagagaggagagagagaggagagagagagagaggttacacagtgatatgaggagggattgagggatcagggtctcttttcttacagcccactctggctgtaatcacttcagaagaccagcattggtgtttcccaagggtgagaccccctcccccaatgacctaaatacctcccaccccccaatgacctaaatacctcccatcccccaatgacctaaatacctcccatgaggccccacctttttgtttgtttgttttctggagggaactctagatcttaaagggtctaccatctcccagcattgctgtactgggggccaagcttccaactctcaaaccctttaagaacaaactgtggatttaaaccacagcacagccagttgatctgagctgcatctgtgatttctttgtctcccataaatcctgcagctaccagggatctaaactccatttggaacggagctgatgcttggaagctgctcatcgatggctgccacctctgacccacacttcctgaagttcatgtcattattctcctaggtcccacccccccaatactgaactgtgagccactggctcagagggactgagatagagacacagcacctctgggcctggtataggacagtctcagccgtgctatgactcagcccaccccactatcttccagcacagatttaagcttaaagtagtcatttttatgacaattcagagtatacattagtgtttacatgtttcagccatcattagttattcctgagaataagggtcccccaaatggccaaactaccatcctgtgaactgctttgctttttcctctatgccacgctcatgttcctgtcgtcttcctttgagaagacaggctcgtaagccagcctgtcccatactgtcatcatcaccttccgttgttggctaccgtcatttaattactgtttatggaaatccccgtagcacgtcagagtaattgaggctccaatttaagaacctacctctgtgacccggaaacattcggctggagtccagggtcagctctggaagttgcaaatgcctttgcagtggggattgacgctccggcaccttggcagttgccccgttctgtcactcggcccagggtagtgagttgcctacttcagtctccttacatcctgcctgcctttgcaagggcagagtaattggagaggtgcattggagctgtgggtcccacaggctgatttagcacaaggcagaaagaaagagctgcttttgggaagccaggctcattagggcacaaggactcactcttgattgctcttggggtgtgggcccttgctgggtgagtgggtacactagcaatctatttagtcaccccattataaaagagacccacaagcaggcgcttttattttatttttaaatatcagctgtaaagatctagttctgcattgtaaccccaacctccgcaacagctaactaatctgcctgctgaatttcctggagttcaaggccagccgaggtggctgagggttcggagctcccacagcttggtcaggcaagcatctcaatagctggtttgccaattagctaattgagtcagataaatgataagctctttgaaatgttccctgcgccttttatatttcttgaacattgtgaatcattaggcagcgtggcgggtggttggtcgaaggtttgtttccctgagccactccactgtgcactggcttgaggagggatcgatccatcatctttggagttgggcgcgcgcacgccttctgtgctgcagagccccgggctggaccaggtgctctcaagttccttccgaacgtgatgcatgtctgcttctctctccctttctgtttccaaggatgttaacacaggcgagggcagcgagtttgcggacagtgggatcgaaggggccaccaccgacacggacctcttgtccaggagatccaatgccaccaactcaagctactcgccccccacaggccgagcctttgtgggcagcgacagcggcagcagttcaacaggggatgctgcgcgccagggggtgtacgagaacttcaggcgggaactggagatgagtaccaccaacagtgagagcctggaggaggctggctctgcgcacagcgatgagcagagcagcggaaccctcagttccccgggccagtcggacatcctgctaacggctgcgcagggcactgtgcggaaggctggagcgctggcagtcaagaacttcctggtccacaagaagaataagaaggtggagtcggctacccggaggaagtggaagcactactgggtgtccctgaaaggtaagggaggccagcccaggtgcatgctgggagtgccaacgggtgcattccaccagtactcacataatggccttttgttatgcaacgcttcataattgtatattcagaacatagtctaccatggtagaaacacaacattagatgtgcattttttttaaagtcagatcttggggtgaaggtaaaggccacccctgaagaactgagagatctggtttgggatttgattttctttttctgttcagtactgggaattggacccagggcctctcacatgctacatgttatataagcatcccagccctgtcttatatccccgtagctctttgtattttatacttgttttcagtgaggtaccaaattgcccaggctggacttgattttgtcctgccttagcctcaggggtagccatcaaacctggctaattaacacacgtttaaatatatgatatggtattgttgaccatagctatggacagcattgtagggaggcctctagagttagttactcatctgagtgaactgaagatctatgtctctgattcagtaactcttgtggctcattacccacccctgcagtgctgactcatcactttctgggcttcgtggttgtcttggtttcatttctgttgctgttcctttggcttacaattccaagctacagtccattgttttggggaagtcaaggcaggaacccaagcagggagtcacatcacactgatagtcaaaaaccgagagtaatgaatgtacccattcggcctgcttttgcttgctctcagctagttcatcctatacagttcatgaccctagggaatagtattgcccacggtgggctaggtctttctacatcagttaacaagacagtatcccttagacatgttcatagaccaccccaataaagacaattactcaactgagactctcttcccaggtgactaagttgtggcaagttgacattttaaagccatcagtagggggaacatgtcacatccagttttctctttgactgagggacagtgttgaagtccaagttcccctgcaaaatgttgtttgcatgttttcaagtttatatcttgcacagtgactattatagacgggaggaatccttagcttcaatccaacgaaacgtctgatggcttgaaaaatctttaaatggtagaatatcaccaattttacagacttcaacccgatgcacacggcatgtctaagtcatcatgcgcttctgaagaagccactgttttatagtccagccacatttactgtggcacctttggctgtgcacacagcagacatgggtaccaacacacttgcttctcagaggagcagagtgcttacaagttgttgccatttggcatgctttcctgaagagggctgtgtgtctgcccagccctgcatgggtctggagactcggtagtttctttgtgaacactacatcatagaatgaaaaacctttcttaagtacacacagtggttctgttacaaagctagatttgagattgggaatctcgattgggggtggggtcagatgggaaacacacaggagaaagaagccagggccgagcaacttatggtacagctgaggtcactgtggggacatcctgtagtcgaggcctgatcctgcgtggagctctgctcagtgaggctagtgtatgtgtgcctgagtattgtgtgcagctcagtcccgaaggacagtcagggcatgggtggccccctgttactggtgctagctggctgttttgtttgtttgtctttcttttgttttgatgcctgataaaatgggacctaatgtacctggttaggcttagattgggctatgcatcacagacacccatactgacgagggcaacggcaaacctagacagaaccaccctgtactgtgaagtcaccgggggcccaggtcgtctgttttgttgttcagctactcttgagtcttactgttcatgtggtgtgggctcatgcttataaaacacagatgtttgtcctgtggggatacgttggaaagctgtttctggcctttctcactcaccacctgccttagcctcatttggagaagggccgtggcgttgcctctggaggcccctgccatgccagctgttcctctgtgatagatgagctggagaagaaatcatctccttttccagccccctgccccgagtaggtacacgtcctttgttcctctagctccacttctattggttaacttattcctggggaggcatgagcaaatatctacttgtccctgataggaaattgacaacagaccaaggcaaggatatcaccaaagcccgccttgagctcatgagttagtttattggcgttacttaccaggccatgggggaggagttactcaaagatggatggaacaccaacagctcaccccagcatggatgtcagctcatgaaagctcactctggtgctagctgcacagcttggagggagttcaacaggctggggaggacctctcccaggtagcttagttgcctggggcctcttcaggcagccctgccgggtccctgcttcttcaggcaaccctgcttgtctcaatgtttgctgtttatgagtttggagagccaagagcccagtgtccggccagtttcagggactcgaggagatttgatcaatccatttacaggctgagtttcaaggagattccttgctgcatggatatttcatcccctcttaagaacatactgagtcttagcatgcttccctgaaagatgcagatttttccgctgttggagggaagtgccacacagcacaccccttcattcatgttagtaattgctgctgagccctaagacctgacatgaagaccacctacatctacacgcacccccctccccatcccagttgtctctgctgctttctgcgctgtgcttcctatgtactgaatcgtgaagttctgagacagtcctcgtgttagcacgcttggaccgccacaacacaggaccacacgctgggcatcatgaataacagaaccttctcgacccacagctgtgagtctgaggtctagtggctgggttgctttcctttgaggcctctcgttttgatgtggtggtcactgtcttctttgggtctcagcatgtgtttgttcctccttctgtaatgactgtccagtgtctatctgataggacctgagttgttagactaaggggcacttactgtgacagccttttaccttatgttatatctacaaatacagccccatttctgaagtcctggggttaggtctcagtgtgaggatgtgggaagagggatggtctcagctgtgagaaagccctggatgtcatctgagcctcttcttaccctgcatagagaagatcacttcttggtatggaataaaagaatgagatgactcttcttacttggactatagcagaggtggctgtttcgtttgtgccgttttcttcgagagtaaatgacgcaggaagctgtagtggtggcattgaggaccacacaagagaaaggagccatcccactgtccccatgaccctgatctgggtgacctgacctgacaaggagccactgagcccttcatatctgagtcttgacaggttcttgttttctgttggcaaactcagagcttccttctttctacctgagagctgctgcgtttcctagcaccccttggcttgtgggtgaggggaccacacctgggaactctggggtacaaaagattccattttcaaagacttctagaattactctctggagtgatgctgttgacagcctaataacctaaaggccaagttcaagtgaagctctcggcaagcagactttatcagcgtgtgtggctcttggatttgtttcttcatattagtcttaaaaaatggggcaagttgaaaatgaataaaatcaagtttcaaccacctactgttacagatcattttaaaccaaagttgtgagactagaagtatttgaagactagaacacacacatatcaggattggtcttctgttgctaacctgtcgtacatgtgttgccgcttccacggtaaaagtctacagattgttcatttcataagtcaaaaagattgttgaaagctgcatttcctaacagtagcacttactgacattttccagagagttctttgttgtagggactgtctaagacagtggaaaatgcatacagctttttgtattagagcaaaagacctatgatgctcagcttacagacagaaagggttagcttgggctcacagttttagagattttagcttgtaactggctgggcttgtgaagcagtgggtcatgggaagagtgtgtggcagagcttacggaagcaaccagagagcaaggagaggagggagaaagggccgggattattctgccaccatccagtatctttcttagggaccacgactgcgctgcatgggccttgatgcatttgagaaccaaagtacaatagtcagcatcacgcaccagttgctgtaagctgggccccaagtgagggcatcagaaatgcagacagcatctgtcttggaatttactctgcagaccagtctggccttgaactcacagagatccatctgcctccatctcctaagtgctgggcttaaaggcctatcgtgctcagtgcctcgagaacctattttgttatttgtttttctccttagtgtgtgagccactttaatgcacggaaatgggatatgacctctctctctggattttcatcagaaaaattgaagtcttcagaattccagggatgatgaaggggggaaaaaaaaaggaattgagacaggagagctgatagcgtatatttaaatttatgtaggtatattttgaatatgtaaatggtagctaatggcagagtcttgtcaaaaaattggcattttcaaataatatatgacatagaaaatgcttaaggaattaagtataaagaggacttgaaaattatatataatttaatatatacatttaatacatgtgttaggtaactagggcttgctctcctagttgtgatcatgtgttaggtaactagggcttgctctcctagttgtgaccatgtgttaggtaactagggcttgctctcctagttgtgaccatgtgttaggtaactagggcttgctctcctagttgtgatcatgtgttaggtaatccccccactttttttttttaactattgtgcatacatttgtggcaatcagaggaaactttatgcagtccccttttttcttgcacctttatgtgcattctggggattgaacttagttcatatgtttgtgtagcccatgagtaaaccctctgagtgacctgcctggcctccttaaggacttctgtgtttgtgtgtgcacgtgcacgtgtatgtactcgcgcatggcagagggaggggaaattgccttttaaccagcatgattttccatcgatctgctcctttctacatcacgcacaggtggtttctctttatagattcctcctgtaaccaagagccttgtgctgtcaagggcttggcagttcctataatgtttggtcttctctgggattaaggagaggggtgaaatggacggagtagcttgagtggaagttgtggatcagttctgtagtcgaccctgcccagaactgaggcctcgttgtgaccatgtgttaggtaaatagggcttgctctcctagttgtgatcatgtgttaggtaactagggcttgctctcctagttgtgaccatgtgttaggtaactagggcttgctctcctagttgtgaccatgtgttaggtaactagggcttgctctcctagttgtgatcatgtgttaggtaactagggcttgctctcctagttgtgaccatgtgttgggtaactagggcttgctctcctagttgtaaccatgtgttaggtaactagggcttgctctcctagttgtgaccatgtgttaggtaactagggcttgctctcctcgttgtgatcatgtgttgggtaactaagggcttgctctcctagttgtgatcatgtgttgggtaactaggggcttgctctcctagttgtgaccatgtgttggataactagggcttgctctcctagttgtgaccatgtgttaggtaactagggcttgctctcctagttgtgatcatgtgttgggtaactagggcttgctctcctagttgtgatcatgtgttgggtaactagggcttgctctcctagttgtgaccatgtgttgggtaactagggcttgctctcctagttgtgatcatgtgttaggtaactagggcttgctctcacagtgagcttctggttctggctgtgcaggggctactgtataagctcaccaagtgtttctcttgctgtggtccacctgttccatagtatgattaacagttagtccctaagtctgagttccacagacttgatttttcagaaaacacgaggacatagattactgttttccccaagggtacagatccacggtacatttttcagactttctggttgcgtatcacgggaagccccttgggaggaagctccaagggaaggaagtgtctgtcttcatgccctgttagtgctagactgggggaatctatagagctgtgtttacagtcaccactggggttcgtgcctcaaaagtctgtattgtttgagggcaaagacagggtcccaggctggctcggaactctcagtgtagactaggctaacttcgaactgacagagacccacctgcctctgtcccannnnnnnnnnnnnnnnnnnnactgcgctgcatgggccttgatgcatttgagcaaccaagtacaatagtcagcatcacgcaccagttgctgtaagctgggccccaagtgagggcatcagaaatgcagacagcatctgtcttggaatttactctgcagaccagtctggccttgaactcacagagatccatctgcctccatctcctaagtgctgggcttaaaggcctatcgtgctcagtgcctcgagaacctattttgttatttgtttttctccttagtgtgtgagccactttaatgcacggaaatgggatatgacctctctctctggattttcatcagaaaaattgaagtcttcagaattccagggatgatgaaggggggaaaaaaaaaggaattgagacaggagagctgatagcgtatatttaaatttatgtaggtatattttgaatatgtaaatggtagctaatggcagagtcttgtcaaaaaattggcattttcaaataatatatgacatagaaaatgcttaaggaattaagtataaagagtactttaaaattatatatagtaatccccccacttttttttttaactattgtgcatacatttgtggcaatcagaggaaactttatgcagtccccttttttcttgcacctttatgtgcattctggggattgaacttagttcatatgtttgtgtagcccgtgagtaaaccctctgagtgacctgcctggcctccttaaggacttctgtgtttgtgtgtgcacgtgcacgtgtatgtactcgcgcatggcagagggaggggaaattgccttttaaccagcgtgattttccatcgatctgctcctttctacatcacgcacgagtggtttctctttatagattcctgttgtaaccaagagccttgtgctgtcaagggcttggcagttcctataatgtttggtcttctctgggattaaggagaggggtgaaatggacgcggagtagcttgagtggaagttgtggatcagttctgtagtcgatcctgcccagaactgaggcctcgttgtgaccatgtgttaggtaaatagggcttgctctcctagttgtgatcatgtgttagataactagggcttgctctcctagttgtgaccatgtgtttggtaactagggcttgctctcctagttgtgatcatgtgttaggtaactagggcttgctctcctagttgtgatcacgtgttgggtaactagggcttgctctcctagttgtgaccatgtgttaggtaactagggcttgctctcctagttgtgatcacgtgttgggtaactagggcttgctctcctagttgtgatcatgtgttaggtaactagggcttgctctcctagttgtgatcatgtgttgggtaactagggcttgctctcctagttgtgaccatgtgttaggtaactagggcttgctctcctagttgtgatcacgtgttgggtaactagggcttgctctcctagttgtgaccatgtgttagggtactagggcttgctctcctagttgtgaccatgtgttaggtaactagggcttgctctcctagttgtgatcatgtgttgggtaactagggcttgctctcctagttgtgatcatgtgttgggaaactagggcttgctctcctagttgtgatcacgtgttgggtaactagggcttgctctcctagttgtgaccatgtgttgggaaactagggcttgctctcctagttgtgaccatgtgttgggaaactagggcttgctctcctagttgtgaccatgtgttagggtactagggcttgctctcctagttgtgaccatgtgttaggtaactagggcttgctctcctagttgtgatcatgtgttgggtaactagggcttgctctcctagttgtgatcacgtgttgggtaactagggcttgctctcctagttgtgaccatgtgttaggtaactagggcttgctctcctagttgtgaccatgtgttgggtaactagggcttgctctcctagttgtgaccatgtgttaggtaactagggcttgctctcctagttgtgaccatgtgttaggtaactagggcttgctctcctagttgtgaccatgtgttgggtaactagggcttgctctcctagttgtgatcatgtgttgggtaactagggcttgctctcctagttgtgaccatgtgttaggtaactagggcttgctctcctacttgtgattatgtgttaggtaactagggcttgctctcctagttgtgatcacgtgttgggtaactagggcttgctctcctagttgtgaccatgtgttaggtaactagggcttgctctcctagttgtgatcatgtgttgggtaactagggcttgctctcacagtgagcttctggttctggctgtgcaggggctactgtataagctcaccaactgtttctcttgcagtggtccacctgttccatagtatgattaacagttcgtccctaagtctgagttccagagacttgatttttcagaaaacacgaggacatagattactgttttccccaagggtacagatccacggtacatttttcagactttctggttgcgtatcacaggaagccccttgggaggaagctccaagggaaggaagtgtctgtcttcatgccctgttagtgctagactgggggaatctatagacctgtgtttacagtcaccactggggttcatgccccaaaagtctgtattgtttgagggcaaagacagggtcccaggctggctcggaactctcagtgtagactaggctaacttcgaactgacagagacccacctgcctctgtcccaagtgctgagattatagtgtgtgcgagcgagcacattcacccacaatgcttacaactaaacattgagactcagagagggctgtaaggacttgaagacatttgttgaaggatccctctgctacgctgggaactgtagtgacgcaagatctttacttccccataaacccatccaagacctgattgcaagcaacaccttgttttctttacctcttggcttctcaccctttaatgttcagcctttccctgatgaccggtgccagtgtcccttggacgtctttcactggccaagtgcacgaaataatcactcggaccccattctgtttcctcaggttgcacgctctttttctatgagactgatggcaggtctgggatagaccacaacagtgtccccaagcacgccgtctgggtggagaacagcatcgtgcaggctgtgcctgagcaccccaagaaagacttcgtcttctgcctcagcaactccctgggtgacgccttcctcttccaggtttgtggggtacctacattgcacatagggctttcctgtcttgcccatgtatcctttccccttccccccctaaaaataatgatagagacagaagagggaaataatgaaataaataactgtgatgggttgcagaaacaagagccctcaggcaaagagtgtgcatgtgaggcccgaggaaagttgtgcattgggtttgataatcttgccatttttgatgtgagcagatagggttgttgtgtagccttagcagcactggatagcactcagaataggctcatgcactccttaatttaggtgtgatttgagctgtcaagtttttcatcatatgttctccgctaatattaatcataaggtaaaataattacatctcagaaaggactggttgtccctaaatagtttctctttctcagcttaccagaacttttatatctagcattcttgaaagtctgttaattgtttcacacaaaaaaatgcttctctgcttcaaggttaacatttccttttatagtgaatccttttgagtttgcaagaactttttgtgcttttaacgaggaaggtttccctcatttatcccattaatgtgatgaagaccacagagaaagctcaatgcacagtatttaaacgcggctttcatgagctctctcaaggtgaatgtacagtcactgcccagggcaggaaggaggtttaggcactccatggccacctgacacccatatgtacacatagcctgcttatgaaacagatcaaatgtgcctcttatcatccaagccaacacgtgtgtttatctgagagtgacttcattcattgttcatttatttttttatttttaaaaagaaaggcttgcaggttggtggaggggaatcttgtgggcttgagtagtggcaactcagttttgcatttgcttctttgtgtgcagagtgggagaagggtgtggaggtcagaggacagcttgcagaagtcagtcctcttattccatcaggggggttctggggaccaaactcaggtcattaggcttggtggcaagtgcctcgaattgcaaagccatcttggctgtccttcattggtgagggatagtttttctgggtataatatttttacttgacagcctatggccatgcattgaaaactgctctcccactgcctccattgtcattcttagaactgtcctacttctgtgatgaatttcttttgtcattttaatgatttcattgttatgtagcttataatgcgatttcacatcagacactgaatttattttttccaaaattcattgtttttcttgtgtgtgtgtgtgtttgtgttttacatcctgatctacgagcagcagtgagagagatagagacactgggcttggcttggcctttgaggcttccaaagtggcaaacttcctaatcctttctaaatagttcattaggtggggactaagcatgcagatatgagccgttcacaccaccccaagcagtaagcacagctaacctctgagccatctgtccagctcctcatacgaatatatcgactctttggttagtgctttctgtttatattataaaagcaatttcagaagattcattataaaaagtaatgggagcaaggtgctatttcctaaatcagtagtcaagggtctggggacgagtctcagttggtagagcgtttgcagagtgtgcaagaggtcctgactttacagtctaactttaatattgctctcatactttgcttctttagaaaaggtaccctttattttatttatccccagcagggcccagttaaagtccattgcagtcttgaaagtgctccaagtggccagaggggatctatgggggacgatgcagggggtcactcagtagattgttctgatgctcagaaaggcaggaagcctccagggtacacagtagatgtcagggcagagctaacccaagcccctctctcctgtctcacacgctcctgtttgttgtctgagtgctctgccagtgccaccactgatcacaagcagtggagacagggaagtgaccatccttttctggtccaaacagtggaaccattccttgggtactcctgtcagtggcctgcgtgtcagatggttacctgaccaacaggaaggcctcctcttcctgttcctttcctcacctctgctgtgaattcccactaaaaggacctgcgtggccataaaattgctagccgagtctacccagtaagtcacattgtacaaaatgctttctgaggcaacacaagaccgtgtttatagaaacctcggacttcttttaatgggggacttttatcccacttatgtgggataaaggacaaagtgaaccttttcagaggaaattactgttgtttgggatccgtgacggcattttctgccatccacttattgtaatccacatagctccagaggggctcgatttgaaagaaacctgtgtgtgcccgggtgaggttacagcgagggagatcagctgtgattatggaaataatttgtaggttatttcagccccagggctcaattcactgcacagtttcctgagcctgtgtgctgctgattcgtccctgttgcccagagacccacacactcaccctggaaaagagattcgtgtaacccacagaagtagaaaaaggggttttgtgtgaagagtgggggcgggaatgagggagtgtgctggagtagctgatacagaggaagttttatgctgcctgcagagtgtggctgtatctccttctcccctgaactattttaattagagctctttcctccgacttgatgtcagaggcagcacctaccacttacacggtccagtttcctccctggcttgcatccgttcattcctagaggatgccgcagttcctgacagctcagccccttgcaggaaacatcccaacgtgtgttttgcattcctgtgccaaatgcctggggaacttagctaccagacaggacaagagagatagacacctgactgagtagaaaatgtgtgtggttgcgtatatagaggggtaagaaacgaggggctttagcagaagtgcctcacctttgtctcacctttgtttctctgtcacttagaagaccatttttactaggccacttcctggatgttataaaaactcataagaagaaatggtactttgtgttattagaaggagacttgaaaagactgcatctgtaccattttctttagtcacagatgaaatggttgtgtgtctggtagacagtggattctcagtcaacaccatgaacgcttagtcttttgtaagaatcacaaggaagatccgtgctcttcctaaccgtcctgctattgaagtcaaacatggcttcactgagaacaaggggcacttttgagcttcatcaagctctggggatccttcttccaggtgtcgggctttaggaaggtcacagaggtcacagacaaatgcccaggacaagaagacagggttagggaatagcctgaaagtcatctacagaaagatgtaaagtctgtagaaaagatggtggaggggacttgtgcagactgatgtcgctccccttcctctgggcatcctatctgcaagggcctcctgcagggcagcctgcctgctggccatcactcagacccatggctggggagtacccagcttttcccctgtccctctgctctgttgtaagtgctcagcgccagagttctgttacactagtggcccttgccattttcctgtttgaatatgaatctgacctcctggaggccacatccgtcccaggtacttgagccgttttccttggtatttgtagacttgtgcatcctgtgcgcctgtggccagcctgcctgagcagcctgcagtgagctttaatgtatccattcccctctcgcacaccgtccttcctctcagccgtactgtcagctcattctgagtccgctaacttaatccccacaacagcgttgactctgaccccataaccctcccccacttacttggtagacttttccacccaaagacaaaacacagaaccttaatttcttttaaatgtcgtctttgtgggttttgcctttgaaatgagtttgttgccctcccgatggatccagatcctcctatgttatacaggcggggcaaactctatctcaggtctcgactttggccgaaagtgtgttgatttggtttataacagagtcctgtttttccactgctgtggattgaatctctgctcccaggatgcccctggaaaacagcttttggtggcagcatgttcaacctcagctcctgccgggaatgtgagaacccgctcttgtgttacgggatctaattccaggagagcagggctttcctcaggcagcaatgccctcaggagggctctgcctctgacccagggccctccactggacacaattactttggataccagggtagacatgaggttttgcagggagtcatgttcaagccataccagggacactgaagcgcttcaaagtctggggcctcccgaggtgtcgggccagggcagagctgcctccaggcacctaatggggaagagaatgtgacagggccagaagttactctgtggtttggctctgccgcaggctggtttcagcgggttggacttgtgacagggacagcccacctctgtctctccaccaccttgctcccctttcaccgtgacaaggttccagctccaggtccgctggcttttctggggaggccggaggtttagaggagctccagcgtctctgtcttgcttccagcctctctgactttcagctggagactcgcacccaatacctggtgatctaaggctctgcccacagttagtcatgagccacctcagcctgcctggccgcgatccgcttgtggtcagttaccctccccctcaccgcctagggagacgcccggtggccttctgtgtaggcacttcagttgatagcttttgtggtgttttctcaggggccctcagctttgtcttcagagactgataaccatgtacttctttgcttgtggctagcagcccctgcctctctgctactgacttcctatacttaactctgcttctataaaaaaatgaccctcagttggggatgggaagtgagtgagcctgtgtgcactgttgtgtgacctcccgtgggggtggagaactttcatgttaggttccccagatattaaaaatgagcacttcattaaggcttatatttacagaactcatacacaggatgaacaggaccaagagggaaaggccttcgaagaatccacgcaggactctcattttatccagcctcttaaagatggacgctctccttccttccttttttgttcctttaaaagtaaaaatagacgtttaacgttctgcagaattaattctcgtgcttctgtcaactctgtgcaccccgagtctcagttccccagtctggcctttgttttctagggtttcgtttctccagtttaaatcgagcctcccttcctgccgctcacgtaaaccattgattgtgtgaaatcaccaagggtcctccgtgcggtgggtaatctgcagctagatctatttaaatacataatgaagccccgagcttcatcatatctctgagcacagaagggctcttatgcaaatacatcttttttgctgattatctgttggcaaggacttctcttttcccctcgctgaacttcatgtcgtatttatagcatccacagaaggcagcagaagagtcacattctctacctggccactgtcatagagtgacgtaggggatggctgtcaaggtgggctgtccagggtggccgggcgagggtgagccagggtgtacgggtaggtgtgggggtctctccttcctacctttgtggcccctggacttgggtgatgagcaatctcttagatcatgtctctgacatttgcctcctataaggttagtgggctgagccactttcccaagtgtaaggctttagacttcagtttatagagaggccaccctggactccgctgtattacgttagtagtctgctggggtcatctcagaactctggagcccatgaactgatgaggtatttcaagacttttctccacagaggtagctgccgagagtagtcagcacgaaggtttcccaccctctcatcaggaccaggctcccttgagccgaggaccgactttactcaagagcccatttagtgagttgttctgctctgaaatgaattcagcttaacgacggggaatgttttatttagacaggacagcgggagcaaaatttctcactaatggaaacgccttcagccacttagatggctaagacatgtcagtggttaaaggggctgatggctaaaagtctcttaaacctgccgtcacatgtgtctctggctataggggactgacattttcctctgcctttgattgtattttatttattttttcatgtatgtgccagtgcatttgtgtgtttaagccagggaacaggagccatccacttttattttattttattttagagacagggccttttcattgtcccagaactctctgattaggcgaggctagactggccatcaagccttttggtctcctgtgactgtcttctggcactgagcttacaggcatgcacccccacactcagctctgccttgggaacgctgggtaagcaacactaagctaaaaccctgctcccacccccttcatcccacttcttaaaggagagatggatggaggtagcctgtctgacatcagaacgaatgaccctgcccatggctgaggtgggctgaggtcctcataggaggaagcagaactgattcccctttctttaattccagtctctggggaatctgctacccccttctggcctcctccagtacagcacacacggtgcacagacatacctgtagataaaacacatgcaaaaaataaaaataaataaatccctcttttgaatgctgctaccatgtgtgttctggctcagttttgctgagcatatgaatatgttcagttggttctataccgtgaattcatatagtgggccacaaggcgtctgcgtacccagctttagtcggttgtacataactgctttctgaagcatttattcccactccgagcagccagaaatgccaagtgcacggggcctcaagctgccctaaatgtttgccaacaccggagttactggtttcttttgtagaaaataatccacgttattacttttccatctgagttgattctttcactaacaaaaataaaaatgtgaccaggcttggtggctcaccctggtaatcccgtagtcacttgggaggccaaggataaaagatcaagagtttgggccacctaagctgtcttaacctgtctctgaaaaccagcccagataaacaaataaaaatcaggaaacataactcagccaatcaaagcagcctctcttggggggacgggggtggggctgggggggcagggctcagacagtgcatcagcctggcagtggctggagggggtcactgtttgtgggaggagcttaaactctttcaggggaaaggtgtaagacaaggaacttgacagggaagataaggctaagttcttcaggagtcggtgttcttgcttctatgcagaaggcaactccttgcccataattaccatgattacccctcggagtcgcctgtggccgtagtgctcccacctcatgctctctccctgctcagtctgcagaaatccattccatctgctcgccagtcactctctctgtccagttctgagcacgtgcagacagacgatggaagtctttatccgcaacgcgtttctctttataagcacagcaaccatcgaatctttcaggcttcttagctggttttctcgcaagacatttttaatattggacgctatttctttggaggaatacaaagctttcggattcaggatgattatcgatggcttctgttgtcctttaactaaaatttccattcttaggcaccgaggaataatatgctggaggggggcaggggtcctgataagaattttgttggtaagccaaccagcgagttaggtaaaaatacagattactgccctgcaagggaaaaatgatggcagcagccaccttagtgtcgcagtgactgagccagtcatttcttcagctaagctaaacccggtgcctttacggagttctttgggcttaagggaatacctggaaaagttcgtcatctccatttttacaaatatttcctgactgatctcctagttttgaaaaaagtgtttttattaatattttggagaattttatataacctattttgattatacttgcccatcccccaactcctccagatctttttccacctccctccctacccacctgtctgtctgtctatctgtttgtctcttcccacgccatctctaacttcctctttgtctctcttttaacccattgagtcaagtttgtgttggagactgctccttggtgtggagcctgctcaccctggagtatgactgataaaccagatgtctcatcgttagagcaaagagatgcccctctcacagcagcagtcaaataccagtagctccccggctaggctgagctaggggtgagctaggctgagctaggggtgagctaggctgagctaggggtgagctagcctgagctaggggtgagctaggctgagttagcctgagctaggctgagctaggggatgagctagcctgagctaggttgagctaggggtgagctagcctgagctaggttgagctaggggtgagctggggtgagctcggggtgcctactccaccctttcatcctggggatttggtctggtttgagcttgtacagatcatgtgaattttttaataacaagttatcacatgagtttttgcccccaaatgttgccacttttgccttgcagagcatctttgtcttatgctatccctatttgggggtcacctgtcccttggcatgggccacataatgctctcaagtgttctcgttaaacaaacaagctgttggtggtttgtgagtggctcactgctgcacatggatgcattcctggagacctggaggctgtactggtcctggccgccttgagcctctccttgccctggttttgatagagctgcttaagactgggtgcgttggttgttagcatgcagcttgttcaagggtgctgtttgagggggtgtggtgtggggttggggttagccctcctttgtggatttctagaaggggtgtgttaaggtaggtttgtgtgtgtgtgtgtgtgtgtgtgtgtgtgtgtgtgtggtcggtctgtctgtcttgtctgtctgtctagacctgacacctggcctcagagacactgcctcccgggactcactgctagtttctgtgaccttgtatgaagaggcttcttctccctgctcccttctcctgtagaccacgagccagacagagctggagaactggatcaccgccatccactctgcctgcgcagctgccgtcgcaaggcaccaccacaaggaggacacgctccgcctcctcaagtcggaaatcaagaagctggagcagaagatcgacatggacgagaagatgaagaagatgggggagatgcagctgtcttccgtcaccgactcgaagaagaagaagaccatcctagaccaggtgaccgaccgcctttgtgcgtctggagcgggccagatttgttagcgcttttgtttttttgttgctgtctggggatcctgaaacagcttctgttctctcggagacagcctgtcacccagactggtaaactctttattgtgactgtcagatttcctcgccctttgttcagagttgattgtttttgcgctgacgggaacgataagacattgaacagaaggcagaaatgggaggggagggccttccgaatccttccagtccacgtgtttccaggggaatctgtgccatttgaaatctatgatgtccttcctcaccttatcatagggctcacctgtgcggaggattcctggctcctcagtgaactcacatttaaaaagtgacgggtgtttctcaaagtccactcagctcgccctcactacacattgggaattggtttcaagaaccttgcagaatcccaaatctgtgtgtgccctggtccttgacataaaagatggcgtcgtatgttttcataacccatccctgcatcatttgtggtacctggtagatatgttatgtaaataattgctgtgctgtggtgtttaaggaataatgacaaggcaaaagtctgtacgtggtcactatagctatagggtacagagtgccctttgttctattctttctgttattggttgctgtaaattcacaaagcaactcacaaggcaaattcgcatagcaaaaaaaccatttgaatcgaacaacagcttagcggtcagcgcatgtgagatattaggtgccacttcccacatccagttctagaaggaacctaactccgtgtttgcctccctcagcctctggctccctgtcttgagaggtttccctttgagttgttccctaataatgtattcgcttagtatgcgaccctttcgcctgccttcttcccttagcagggcctcttggagttgatgtgcaccccctcgcttacacatcggcacaccttcctccttcgggccccgttccttattccctgtccagacacacccctggaccgtctctccttagatgagcatttgagccatttgcagcttctcggctgctgggaatactgccgtcacgagcgtctgggttctcacggagttttaccagagattagaaagggagatgtcactgatgacccctcagctctcacgttgtcctttttgaaaatttgactttaagtgtgtgagtgtcgtttgtggcgtgtctgggcatcgcgcacattcttggtgcccacagaggttagaagagggcatcggaaccgctagagatgaagttataggcagtcatgagctgtcccgtgggtgctgggaacagaccccgggtcctgtcagagcaacaagagcgtttagctgctgagtcatctctccagccccaggagcttacagtctgtgtcagcgtgttattcttgaatgcacctcacccctctgtgatcttgcttgaatgtcatatcagtagctagaggatatcttgccactttgagtgacagagacacgtgtgtgggcactagctgtgggtgggaccccttacccagtatctgggtctccaccactgacagcttcctacctccaaccctttcttaccaccccgtgcttaccgtgtttaccaaagcctttagtttatttgcttttgacctttaactgactttctttttcttttctttccttggtaaaagctctctcttagcccacatgaaagttccctggtactgggaatccctccattttcattccttccatcttaggttagtggtcagaaattacacacacacacacacacacacacacacacacacacacactctccatgacccatgacatcttggctaggagagcaccagtaactaacaatgtactttgtttctgatactgagtttatggttacaggtctttgtaaacaagagcgcatgcaccctaagagacacccccccccccgttgtttaccctctgggattataattgtgccttacgataaacagatctgcaaggctcttggagaagacggtggctaacgtttgctcttaccttccctgacccttttctctccccctgtctcctccccccccccccccacgactgtagatcttcgtttgggagcagaacctcgaacagttccagatggacctgttccgattccgctgttacctcgccagcctccagggcggggagctgccaaaccccaaaaggctgcttgcttttgcgagccggcccacgaaggtggccatgggccgcctcgggatcttctccgtgtcatcttttcatgccctggtgagtagaagcaagtgacttttggggaatattcacctcaaggcttactcctgaacaggacctgacagagattctgtagcgtcccctggttctggctcatacagatttccaaaaaggcttcacttggcaggtcatgcaaaaaatttatttgaacctttgtggaaatgcgcttacataaatctctctggatagggctgaaactattgtgtaaaggaaactcacactcctaccccctgtccatagtatagggaattgcagctctcccacagatctttgtggagactggaggtctcactctgtcatagtttgatggctgcaactatatggtgtgtttgaggaaggccaagtttcagtgaggaagtagccgaacacttgctctcctaaagaaggaggcttttgtctgaccccgagagcaagcagcaggttgtgtgctgtactgtgttgacaatctgtaatcttgaacacttgctaaattacaaacagctttgtgtactttgggtccatttctgccaaaggggaaaaacaacccgtgtacaagcaacacgttgtagccaatgtagggagacgtcctcataatgtaggggtaccgcacccgtgacacatttgctgtcgaattagatagatgttaaatgttagggtccagacagagctgccctgggaagtctcagctgagtgacagctgagccctccaccgaattctgagctataattctgcccaaggtgtgtttgcattctttgtaaatagatttgtatcatcattcagatagttagaaggagatttacattttgaaagcggtcttaaacaccaatttctagagtttgttaaaaccgtcatatctgctaatttcatccctacttgcccatctctctggctgttacagttttgtttttgtctgtaatagctgggtgagtgaggactaagacctgaacccagttttcaccaatggcacgggctaggtctgttatagtttttaatttagccaaatcttcattctgtgtgggaagaaaatatgagatgaaaattttcactttgctcctgttagaatatcctaatcaaaagtatttatttttattaacaagcaagctcaggtgaggcaccacctctcgaactccagtatccacaccccttaaacttctgtgctttgattttttttcttataagacattggagcttatgtctctgaaacagacaaggagaagccattgagccacttgtcgtaattgatttttgatcttctaaactcgccctcttaatgtctatgaagtgtgcacgcctcatctggtgacaggtgtgtgaaatctgccccattgaagaagttggtaactctgacgggtctttttgctcagttatttggacgaatgctgtttaattccctaagtctgcttctctgttgctctcttctgtttcttgctgactgcctcgccagcgcaaaccttggttttggtgtccatgcatcctggcctttctgcagcagggctttgacttgagacagaacacgttaggtcactctgttgggtatcttgttctattttctgcccgggctcttgaagaacaacacaggcagggaatttcattctgatccattggacaccccgccccccaatctctccttgtcatttgaccctaagagtcccctcctctcaatgggagcggaatcattcttcaatttctcctttgtctaggatgtacccccctcctttcaagtggggccggaggaggtgcaagggttccagggccaggggagggctttgagctacaatgggagtcccattcactaggagagcctcagccctgctgagtgatttgccttcattaactgaagggtccccactgtagtctttgaagaaaggttatcattgttcttgtttgcacggatgggctgactgatagatagtcaggtgaccgccacagaggagccattgtctgggctgatcattgagaaacttctgagctcttgtccagcagttctgccagctgtttttctatactcctcagtcattactgttttgagaggggtggggatggggctgggggaggtggctaccagtaccttttagggccttctcacttgaaagtacctgctagagtctttgagcagcctgagtcaatcagccaggcaggcaggcaggcaggcaggcaggcaggcaggcactgagtgtgttggtaggtagcacaggtttatcttttctgtgcttttcttccctcctgagactataaacacaagagttcgttgcagccaaggtaatggattataaataaataaataaatagattgattgattgattgacaaatccatgcacgcgcctgacgtatgtcagctgctagccttgtgatgagggttaaaagagcaaagaacacagagtctgccctactggagccttgggttcatgaaggcaagacggggagagggacacctgcagttaatggaatatggttaagtgcaaacagtgaggcatgctgggaaggaaatgtgcaggctaccacacccccgctgtgatagtcacccctcagcatcctcagaagagtggcatcaggagcccctcagatacccaagggggtggtcaagtgcctcacaccacgtgctgtgctcactgttcccacatagtcgggtcttaccctcccccacactttgaaccatgtgcaggctacttaataaaacacgtaatgcagtgcaatgtccttagacgacattgtttactgaacggcgatggggaagctgtctcaacatgctcaatgcatatggaacatgaataattttgatctgaggttgcttgaatccacagatatggggttctcacccctcctggtgtgtagcatgagggcagacagaccgacagacactgtacttagaagtagcctttgctgtttgcaaattcactgagaccaaacagctggattttttttttttcctttttcaggctttgttttgtttagggttttaaagttcagcaccatttcttctgtgtctacacagaacacacgtgtgtcagcatgttctgatctaatcatgtcacaacctttgtttgccttcgactcagaaagttgagaccagaacatctgacatgttttatgatgcgttctttttgtaggactcccccccccccccaccaccaaatacctaaagaataaatgtaggttaaaatctttctcataaaaattctcacgggaatcttgactcccgcttcttaatgccctgatctgtctcttaagtgcttagctgagacaatgcaggaccccacggctctcatccttgggtttgtctctgagtccaaaacccttctccctaataccctgagagaagctgtctggctccagtcctcatgcatgtgagggtccgtgcttgtctactctctgggattctgctctgttgatactgttggtaccaaagactcaggaaatgcctcgtggatgacatgctgtaggctgggaggccccctgtgttgcccaataccagttcatccagaaggttctgctgccagttggcacctggcacgttgggagttgccctcgtgggaatctatgacaagtaggttcttagacattcacctccagcagcaaagaacaggtgggggctttcatttccagtcagactggctgtgcctcctacctcgcccttttgaaaggaggtttggtgggtggtctgttgagatctcctggcaggagggccctggagttcctggaacattgtttataacctgtagggcaaagttcaagcttgaatgctctacagactttctggagtcctcggatccccccacttccacagctgtcactgtggcagcttcagatacgtggaattctgttgtgaagtgtttccctgttcagacggtaccttggaggcatctcagcagaggatagctttaaaaagaaatagaagtgtcatttcctcctcacctaacataacaatgtaagttatggaagatctatgtgacacttacacacacacacacacacacacacacacacacgagggagagtatatgtctgcatgagagaaaaccttccctccatcaatacatttgtcagccttgggtacagctcagtggtagagagcttgcctagcatgtgaaaggtcctgggttcaatccccaacacagtgaaaagacagagacagagagagactgtttagctcagtggtccagtctgcagggtgtcccccttggtctttcatcctggaaaagactgatgtttcaggctgtgacccagtccttcctatcaccagggatgaactgtgtcaaagaaagccccctcctctgaaagcatttcctagacgccctcccattacccagaactgctcggtgcatgccccactccaaggaaaagccagctttgacttcttggccaagtgcccagatacattatggattttctagtggagacgctgggtagtggggccacgaattacttgcccagcgaagaggatggctttctgtgttctcagagattgaagagattggctggtttagatttagtgtggaatcagagcaggcagaaatctgctggttttcacggaccttcagtgtcattttgaattaagatgctgctaggtaactgacccgtcgctgtcaggaggatctcaagaaaacctggttccatgcagtaggtacagctcaagtctgactggaggacggctaactctcagcaccgcggcatattgtattgccgttttattcattattgttgattttctacagtgattgagctcgccagcttttcatcttacgtcagcgaaggtcccagagtccccatgccgtcactcactgctttgaacactagggtcattgctatcctttgagagggggttatggaaaggtgggactagatggcaccccaaggcaccggtgtcagccctttgcttcttctgtctttacaaatcccaggtggcagcccggactggtgagatcggagtgagaaggcgtactcaggccatgtccaggtctgcaagcaagcgaaggagcaggttttcttctctctggggcctagacactacctccaaaaagaagcagggacgcccaaccatcaaccaggtaggccccagagtcaacacagaggatccactgatgttgcttctgtgtcagtggatgctctcgagtgtgcatgtgtgtgtgtgtgcatgtgtgtgtgtgcgtgtgtgtgtgtgcatgggtctttactgacactttaaatcaacttgagactttagttctgagagacagtttttaataagtagtttatagcccaaacactgagctctgccattagtctgtcatcgacatccttctcccacctgtcctctccccaaactctgcttaattacagacctagtaaagaaagtgcagaattcagagtcctcagaggagagcaggctccacaggaagccaagtgagcattaaatatagtcttcttaggtcgtctctgatgcgggatccaaggcaacctccagggaaagggaccgtttccttgcttctgagatttggaaggtggccttacatgggcagctccttggcctataggaatgaggacccaggaacgtgagagtagccaccatggctgcctctactcagatccaagcctagcagaggatcacggggctcacatggtctgggctgatgcttgggggagccccgtgtaacagagcccagtggtctttctcttccctcttcccgctgaggcttctctcatgctgttgtcactgacaccaggaagcctccaactgcctgactagattttagagaccagaagacgagggactcgagtctctttggagggcgtattcgtttcatgcactactactgtagctggacaacatttgtgaggttgtgaccaaatcactctgaactttgaaacattgtgttttctgtcttgatggagcctgaaggagaccagccaagcctgtgatgcaagtggacatgagcaacctggtttactttttaaccttcaggagggtagggtggacatggcacagtcaagattcggtggctctctgcctcaccctaagaagaaggctgttagcatcagtatctcttccttccttctggagagagaggccttgcagtttggacttaggttctatcaaaactcttggtttatatggccttaccttctgggcaccaggttagattgtagctaggtagattggaatgtgtggtcaagtttcaatagatgcgagcaaatatcgtcacaatgtgtttttaaaccattcttataattcctaaagtaaattaaaaaaaatcttgcttagccataaatactgtgatagaaatttcaacactaattcagaactctaaaatagacaaaaattttatgttctgtagcttcatttttactgtgtgtgtgtgtgtgtgtgtgtgtatgtgtgtgtgtgtgtatgtttgaaaggcgtgggaagtttgatttcctgggacctggttcttgtggtttgccatcttaagttgtgtcactccttgggatccaggagggccccacccctgctgtgatgttttcagaaggcccctcccctttgtccagccattgtcccgagcttcctttgccctgttggtcagatttcctttctttaagatgacacttttgtctgtgcaggtgtttggagaggggactgatgctgtaaagagatctttagagggaatatttgatgacactgttccagatggcaaggtaaaagtgaacacgtcttccctttgggtcacacaagggcaccagcgcgtgcacagtgctgcgatttgggggaaactaaatttcagtacacccagtatgaaaacctgaaatgatcaggtttttacaaacgttatataacaggttaccacaaggtggggaaaaccattttatgtttaaatcttggtgctaataggaacattttccccgctgacataacattttccatacttatcatctgatgtctaagattgcaactagaatataagatttgagttctgagttagctgagcagttcatgtcattgctaattcctttttatgcacaacttttattcccaagaggtgagttcttagtgccctcactctctgcccacacctgctattttgttcccatgaatttcaaagaagtgttctgatagtatgttcttcttcttttcaaaaatgcattttcctcccaagcctaatactccggcatgattcaaccttgtgcttgaattgaattgggtctttcaaactgtcaggattaaaaccccagaaaggccttgacttgcccgtagccactttttgtagccttgctaaaaaacaaaaccaacaacaacaacaaaaaggacaccttcttttccaggaccccagttacactttccttggggttctagtgccaacagcacaatgttgctgtgattttctggttcccatctccaggatcagtgtagcagaattcagcttttggttgccaagcaaccaagtaatattagtcaggagcagctgaacccagtgttctagaagggtctgatccacagaagccagggtacggtggagttcttggtatcagaggccacaggaagggcctttcttaactcagacacatttcctggatgtgtcaccctgggtctggaggtggctcgctcagggaatgcattcccatggcaccctgtgtgcacaattgttcacgatgaaattagattactgcacatatatgcaatccaagcatagttttaaatatttactttgttgtatctggagttggccagttttgcgtacattatacattttttaaaaagaattatttattttatgtatatgagtgcaccgtagcttccttcagacacaccagaagagggcgtcagatcccattacagatggttgtgagccaccatgtggttgctgggatttgaactcaggacctctggaagagtagttggtgctcttaaccgctgagccatctcttcagccttgtgctatacgttttaaatgatgtagcattgtttcttgcacacggggtatgggaatgacaaaagttttgagttcccttgtacctacctctgtgtttcccatttttctaggctacctgtttaaaaaccagcttcctggcatttagccttgccccaaagaacagtttagatgcaaatctagggttgacccagtgctacggggcacttatttagtgttgcacgtgggagcagcttgggaagatcccagtcgtaggcaatggggtgtgtgggaagtgatggctttgtggtgattcttttcctggagtccagcttctgtgtgaaagcagcagagttcaaaggcagggccgagactcttcctcaaaacggggtttctctcccaaagcccttccactgggttgttgatgtattattattattattactgttgttgttgttgttgttgctatgaatggaagtcattttactacctcccagcatttttcggagaagttggtctcttcttgtaggtagctactgtgaatcttgttcctgggagtttgtagacccatacttagcagccagtggcctggattataacccctaacagagccatacttgagcatgaagtacattcacattgcaacggtctaatacatcttatttgccggggctcctgtgggatcgtgggtccaaggacgctttgtgccctggctcctcagcttgtgaggttcagccggcctgcatttgtacacggtcttcccccacatccacacctccgctgccctcaccctcagtcagtgtggctgagaacagtggcgatcctagggaggactgctgtgagcagcctcgacgctctttgaactccatctgggatgtggccttgttcctcccagggttgtcctggctgccggggaggacacaggacgctgctgtctgtcagcccgtggagccagggtattattatctttatgaacacagttccactgggggctcattgttactttgcagtataaaattttacatggcagatattcttgccatgatggaattttctactcaaaattcaaaatgcctttgtggaagagacattgggctgtgaaccaaatggtcttgctctctgctcactcgtgccatgatcacatcatggccctagacaatgtagggacatgcactctgtgcccagagtcaaaggctgcctgtctttcctttcataaagctcctttctcaatagctgtctctcccaggggtctcctccctcctggcaggcaccttctttctagcctaggctgttactctgggtacagataatctgagcatctgaaatcattagacatggacggctgcagctctgatgacttcgcttcttatcacagagggagaaggaagtggtcttacccagtgtccaccagcacaaccccgactgtgacatttgggtccatgaatatttcactccatcctggttctgtctacccaacaaccagccagccttgacggttgtccggccaggggacactgcgagggacaccttggagctcatttgcaaggtatgtagctcttcaggttgttctcctgagaagagcagaatcggggagtcaagggaagacctcttctcaagttcccgtgggtatagtctgagggaggaggttgggtatgcctggcacctgtggggcacagtctgagggaggaggcctcttctcaagcacctgtgggcacagtctgagggaggaagctggacatgcctagcaaattcaggcagccctgcattccttcgtgacagcatgcaccatgtgtaagcagtgtcttgagtgaggaggagggaaactcttccgaatgcttcgtctccaggtcataggtgtataatgactataccaactcaccctgcacacagtatagagaacctgagacagagactgaagcttggtaggactgagaatgcaaaacccaccactgtggacacacacgcatgctgctgcttgtccttctgttacctacatgctcgcacatgtgtgcatccaattatgtcatcccattttgccaactgatgtttgaatggtaaccgattccgaagtgagtttggcacgatgggaaattgctctttctgtggacgtggaattagcctgcactttctaactagacagtgactggtttgttctacttttgcctcacactgtggaaatgtctccatccttttcaaggcgagcctcttcatatctgggcgcccttcggtgacagcaggaagcagaaagtcacccttcttgcacactggtttttacttttctgtgtgtaatggcatctgtggtcttagtcgatcacatcacgtctgaaaaggagtgtcactttcctgacttgcagatacagaaagcgaggccccgaaaaccttaaatatttgccccacttcacatcacaatcggaaaggacaggaagatcagccaagtgagcataggagagacagccttgttcacactgcccccaactggggtgtgtgcagttgtgacagtggacactcacagaaactctcagagcgttagtctgtaggaaggacagtccacgaggctcagaggaacctagaatctattcctaggggggtcggcttccactgtaccctaattttattctagaaccatttggatgaatagcaatgacattttaaaagccctgttcattcagcatatgacttggaaatattgaataatttcactctctcaacaagtgtgttgtgattacactaccagaaatttatatatgcctttttttttaaatcactaatgtccaatataaaaatatgactcttcatatgactgggggagggggaatgaaataatccggtccactcaagacttcaaagccttatgtggagaaaattagatcaacctgttgttttaggacaaagctgaagtcgacccccacataggcattaaaagtgaatgacagcaccccacagccctcagttctttcatggacacgggttctggctttcggacacactggaacctctgctcatggctcttcattctaattacgtaatagagttggtcttctgaagatttctgtgttcctgcatttatagctgagcacagttctttagagaatcaccaatattctgcagagctgtgagagttgttcttagttgctgaaagttgaaccctgacttttttgcataagccagatcctgaaagctgtctccaatatgctcacttggctgatgttcctgtcctttccgattgtgatgtgaagtggggcaaatatttaaggttttcggggcctcgaaagtgacagccacagagggtacttgaggaattgaaaattaagccttggttttggaatggccacgtttttgtgggaaattggtctgtaggaagaacgatgaattggttggatcaggtttttttgtttttttacagcattttgcctttctaaaaggaaccaaaaggtaatgctgcctctgtcatgtagagacatcatcaagttaccctgtagctctcttcctctagcttttggttccttactgagttcctatgggcatccttaaggtgcgaattcctttctgtaacaaaaatggatcatcctgccgagtgttcctgagttatcacttttcctgtcagaacagaaataagaccgcaccatatagaacagcttctgtctctcgagtttaaacatggaaaacttccacgctgtactttaagaaactgatggtctggctgggcggtggaagcgcatgtctttactcccagtacttgggaggcagaggcaggtggatttctgagttcgaggccagcctggtctacaaagtgagttccaggacagccagggctatacagagaaaccctgtcttgaaaaaccaaaatgaaaaaaagaaaaagaaaaagaaactgatgttctccagagaagtatctatgtaggataaaatgtatagtgtgctcagacccatgtcttccagactcctctgtaactgttggagtagttctattcctaaggatggagagggaagagagggtgtgcgtgttataaaataatctaatataatggcgagtctgtcttttatgtcatcattatcaagctctgcattggtaagggatgctgtttctaatatctagtaatcaatttctttcttctgtctcttgcattgcctcattctctttcctatcctctgacccacatcatttcacctcagtttaccatctgccatccatctgatcaccagtcaagttctgtttcaagatgcacatttcgtgtgatagatgttactgaaatgattgttaaacacagccagtaaccatgttagcccgtggttctttttaatataatcagattattgcaattatacaaaattacaaaaatgatccattcttttttttttttttttttttccgagacagggtttctctgtgttgctctggctgccttggaactcactttgtagaccaggctggcctcgaactcagaaatccacctgcatctgcctcccgagtactgggattaaaggtgtgcaccactacacccggcttgatccattctttcatagtgactcatattgttcatgtgtgaccatggtgtcacgttactccatatttctatgtgtgaagtaggtatctgttcactgtgtatatgtataggccaaaggacaacctcgaattccattttcagggacatcgtccacctcctttgaagtaggatttcccattgtcctggacctcacataataatctagacaggctggccagccagccccagggattgtcctgtcctctgtccagaacacaggagtcagagtgacatgccatcactcctagaaggtttacacagttcttgaagtgggcctcaggtctcatgcttacaagacacacacatttcccgactcggctgttcccacaacccaattcttatgtatcttcgtggctcgaactatttattaaaaagaactacatagctacttagttctttaaaacaattatagttaaaaaaaaaaaaccaactaaacttgcccagttgtgatatttattttatggcacaatttacagctagctttcttgactctaaacagatataatgctaagtgatttgagtaaatgtactctggaaagcaaatttgtactatttaattttttttttccctaatggaatttctcttgcaaagaaattttctctcgaatgttttgcaaagtcaaaacaagccagatgcgcaacagccatccatcaatgttctccaacacttggattcttttcgcacacacagtgttatgagcgccgttgaagttctgcctgctttgatatggaagttcataacggtttccctaagagtcgggagactgaatcggctcctgctttgtttcagatcataactcctaaactttcaccgaactgggaggacccacaggaatacttatccttctcgccctgattttagaataactattcaccaaccggaagggtctttagatttcttattaaacctgtgtaaatatttgcacatttacttattttgagcctgagctggtctcagccttgaaaccctcttaccttaatttctaaagcgccgggttgtaggcatgtgctgtaggcatgcgctggtacttgagcgcaggggcagtacacatgcgctggcactccagccagtcttcgtcattttcacagtcgctgtacatattcatctctattttttaaagttatcaagacaatgaataatagagagaagttttggaaaatatgtgcagtgtgagccatgttctctgtactgaaacccaattgctgtttgtccttccctgtgcaattccaaatgtcagcagtgtggtgtctggggccggtaggatcctcgctctctttagtagtgctcgacagctggctggggagagtcccactgcggtttgtcccagaatcccctgggtgaggttaggacagcgctgtgacgtccagaaggtgactgtggacgaggtcgtctggctaggactgaccccgagtgtttattaatgacagcagtaaggtggccaagctcctttgtccctgttaggaagaccatgtgaaactcagtcccccttcccttgtgcttcagtagggaacagatggtaaaacaaaatgtttgcttgtaattaaagatttgtgaagcccccggagaatgagaagcaggcacacaagggaaactcttcttactggtcatatcactccctcccttaaaggcttccatgttgtgctatccgctgcatgctgccagggaactcatttccactttctggaaatgtgctgttggggtaaaccatgactgtcctctgtgcatgtagttatttaaaaacataaggcaccactcccctgtctcccagtctctgtctcccagtctccacacaccagttctccaaacccaagctcaccccagacagaggtccttggtgatgagaccggtcggagtctgttctcctgctgcatcacggagtgcccgcctggcaccctgttcacactgtgagctgtgtctcactgaacgttgaggggataatgactggagcaccattttgggctatgtatttatacatactggcagtataaaggaagagttcttacctgctacactaaattttacttattaaaagatagttctcaccacaggacatttttttttatcgcttacttcatataaaattgaaattttattttaaaaagttgagaaatttcaaatgtatgtagaagtgagatccatgtaatacatcctcgtgtgcccattgcataggatatataattaccatgtttcattggtttgtttattctgtctccaagtgtgaatgactttggaagcaaattccaaacagtttatctcttccttgctagtgttttaaggtgcagtttcaaacgataacgacacttcaaaattaaacctacccgtttaaatcctctcttgtgctgtaattccttgttgtcttctaacatttgaaaagcgtgtttgttttctcccatgtgtcttcttggctgtggattgaaaaatatttataaaaccatattaatcatggttcttctttagtcagattaactccaggatggtatcttagtgtagatccacggagctgtcttagaggaacggtgaggccccgagagctctaattcccaagccatttgctgtgcatcccaggctggaggtgcactctcacagccccgagggagtcccattctgggatacataagcaaggctggaaccctggcctcttcttgcttgtgtgatggccggcttgcagtgagcccctaacacttgtcctggggcccagcagccgttttctctctcattgtaaccccccccaccccgtttctctgtttctctgttcctccgttcctccgtgtgtccgttccacctcaccatgtgagtgtatgccatgacgtgcaagagcttctttaagagatacagttgaaaactcaaaccaaacacacgggtctgtggctcagttttctgcactgagttgcatgatccgtatgacattttattaatgagttccaggtccgatttgtagtctaacctttttttttttttaagtatagaaacctgccacccaacccccatccccattgccttagggaacaagataacaagtctcccgatctctcgaggacggaatccctcctgttcactactaaacagacattttcctcccttcctgtcctagacacatcaactggatcattccgcccattacctgcgcctgaaattcctaatggagaacagagtgcagttctacatcccgcagcccgaggaggacatttacgagctggtaatgtttacgaccactgtcctcgaacaccccgtctgagataattttcaaatcgtgcatgtacttgtggtaattgtagctggtgggatggaatgagcttcattcagagccacagagctggcagaaataaccttgcttatcacagaaatcccggagtggaaagtcgcctttgcttgtccaaaaagcagggctgcgctgccaccaaagacgttgaaacccacagatgatgctcagataagagttgagtcatcaggacagactcttgctgaacacctttctttttaatcggtgactctaaaatcagttggcggttgccacagtgaaagcgctccaattttgtgcaacttctaccatcttatcagaactgacggggtaaatcttgtgggtgtaacacccccctcccccacctccccgaccatccatctaatgcatcacccagcttgctgaaactgcattcacacagattcttggagacatctgtggatgtctgagtctccttagagatagagaacgcagtttctgatctgggcctgagattattatcagttcttctgcatacaaatcatagggggctggcgagcataagacaccaataccgaaagttctgggattttacaaagggcagaaagatggtttctcagtaggtgttagcggttgtcaccttggtaaccactggcaggttccttttcttagcagagcagtgcatctttcagttctaataaacagtggtttggggaccaagggcctctcttggggaatgttctggcttctcggttcttagtcatctttctgggggacacagagctgcttgtcgtggagctggggatagaaacaggggagtgactccccacagaaagcagaactggaagtacagctcagaggttccttttggaaagaggaaccacagtgcagaatgtcatagggagtggcattttaaatcaacttcttgagctatacttcttctattaggaaactctcgacaaccgtaagcgcataacagatacaagtggttgtttccactggaagagttatgatttggagtgtttctgccagccgaaaaggtcaccccagatctctaaagtattatattttttttttgaggaaatatggatttttctcttgtggcagtctgatcatgttatatgttggaagaggatgaaagtgggcctggtggggggatggttctgtgactaagaaaaggacggctcctgcagaggaaccagcttaaggttctcagtgcccacatggcggctcaccaccatccacaattgtaattctgggctatctgatgccctcttctggcctctgtagtcactgcacacacatggtgcataaatgtgcctgcaggcaaaacactcatatacataaatattgcaaagggaaaaggacataaatgacctctcgactctttaagccactgttgactgtgttgatggagatggagctggtctcattaacagccaggagccaaggtgttccttctgagaattaaatagccagttgtttgtgttctgtgaacatactcaaggagtcctttccatgccaaagaagaaaagccttagctcagcactacagtcctcatctgtagccctagctgctcagggggctgaggcagaagagttgcatgacctctaggagttcaaggttagcttggagaacaacacagcaagatgtttcttggaagaaaaaaaaaaatcccatgcgtagtgtggtaaacatctaaaattcctacactgggagacttaggcaagaggattgagagataaagcttggggctagcctgggctacagtttcatctcatctcggtgaataacttggagtttcatgatcaaaaaagtcagagaggtcaggctgattacgctgcaagaagatagtttagtttatgccttataatttgtgaattttacaaacagtaaattgcagggctcataggcaacaagcttctatttcttgtatataacaggcatgtgtgctaatcaggtcctgtatataccaggaatgtatactactcgggtcctatacatgtcaggcatgtgtgctaatctggtcctgtagataccaggcacgtgtgctaatcaggccatggctttaaaatgtttattagtcatatactattgttatgaacaaactttttttagatttatttattttactatcttatgtgtatgaataagactggagtcacagacagttgggagccgccctgtgtgtgctgggaattgaactgggtcctcttcaaaagtatcgagtgatcttaaccattgagccaaccctccaaccctcccctagtcacatatcatatttaagctatggatacggtgtggctttatccagtgatgacgatggagtgctggtgagcccagctcagcctgttcaggtctataattgttattatgtatgtgctatagttaaggggaacaacccgtaggtacaaagggaccactgtgctttctctcaccctttgcagtggtctctggcccagagatccccagggaagcagtgaccagggtcgtgcttacgtcagcacctccatcttaccaggctctctaagcttcttgcgttctgggcggctttcgtgcctgacgaagcttcttgaccccttcccagagtaatgcttacagtcacgtgagacaggacatacagacagaccttcccatggcttagtcatagcaagatgcttagcaaaactcaattttaaatgataggtaacatgttatgagctcacgaaattataaaacttaacagtggatgtagtagctactgctgctcagaaatagtggcaagtataactaatatccagaggtattaatagcaactgggatttgctactgagatggctttagtactcatgaggaagccacgggcactcgtagtgttgtggtccgggttgcctacgtgcacccacggtcagagaagatgctgggccgtcttccgtaaatgttctgggtatcttttgctttctgttctgagttcacaggcccctagaatcatctcaggggtccctgttctgcagccctgctttagagcattcctcggggtgtggggtcatgctaaggcagggcctgtctgggcacagagtgctttctgagagcatatttgttttcttgctcgtttctgagcaagcagcaggctacacgatattaataagccctgctacctccctgcatgctggggcactgctctgcaggaacctgcaggtgtctccagccatgccctcatatatgactcccaccccaaccccagatacttaattctgtcccatcgatagcagaaagtgagtcctggacttggaagatcttggagagtaatgagtattcatttgtgtgagtgagaagggagttctctgaatatctaccaatagtcattgtctgcctgctttgctgattatattaatgtaaatgatacccatttggctatttcttcctgactagatagttgttggaaacagtccatggaatggccacagacctggggtttagtctgtagagacaatagctttccagatttcacactaaatgagatcttattaaagtgacaggggaataaaatgtgcagccaaaattgattaatttatttattcattcatctcgcaaatatttacttagcgtttctgtgccaagaataatctctgatcctcacagggtatgtgccagaggtgggggggggggggtcctgtttctggaggagcctctattcaggttcgcagaaatacatgtaaaaacctgtcactggcagcaggttttcaggcttggagaagcaagaagttagggagagaggcacggtgctggcatgctgaggtgtgaggtgagtctgggggtgaggagaacaagatgtgagtctcacgtgttttacagaaaagtgtttcaagaaggtgtgacatgggtctggggagaaaggtcagttggtaacattcctgccacagaagcctgagctctagactccggtacccctgtaaacggtggtacagagccaggcacctctaatcccagtgcaggaggcagagacagcgggagcctcagacctggctggctggccagcctggctgaattggcgaactctaggctcagtaagcgacgccattgataaaatttgaaagagagagagagagagagagtgtgtgtgtgtctcagttcttaacttctcacgcaatacaaaatgaagacaatctgcctatcatttgtgttgtattaggtaggtatcaagtgcaatctaaagacaattcaaagcctgtgtgacatagcttttatgcaaataccacactgtttcccataagagagttgagcacccatgggtttggagattctggggtcctggagatcctgaaaccagtcctgtgagttacctagtaatggcaacagctggcctctattgtaacaggctccttgaggttggtgtatgccaagcgcactctaggacacgggacgactccctgctggctagggtactgtggctaagaggcctttgtggcttaggctggcatggtcaggggagacggggagacaggactaacagcatgtggttagagcagtgttaaaaacttatgatgtttcccctctggggcctgggggaggtgcttcaatagtactttaaacgtggaacttcaatatgtgtgccacttgcctgtgcataaggtggccagctttcaaattccctagcccagatcctgtggtttcagaaaacacattttaagacacagaagtttcctgtatttttttactttttttttttttccttaacctggcctgagtctcagtcagcacaagagtgagcgtgtggccccgaggctggcttatgtgacaccgagacagtggacacagtggagagcagaaattctgagcaaagtatcccactggctctctgcagagatggtcagaactaacgggtctatgctgtcacctagtgggaaggactggctgctacacatatttaaaaataaatgagcagggctcaaccccagcagagatgaacactgtggtattgagtgagcatggtgcttgtcctgccatgtcttgtcagctttctttaaataattccgtatttgtaattgtagtggctatattttctgatctttaaatcactgaagtcctctaattggagaatttaattttgtgaactgaagtgtctaaataaaatcatattgaattatgcccccggacacccaggctgtacggccagtgttcctagctctaacccctatcacattgtgtcatagtataccattaaaaaaaaaagacccgtgctttcttcttgactgtataaaatgacatcctgaagagatggggcaggggtagacgtcaccgaggtccgcttcagtgactcaggatgcagtacctatcaaattctatggcttgagatttattttcatttccagatcagtaagagtttgcatttgtcttcaaatttggatttcagctataggttttttacctaagaaggctcatcctcctaacctcaggcctctttgggtttcacactgggctgggagtcaccatggtgggacacagagagagccatatctctggggcttgcaagactgcatttagaccctgcccagcccaccctggctttacaaacatgttagaatactttctcaccagccttagcgccctgtttgtgaaatggacgttgtaattgtcccaggatggaatgataaggcacacagttgaaattcatgtcttgtgagttagctccagatatatggaactgcactgtcagttgatttaaacattttctgatgcgcgagctatataatactttaatcttgcatttatacagaaacacattctagactatgttgggtttatagatggttggttgatttgtgtacttacttttctttatgattttgtatagttgagtggctaaccgagaatctcatcacacagacagtctgtatctaccagttgatcctgctgtggatttcctcctgtggaagtgctgtgtgaacaggcagagatgtctagtactgtgcaggccttcactcagcatatttataacctccttttgattttgacgagtcccctgccccagcactagagggtttaatgatgggggcattgtgtttcaggtctgtgatgaatttagggtgctctatagagtgatgtgcatgtggagagagcgtggttagaagcagcctggttttctaagcttagctgagcgtggtgctgagaactgaaggtttttcactcaataaaaacactgatgtagcatgaatttttgttcaagtatcaattatgaaaaagcaaatttacaaaatgctgatctgtcgtatttgcgatgggcccctcactcgcccccctctctctgatttgcagctttacaaagaaattgaaatctgtccaaaagtcacccagaatatccacattgagaagtcagacgcggccgctgataattacggtaggtttttatttgtctttggtcttgggtgtttgtgtttccagttaaagcatttcatctgtaaacagaactgagcatatttacaattcaataagaagcccttggggcctgttttaaacacacatctggctcctgtgccatgaagtgcagctgagctatgagagacgctcaacccgggcatggggggcatggggggcatggggggcatggggaggaaagcctctggccttcagtctcttaacttgaatcagtgggattctgctgtcctaaggggcagacagaggggccacagagattactcagtggttagagcacttgctgctcttagaggaaccaaatcggatgcgagcaccttgaggggcttacggctgctttgaacaccagcttcaggctatccagcaccttcttctggcttctgtggtatctgcagttctgagtctctctctctctctctctctctctctctctctctctcttctgtggtgtctgcacttctgagtctctctctctcgatctctctctctctctctttctctctctctctttctctctctctttctctctctctttctctctctctctcttctgtgatgtctgcacttctgagtctctctctctctctctctctctctctctctctctctctctcacacacacacacacacacagagtgggggaatggttgggagtgaatagagagatagataaatttttttagaagaaagacatagtggggatggattattttattttctgttgtgcctgacgatgaaggaaatatccatttccttatgttgccctctctacctttctccacaaggaaagttaaaaggacttgctttgttgatgtgtagtggtacaggtctttcaaaaacaaacaaacaaacaaacgaacaaaacaacccctgccccccatacacacagacctgcctgctgtcatactttcctatatggctgtctacactctgctatcattactgatatcgttagactgctgttcgattaagcagtaaaggaattatcccttgagctcaggaactggggatctggcgagtgctatgttaggagaggtaagggtcattggagcccagagcccacagctgccatttccctctcacactctcctggctcagactgttatttgttgtcatttctccagagccaggcctggggcagctgtcaccggagatgagcctgtggcttttttgcaggggggaaacggaggaagcagtgaatcaggtcctactcagtgacagacagtgacagctctcagcaaatcacagagtcacctacttacaaaggtgttgatgtgcgtggacctactgtgtgctggagcttacatttcctggtgaaatgtcaagaccactgctcacatgtattagagatctttctctgaatgcagtggttaaccttttaagtgtttggaaacccccaaagccctcacaaggcagctggtatcatgttccctcctcatctcctgctgtgggcaaatatcatcgtctcaaaacgctcattagagaattgtggcctaatgaatagaacccaattttgtctctctggccacttctggtataccttcacgccgtttactgtttgaccctcccccgcccccaaccaaacatatcaggaagcctggaggacatccttagtggcagagaattaatgtttataaagggcttgatatgcaacagaagtgtggcctccgtgacgaaagccataattggtggcactggcataaacaagcaccggccctgcttctacttaatgtctgtcgagtgggagtcagccagtgagaatctagaaaagtgagttcccacgctctgagactcttggtctacgactgagtgatctgaggaacttagaaacaggcacttggcaccaaaacaccccacacgcctccattttcctcaggggacgaattataagatgttccacaagggcctaaagttagagatagcacagagctagctctatgccctgttcgttctttttctctacacaggcataccaatcataaagttcaataataaataaaaaaatccgtgtgtgcatttagcctctgtgttcatctgtgtaccatgtgcatgcccggtgcaaccgattggaggcctgaagagggtactgcaattagagatgattgtgagccaccatgtgcatactgagaaccgaacctggatcctctggaaacgtagccaagtgctcttaaccactgagccgcctctccaacccctgataaagtttaacatgtcaggtggacacattgagagactagcagcaatgggtcattatagagaacagttgcaagaatgttttacgattagagttgagaatggggcatgatagccacagagggtgaagctatctacgggcacgggtacaggcgctgtgtgcttcagagatgtttgaggggctcaggttgacacaaagctgtttggtttgcctcggtttgagctttggggccaccagtactttcacgtagctcacactccattgcttggccgcaccaaactgatggaagaggttctcaggggttggggggcccaaccacttggtgtcggtccctgagcctcactctggaaaaccctgctgcatgacggtgacctcagctaagccagtgtttgggctcttgtcggcagcagcgcattggcaggaaagaatagtccctgttgtagttacttttctggttgctgttaggaaataactctggcaaaagcaacccaaagggaagagggatttcagctcacagcttgagggtgtggtccatcatgggagagggggtagggtgggggaggggagtcctggctgcaggggtctgaggaagctggtgcagtttattccaagttaggaagcagagatgatcacattcagcctcctcctcatgccattcgtaagctaagcccagaggacgctgccacctccccaccccctttagtttgggtctgccaactttgatgaactcagtcataggcttgtctctgaggtgattttagctcttgctaaaaatcctggatggttcgatagcctctgaccttagaaactcccttggcatctcgtgcagacccagccagtccaaaccagcctgaggtagctttcctttatatgagcccacatatatgcaggctcttagtacacactgacacaggacatctcaacagtatcaagtgctgctttctattttagggtgcaaaagatgatctaatagctcaactggctgaataaattttcaaacagtaacagatgggccgggcggtggtaagcccatgctcttaatcccagaacacaagaggcagaggtaggcggatctccgagttcaaggacagccaggactacacagagaaagaacaaaataaaacagaaagagcaaacccttgggagtttctctctccagcccaccccttaggtggcactcagggcttattgtagagttagctcaggttacacaatatttagactaaccattcctatgctgtctctgagggaagtgtgcacaggtcaactctagctttcccttgtcccagggtacttctgatgatattttagcacttagtattttagtagtagttgtagtcgtagtatatacacatgcaccatatggtatatgtaaaatatagaatatacatttagtaaatacactatttactaaaatacttagtattttagctgtgatgtcatcctcatggtgtggagtctgtacttacgcagctattttatcccgggcctagttttgaattctccattgcatattatgttgtggatttcctttggccatgggtgtcagtatgagggatttcctggtagttcatcaaatcaccagatggtctagtctcttcccatggtcttaattacttccttttctaggtccctaggccacatatcactcataacaccttcctgctcttacaatggcagcctcctaattgttggctaccttagtttgatattgaatccttctgctcctgttggcaatcattttggcctttgttaaagttcgctgagattggagtgtttctgttgcactgaaaacctttgttgagtggccgtaagagcatcgcgttcttcgttcagctagaagtagtgtttccctttacacttgttgatgtaggagacagttacacagatctcaatgccgtgcctgtgttgcactgtggtgcaggctccggggagaggctcccctctcggccctgttgctacacgttagtcctgtgggatactgtgtaaagtcccgtcatccttgcatggtctttggaaaggaagttgtgcccatggtccttttgtttactctgttcttgagtgtttctcatgtctctgtcgtgtagccaagtacctggtgcaggatttcacagttccctccagggctcaggctgatggagctcctgcctccctcactccttggttagcaatcttccagcaccaggaacagaagggaatccctgaaggaccactgccgccgatggttctagagcagcctctggcttggtcttccaactaagcgagctggttctcagcgcctctcattagcagctgaattgtccccagcccataagaatgaaaatcaagttaatattatagtgaagataagaagttctgtttcctatctgagagagttacaggacttggggtgttagcaatggctggtggcctttcttgcccacacaggttacctatgttctagtaccatgaactaaacagaaacattgcttgaaaggtctctgtggctctcttataatagtgctctcccctcttccctcctccattccttctttcctccctccctctcttcccctctctgtctctcctatttttttttaagacaacaacattttcttctcccctcagcattggttaattatttaatattctgatagtcactagagtagagtaggaaatcagttaaccacattccagtatgaaatggtatgtataaagtgagtttcagaacgtgataagaaattaaagcaatgtccataccgcagtatatctgggtgaatacacatcatacccagggaccatatatcctaagatgtagactggatgaggaaaaaaaaaaaaatatatatatatatatgtgaggaaccctgatgagttaaaccgatttgcctgttttgtgccgggtaaggaagagtgtgggaaaagcaagccctttaccaggaaacaggtgagatgtactaatgtcctttattccccctggcaggctagtttgaaggatggagattaatggacctagtgatatttatttttataagttgttacttttagaatgatctaaaaatacatttttttccacctgctgtgtaaaaacaatctgaacaacaggaaaaaaaaatccaaagtgtacacaccaggtacttcctgctgtcagctaaaccttctgagctctgagccctggcttctgtcttgtgttctgtagggtttttgctttcttctgtggatgaagatggcattcgaaggctctacgtgaacagtgtcaaggaaaccgggttagcttccaagaaaggtaagactggagctggggatgtttgtttttgccattttgttttgctttttagtttttgagacaggaccttgatctgtagccaaggctgtcttggaactcccgatgtggctcaggctggacttgaactcttaactctttctgcatcagcccctagtgttaggatctacagacctgccaactcccatctcccaccccctaccccagtggcccttgtttatctcagtttcccttttgagagacatgttttcagaggggttgtgcataaaggatttgtttccttctgaaggattcccgggaagtgggttttacttcacgaagttgggtgtgtgactctgagcctgtatccaaagggttactgtaaagttctaactagagtggttgcttttcatcctctggggagcgctggggcctgaaggaagcagagctttggttatcagcgctcagaggcgtgcctgaacctgtagcatcctcagaagtggcttttccccgaatgtgtcacttcctggagagtctgcagaagttgaatttcgatccagcctcttctgtcagctctcccctgtgctatgtctcgcctgtctcttttggccttccaagagcttagcatgcattccggctgcttttgagccctgtgctccatctttgtatcctcagagtctctcctcagcctagataactgtgttctgggccctccatatccataggctgtacatctgtggattctaccaactgcacactgaaaatctgccaggtgatggggtgttaagaaaaagcgtccccttcgtccctgtcaccgctccctaagcagtgtcacgtggtcagccgttttcatagcatctatgttgctttaggtattgcaggctactcaccgatgatttaaatacagctgttcacaaatatgactccactctgtcagtgggtgtagttctgaggccatcttggaatccttctgctgagggtaccaagagaagatggaacccgtgcaccccgttagccatagaatccctgtaacagaatgaacggtgtggctcaaatgcacagaaattttccctcccgtggttcaaggggctggaagaccgaagttgaggtgttgagaggatcgattcctttcagagcctcggggaggaatttgtcagctgtctcttggatctggtggctgccagctatccccagaggtccctggtttgcagctggtgttcctgtttttttttcctttgtactcaacatggccatttctctgtgtccctaacctttctgtggagccttctgaggagagatcccttgctttaacacttatcctaagtttccatgaggtctgtctccggtttattttgacttatcatgtctatatcatataacgattatttcaattatctccatgatatgtgcctggagctcttgttgagaaaggttgcttcccgatgttgtaggtagacacgattgttttgttttgaagggggcactgttcggctcattatacttacaaaagcatgaagcaggtcagtaaggcttagagactaccttcctttcattcttggtatggaatttttagtttcctcgaggcaatgggaaaataatacaggtgcctagcacatctcgtcagctgtacttagctgtggttaaccaagtctgttgttaagagctctgaatggacaaaggatgctgttttttcctgcctccatcactgcagtagctgagcatagtactaccgggtgtttggcagcctgtgagttccctgtgcgggtcatttctccctgtgctgtaacagtcggagaatcacaatctccctgaggagagcctcctttatgttccttgggtgttttctatgcctacaggcaggctggaggccagagcttgtgggggtgcttggctgcggggggggggggggggctcattcccctccagacctgatgactgatctttatctctgtcagcaggatgagcgcgctgttggtgaggccggggtgggggatcttctggcattagtcacatcctgtttctttgactctgatgtctccaagtcactctacacatggcgggcagtgccaggatgaggcactcagggcactagatccagcagttaatgaaatcatacatcccagcacaccccctccagggctcgctgcgggccacacatcccatttgtgtatctgagaacaaccaaagcccttccccagattctcttccccagattctctgctcctccagtttggcttgggtctgttgttcagccagcctttggtgcctgtaatctgtgagatagctgcttctccacacccatcaagtccaagttctttgaccacctgttagcgtgcagaacggaactctgactggcttttggaacacggccttggtgcctgcatcctggttaaaatggccagaatttgtggttgagaagagagaccgggggaacgctgcctatgtggacctggacatctgtcgcatgaacacacaccccttcattaccttggtcagcctgccacactgggctctggctctaaagcactgcatctgggtctcttgttcccactcctgcccgttgctcttcacacgcaggccacttgtagttgggtctcacgttggccgctctagcagaactagcaggccccttgtgcctttgtgtgccttttgacccttcacacacacaccctcattagggtcctgtttgttttggatggtcattctcgattggggatcacaaaagagccatttatcatttatccatgatatgtattttcacgatggcctcacaggacatagcctggatgagagagacatatgtcatcttactctaaacagtttggatgctacatatagctttctttaaaaaaattttatttgattgtttattatttattatgtgtacagcattttgcctgcatatatgcctgcatgccagaagagggcaccaggtcttatagataattatgagccaccatgtggttgctgggaattgaactcaggacctctggaagaacagtcagtgctcttgacctctgagccatctctccagctcccctagatacagttttcagagtccgttcttatttccagggtcagttgaggatgaataacaatatggagagccgatgtctgttgagtattctcaggctgctccatgtccattcagtgtctagccacacggttagcttcattttctctctctctctctctctctctctctctctctctctctctctctctctctctctcacacacacacacacacacacacacaccatttcttgcatgagaggctgaggctggggctgactcagtaatggccaagggtcacaaagccgggccatgtcgcagctgtgacagacaggactcggtgaggcgctggtagcacagtactgctgacggcccctctcttcttattgcccatcccgagaagaactcatctgtgtcgtcttccccgtgttgccataacaaactactggaagctgggtggcttatagcagcagcagttgataatcttgcttcccccctccccccccttgcccagggttcttttggagagaaacctctctggtctcatccagtttctaaaggtcccatccttttgtgggtttgtggctgtaacgctgttgggcctagggcccaacagacagactccaacgtctcctggtcccaacagcaaagatcttccctctagggaaaatggcacgcacacactgcacatgcacatgtgcacacatgtatgcaccgaaaccaaacaccaacactgcatatattgttttgttttttttttattttctgtttaaatattatactgctctatattttaactcaaaagtgagttgtttagggctagaggttaaagctgcacttttcccgaatcctggggtcataggcagggggagtgataacaactgcattgaattctgtaaattgtcatctctgtacgaatttgggggtggtggtggagacaaaaacagcagcctaacttctagtgatagaaaggagcaacttcctgcattttagttccgtaaaaatgatcaagagacacgcgtgtgtacagtacgctgttgccggtgttcccagagaccagcgtcttggagagtcaaccagaattggcatttaaaaaggaaaatgggccgaggcttagaacatgttgaagcagtagcgattgttgaggtgattctctggggtcagaagaggaggtctgaagcagtgcttctcaaccctgggggctgcacagcaggtatccggctcatcagagtcacccgttaggattcacagcaatagcaaagttacatttataaatagcaaggtgataattttatggtaggggtcagcacaacatggggagctgtattaaggactcagagcattaggaaggctgagaaccagggctctagagtctcctcaaaactgtgtgagcactgcagcctgctcccagcagccctggggctgtgagactcctagcaggagaggagccgggcaggcccctcctgacagaacttctaagttgttatgctctgctctgtgtgacattaaaactttcccatcatgcgttggcaggcctgaaggcgggggatgagattctcgagatcaataatcgtgctgctggtaccctgaactcatctatgctcaaagatttcctctcacagccctccctgggcctcctggtgaggacctaccctgagccagagggaggcgtggagctgctggagaaccctccgcaccgagtggacggccctgtggaccttggcgagagccccctcgccttcctcaccagcaacccaggtatgctgtgcccagggctgcgcttcacccatccatgcctggggaggtaccgcagtctgcccacttcagggctcgttcctgcaaacccgggaaggtcctagtgagtgaagctggtagctggctctgtgcttcctgttggcacttcaaagggagagagaaggtattttttgttgtggaatgactgttttgctacaggtctgctggtcccactcagaaaaactttgtttcttctgctctctcgctcattgtcatcttggagagaggtgagtgttggccaccatttcatggttgtggacagagatgggatcgcatcagatcctggcatgctgaatcgtactttagccttctccgtctcgctccccggagtctgccccgccttgctccttttcctcggtgagagaagttggatgctttgtgaggaaacttgtccagcaggcatttggttaacttggctccctgaacatgaactgggtcagtgggaaaccctgcccaccctgacccatccactacccctcccgagtttcttccctgcgccttctggtgttcattctgatggaagcagttgggtgccttcgtagccttcctgggatccccacagaagttagtgcccacctataacgccagctctatgacccgccgtgcgtgtctgtgggcagcagctgtagtatgctatttgttttgctgggttggattctaagttgttctgacaggctctcactttgtagcctggtctggcttggaaccccttgaatagcctaggttggtctcgaacctgagatttccctgcctcagctttctcagtgctgggtgagaggacaatgtctccatgcctggctcggctcatgtgatccttgccttccttgcctctctgtgtgtgtgtgtgtgtctgtctgtctgtctgtctctccgacttgtgtgtctgttttctgagaacgggtgtcttttcttcatccttgccttccacttctttggacgtagcttcccatacaggtgacgggagcgagtgagtgggccgaggggctgtgtggtctgtgctaggatctgggttgacttgctagtcttggtttcagaattatcttcctccccctgttttcagaagcgtgaggcagtgggggtgtctcatgtgagcagggcggcagtggtggtgggtctctggtgtcagtgtctgccttgggtgtcattcattgccattgtcaggttatattctgcagctttgctgtttaagcaagaagccctgtgatcactcacagttttgtttagtggctcttggaagagtttgataatttgaagattcagaaactcgattgattgtgcttagttaccgctgacctctaggactgccctcttatagtggccctcacacttcaaaagcttggtgaatgccaaggaaagggaattaaaaccatggaggccaagccgggcgtggtgatgcatgcctttaatcccagcacttgggaggcagaggcaggcggatttcttagttcaaggccagcctggtctacagagtgagttccaggacagccagggctatacagagaaaccctgtcttgaaaaaccaagggggaaaaaaaaaaaacatggaggcagtccgtcctctcagatggccacaaggtggcacttgtaatcagggttagggaaacaacccgctgcctctattctgagagcaaatgaaccacttgaagtgcgattcgattgtttaaggatttcgtgagcaggcacacaaggtaagcctgtgtggccgtgtttgaacgggctatcagtgtcatttctgttgtgtatagatacaaattcataactgcaatattgtaatccacacacagaaatcgggtcaccccgcctgattttaagaaactcggatccccctgttcacgtcttggcttggattctctccccatcgcagcagcagattgaatggtgatggggactccaggtctgcaaagccagagaggaccacgctctggctccttagagatagagctgtacgtctttgtttaactccgactctcacacaaatggctcccttatttactgttgatgtctattccctactgaaaagaccatttatatatgtacagattatttccaggagtgtctctgaggggttgtttacttttgaaactgtgtagcccacattagccaataatcactaagtatcctagttagcctcctcccctatttggaaaccttctgcctcagcctgttgaatactgagatacagtaaacgagacgcaattgtttttagtgagaggcgttcttgcctgtgtgagtctgttttagaagaatctgggcgtattctgtgtatatactaatctccttgcctttgatggagccttgaacacggcactggctttcctgtaaccccccatagaccaggcacctgtggaggctccgtgccgaacctactgaactgagcctggtccagagcagcagagcttcaactttggcgtcttctcgaggagacgtatcctctcctttgtgagacgtatcctctcctttgtttttcctaaccaacggctgtgacttggggctccgccttctgagtgcttccgcttcctgatcctcacttaacagaggaagatgataaggaaatcgaggaaacaggatgtgatatccagccagcctgccccacagcaaggcagagataacacacacacagcagatgaccgcactgagcacagagcggggtcggacaatgggtaggctggactccagccttgggctaaatttagaagtaactaaaaataagagccatccggagtaacacgtctggggtttattgctgaggtgtctttaagacggtcatactgaatatttggtgacccagacacgagacccaagtagggagcaagaacaccccagggactctgaggcccacgtgagccccgatactgactgactgccttgcatgcaggcttgactaggcctcccccgagagccgtgactgaaggttgtgattctctttcaagccatggttatttttgaacctttttctcatataggagcttgaaccctgtaggtaggaacatcggactgatggttaaaaataggccttggatcaggttcttgggaactgtgttcattttgatgttagcccgttggccctatgggtcccgattcagcactctgtgcaccgtgtcctcgttacaaagtggagacaagaggacactgccatcttgctaggtctgtgcgatggttaaacgaacgagtcaacaaaatgtttgcactaatggtgagtatactagaaaccgtttccatcctaagccaaccgctgtcaccgagcccacgggaactgtctgactgataaccagtccctgctcctccctgcctgctcttccagttccaccagcagcaagtggctttgtgaatgtccccgtgcttacagtttctgggtggcgaggagttctgtgttcctgagcacagaggcccccgggagccctttgcacagctctgagtccctcagtctcttgtgtgagtgattcccatacgtatctagagttggatccccatagcccaccaaccaactctccctgttcgtagactcgtttttctgtcctgggttctagtgacaagcagagcctgataccatttcaggatccacgtcattgacattttttatgttggaaatctgttaactgaccacggtgtacattttctccttactttgtcttcccattgccttgaaagcccaggtctgcactccagcgtattctaagccctagttccagtctgtggtcatttgtggtccatagttctgaccgaagtccccctgttcctcccttcattcttctttcccaagcacatgtttatgaacacaccaggaagggagccgggacagaacacaagggtaggtccctcagtgcgtgtgattctgggaggatctgtgttgtgaaggggaggcagctatgagaaccggaaagggatgcttggatagagtttccaagaagccgctattcagttcttacgggattccttgtggtatgcatcttaatattttggctcaggtaattctttggtgtgaagttctatatatccctacaagctttgtaagacagtagtggcctgcccaatcccaagcaaaatgccctcagagactgcctctgcccccttcccctgaaaactctgccccagtcgagcatcatgggcaaggtgtgttaaaaggcacacgtgtgcctcgttcagctgtgcatctcagcatcagtgtgggaggaggggtacagagcctaagtttcttagaagcatcttaaacacgcatctattgtgttattaatatgctcgactgccacatcccttttctgtcgtgtgtgctaaggaacgagaggagagcttatttttgatggtggcttcttcaaaatgagtaactattgcggcataggatagagattaagaaatttatcaacagaacaaggctacttgccatagtaattatgcagaaaatcaacttctatgcaaattgtaaggattatcattagcatttgggggtctcctttcagaagttttaagcatatgtttagggccaggaatggtgatagaagcctgtcatgccatcacttgggtgacagtcttaagtaatgtagtaactagaccagccaagactatgtagcaagaccttcttagacacacacacatacacacacacatatacacatacacactctttcaaaagtctgtcgctcttaagttgtgttattagagctggcattcatttcggtggccatgcctctctgatgcagcctccctagacgactccttgactgactgaggtgaagcaggcaccttgcactatcccagtgaggagcctgcgcttctgtagtaaagacagcaggctctctagcaggacattcactgctgcttattcgataagtggctagagagagctgagcctgggtgactgacatccgccagtggcaccttagagcccattcagaccaggcccagattggagagcccgagacccttcagtaagctttttgcacatctgtctgctgctaagaggaagctgtgggccacagcgagcgcagatgcacctcctgcaggaagtagattccctggcatctggggcacaggcaaggccctgtaagactaaggcactcgggttcaaaggaggaattgtttgcaccaggcatggacagcgccagatctgcctggccagtcagtggctttctgtgctatacacagatggaaggctctgttttgttctgctgttccatggagatttcagagggagcagggagaggcaccacaaaagagcaagtgcttagctctgtcttcctgcaaacaaatctggtccagttcagtagatcccctgatacgcggccacacgcacacggtccctgtttgtttggcgataaagtttgcagccatgtgtgccttgtaagctgttggcacccttgctttctgtcgcttagcgcatggcctgtctctgtgggtcctgccggggtatggaggatgtaaacgccttgtcttgatttgcagcgagagttggtcgatggcatctgtcagattgagtgtctgtatgggaattaattttgcagactggggggagagggaggcgccttcattttatgtttttaaaagtccttagtgttggagttgaagagatggctaagcagttaagaatggttgtttatcttgcagaaaacccaggtttaatccccagcacccacatggtggcttacaactgtctgtaagagaactgtctcttccagttctaagagatcggataccctcttccagcctctcttgacgtcaggggtgcacacatcaatacatacaggcgaaacaccggtgcacataaaataataattttagaaatcattaatgtcctttatggtttactttctctacaaggtcatgagatcagtcatgcccaaattcgcagtctttatgactttttctgtaatcctttcattacatttctattttatgtacttgtgtatgtgtgtacatgatacttacacatttatcatgacccataggtcccactaagccgagggtctccagaggaggatttgaatatgggaagatgatgtctcctttctgtttggactgccatcctatgccttcccctcagcattcctgaagctggccattgtcacttcctctgtcctgtttctttggtcatcagcacacagccctgattggtttagtggttattgttgcagagtgtctcactgcaagacagccttggtcctctgtaacctggcagtgtaggccagcctcagggggctggagactgctgtgttcctctgcagcggctcacgcagctggtctgggactggtctgaggctgcgtgattgaccctgctcttgtctgcgtgtaactgggtctctgttacacgagccccatatacactgggtctccagtagggccctcctctccgtgaagcccttcgtcccccagaccgtggtttgaagtttctttgcacggtgggcaagaacggggagctgtgcaaccacttgggccctggctagaaatgtgtggattttcacttagactatttccactggtcaaagcaagccttgacccagcccagtgctgggctccaagtagggtaagagggactgagctcgtgacttttacaagccccagacctgtattgtatgcccttgccttctctcttgctagttgtatttgccacatatattttctgccgagagacttaaagcttaaatgcttgacatttctgtttgtgtccaccctgtgctggttttctgggaatggggtgagtagaagccagtgttttctttcctttattttttccttccaacatgggccgtcaaggcactccccgaatttgtcagacgtttgttcctttcctgactgccctggggcgtctgctcagtgctatacttccaccgaggggcaggggctcttctgagcagtctgttctatgcctgtgttatcttactgtatgtttatcttgggtttcctctggcagggaaagtacctcagtcttgttgttcttctgtactgtcttcggtgtcactggacttttatttaagaaaaaaaagttagttctaggaaagatgccgccagtgtggtcggcctgcacgtagctgtccctcggtgggtggctgcttgtgtaaatggctgatccccgggaccagggttatgaagtcactcgtgaatcaagcttagccgttataaacacctgcatcctccatgtcctaacggagcctgttggatttactcatttccagagcgttctgtgtgcttggttgtgctccccgtgtcttgactctctgtgttcttggacatttcgtggggctctgctttatactgtgtttaagtctttaatgtgttttggcagattcgtgtattctgacctgcttctgcgatctcatttctgtctctatgatctcatttcatttgtcttacttattctcccttctctttcctgaattgcatttttaaattccgtttataacttatgtaacctgtccctgatctttgactgtttgctcttgcagtttggaaatgaatttccccctccccattttattcacttaacatcccgatcacagaccccctttcctcttctcccactcctacccttacaaatccctccccttgctgctccctccccttctccttagaaggggagcctgccttggattacccccaccactgtggaacatctgtcccagcaggactaggcacatcctctcctactgaggtccaatcaggccgttcaggtagcgggaaggggatccaatggctgggagccgagaccgagatagcccctgccccacttcttaggggacctacctgaagaccaagctgcacacctgctacaaatgtgtagggggcctaggtacagctgctgcatgatgcctggttggtggcccaggctttgtgagcccccatggtcccaagttattgactctgtgcatcttctcatggtgttcttgacccgttgacttgttcacgtctctcccccactcttcctcctgactctccaggctcctcctgatgtttggctgtgggtctctgtatctgcctccatccactgctggacacttaggctaggctcctgcctgcaagcatagcagagtatcattaatagcgtcaggggttgactctgccatgggatgggtctcaagttggagcagtcattggttggctgtgtcctcagtctctgctccatctttgtccctgcacttctgtaggcaagacagattctgggttcgaggttttgtgggtgggttgatgccccccctcctctggaaattgggcatgattcttgggggggggcattttatttatttacatttcaaatgttatcccttttccctattctgcacccctcctgcttctaggagggtgtacccccgcccacccacccactcccgcctccctgtcctggcattccctacactggggcattgagccttcatgggatgaagggcctcttctcccattgatgtcccacaaggccattctctgctacatatgcagctggagccatgggtctctccatgtgtactccttggttggtggtttagaccctgggagctctggttggttgatattattgttcttcctatggggttacaaacaccttcagctccgttagtcctttctctaactcctccattggggaccccgtgattagtttagtggttggctgcaagcatccacctctgtatatgtcaggcactggcagagcctctcagagacagctatatcaggtttctgtcagcaagcacttcttggcatccacaatagtgtctgggtttggtgactgtatatgggatggatccctaggtggggcagtctctggatggcctttccttcagtctctgctccacactttgtctctgtatttgctattggacacgattcttaacctagaagaaaccaaagttagcttttctactgccgtctcgatgaataaaatgactgcgcagagccttaatcacccgcagctctgtttaatctccatgaggtttttacacccagatgtccttttggggagaggaggtggggctttgtattttaagccttacctgtgtgttagcattttattatttcagcttccataccagattttttaaaagattatatgtttattctttctcccctgaagtacatcttttagagatttttttgtgtgtgtgaggtaaatgtgcttaaccctgtttctaagaacttcttattgcagtctctgttttgagagtcttctgctgtttattcatgtgtttatttgtttatcggtttccagggacggaatttggagcctccctgtagctagccaaggactttactactgagctctacacgcccgaactgtgtgtgctctgtttgtttgtttgtttgtttgttttactatggtgtttgttgtgttgtgtttgtggatgtttgcctgagtgtatatctgtttaccacatgtgtacagcgtcctggggctgtagttacaggtggttgtgagctgtcgtgtgggtgctggggatcacactggttccttcagaagagcagccagtgctcttgactacagagccattgccgcagtcctctgtccggactttcggttggtcttcccgctcacattacagtgcctaggttttctttgctagaataaggcactactttcagacgggcctgagaatccgttctctttcctcgatttatttcttattcctcaactgtttaatttccgtggccatagttcttatttttagaaattctgttaatttgcatggttttttaatgcactttaaaaaaaaaaaaattccagcctggttgtttgacgttttgtatcaggtagctggattatgttccttgaagtcttctgccctcacagggatttgctctgtgtttgtctgtttgcttgcttgtggcatgctgggtaagagctttcacactgaattacattcccagccctctggtgtctggcaaggctgcctttggcttcctgctttagcatggcccacttgtgcacattttgtgatgccagtgagggttggcattactcccgtcccctgtacctgcaatgaaaatccagaaagaccttgtgctggtgcgttggtttgagtgaaaatgagccccgtaggctcacatctttgaatgtttggttctcagtttccaccgtgctttcccatcgtgatgatctgggctagctctctaaagctgtaagcaaaccccggttaagtgcctttctttgatgagttgccttggtcatggtgtctcttcacagcaacagagcagtaactaggacaaaaggtgatcatagtctgagggaagagaaccccatcttgctcccttctactctctcctcatgttgtcctgacccagagagttgcttcctttcatgtggcttcaggggtgtgagtcttagataggagtctgcatgttcaggttctatgtgagaaggggttgatgcgtaaggatccagtggtggacattggacctgagcattcactgggaacatgcagagttactaagaagtagaggctctcaggtcctgttccatgtctgtggaataggaatctatgtttaaccaatccccaggagtccagcagttgttgtcccccaaccccgtgtgtgtatgtgtgtgtgtgtgtgtgagtgtgtgcatgcatgaatttatgtgtatgggcatgggtatgcatgtgtctgtgtgagtgcaggagccccttgttgatggcaagaaccctcctccagattactagccctcgtgacctagtctgtctgaatttcactcccacctccaaatgccaccccattggcattgggatcatagttccaatgtaaggattgtagggaataactatttagcccatagcgatcactatatttgtccaacatataaaggataaagatgtatatgaaataccacagcagtgataatacaaattccatttattgagccaaggccgtgatgtgcactctgagactcctcagtgcacatacacggtgtatacacggtatacacaaggtctgtgcttaccttgtgccacctcactccaaaggcgctcaaccatgactattcatggtgacccctgctttcttctgctcttgtgtgacagggcacagcctctccagtgagcagggcagcagtgctgagacagctccagaagagggcgaaggaccggacttggagtcttctgatgagacagatcacagcagcaaggtgagagattttcattttcacatcccatgtcctgcaggatcacagctgacaggccaccccgacagctgtgtgtgctcaggcgggctctccgtgggatccagtgtttttacttctgagatgttactaaatagctggatatgaaatctaaattacagtctccgtaacaaacccatgtgggagaatatagggcagaaattacttgtaatgaattgaaggcctctttctttaatttctgccgcggctggagctccctgttaatgccgtaatttcaccccatttccttcttctgtcttcatttgtggaggatgaagcatcgtcctatgtgtgcataattgagtcggcagtgccttctgccacttaggggctctgtaatgagctgcatttgagcaatctgctctcagctcttgtccaaggtgcactcttctacgttaaagggaaaggaaacggtttttattaagccagttatagtgttctaaagtcgaatatggtgagcaaaaactttctttttctgctctggtgtaaaacagtgtgattgttgcccgggactctgcatggctctgtgctcttttaccaagtgctgtgtgcacagcagcccctttgctcctcaatccccatggccagaagacaagttctcagacggagtcactgtcttggttccttctctggtgctgtgataaaacaccctgaccatgatctacttaagggaagagaaaggtttgtttcatcctatgcttttcaggtcacgtctgatagaagttaaggctggatcctgaagcagaaacacggaagaggtgtttgctcgagggctcctgcataactagtttgcttccctccccatctctcccttgagtattcagacctagttggcctcgaattcatagaaatccctttgcctctacctctttagtgctaggattaaaagctccactaccatgtttgacttactaacttatttatagagagtccaggacaatctgcctagggattggtgccacccacggtgggctaaaccttcccacctcagtcaccaatcaagacagtgcctcacagacttgcccaaaggccattctgatctggcagtcccttctctcccatgactctggtcttgagtatggttaagacttaggctaataaggacaatcaccttgtaagactctgttggtctctccaactgcttagtctgttccttgacacttaacaagtcacttaacaaattaaacaaataaacaaatatcagaggccagagagggagttggatttcctggtgatataggttgttgtaaggggactcttgggcagtgggaactgatctctctggtcctctgcaagagcaggtgctggttggtttttgtttgtttgtttttggtcaggttgacataggtttgagtcatcttggaagtaacttcaattaaaaaaaaatgctcctatcagattggcctgtaggcaagcctttgtgccattttcttggttatgactaacgcagacccaactcactgttggtcctgcatatacatgcaggggtcctccatggtataagaaagcaggctgaggaagccgtggggaataaataccaccagacgcttcctcagtggcctctgcttcagctcctgacttccctcagtgatggactgtgtgactaaaagatacaaggcaaataaaccctttcatctccaagttgctttgcatggtgtttattacagcaaggaagtcctaagaccagtgctttgcgccactgagctcctgttagccagcacctgtggggaggttaagtttctcatttaagaggtttgaaagcagaaatttcaaattgtactggcagatcttggtggctgggctccactgtatattaatcaattaaagccacactaattttatcttttggatatatcgggtaccatttcatttaatcttgacaacactcctggaagagatgccacggagttctactttacagaggagagagacaccatacagtcctgtggtaatgagaggaaaagaaaaaagagaaaaagaaaacagtcttgttccaggccttgtgttattggtgccccctccatttaaatcacctgagaccaggttgttttgtgctggcattgaataccaggcttcatgaaagagggaactcatttatcagtggagctagaggccaattagatacacagccacgaaccatttaaccggcttcctaacgcttaatcttcttaaagtgcctcttgattaaggttaaccgctttggttgcatctactgtcttggtgtgtgaattcattcattttgaagtgtatgctgctgtaacctggaagagaatattaagcctcatcagaatgcacacacactcatcaagcagagagagccgtacctagtaaataaatagaaactgggtggcgacgtggctcagcaggttaaggaacccgacccctaacttgaccacctgatttccatccctgggacccacatgatagaagaggccgactgctgcaaattgtcttctaacctccacacatggaccgtaacatgccctgcacccaatcacgcctgcccccaacagaataatgaaataaattatttttcctccttgcttcgattttttaaaagacagggtcttactggcccgcatagagctaactatgttgacctgaccccactggcctcaaactcatagagatcagccagtcttctgggattaaaggtgtgcgccaccatggcccgctgtgttatcagtttttattctgctgggaaacgtgaggccggagaccccgtgattgtcttcttcctatttttttattttcttttttgtttattattattattttgctgtttccttccaaatgagctggatggagggtaaaagctgtggctgtgctctgtcttttaaatgcggtttagccatgcctggccgtttggagctgagcaagtgggtaatggtgagcttgttctctggagatgattcaggaatgtcgcactgatgggtggggttgtcacaaggcaggggaatgtagtcacctctccctttgtcactgcctccttcctctggtggcatggtgacagcctcaggtctcctcatccactgggtaacttactcccctttacaacttcttgaaaactcttgcttgtggaatgaaatgctaattaacctaggtcagaggagcccagcgtcctgtcctgtgttccaggctctctggtggctctggcttttctgagttttccagttagaaaatgtattagaataattttttttctggctttttcattcactaccacgtacccttttcacacatgttgtaatcacctgggaagtatcagttttcgtaattaagcatctgtaaaatgctgcagggcgcgcccagttgaaagacctggtctgtgtggtggggagcctcgaagttgcgctatctgggcacttttaatattcctgtgccattcgagacgctagccaatcagctgatcccactggctgcagggcagagccacccgcatctggggaggcgtgctgggctttgttttctagcctgctttgcctctctctggaacttttgttgttgagccaggtaaaatcaaagcatgagttcttgtccaagatgtagccgcctttgacagcctcccgggctggagtcgggaagcgggtgccgctctgggggggttgcggccaccgcattgagatgtggtcccaggtctgctcgggagagccagcatgggatatcctggtgagagagcgctctcagaaagctgggaagcggctggggctttctgagtattttaagaaacttcggcttcctttctgaacgcgcgcgcacgaggtgctaggaggaattaccatgagactctatctctgaggatgtcttcgctgtggaagatcaagcgcaagcccagggtcgagagcgacagggctggcgactctctctaccgcacacttcacctggtgagcgagcgccttgctgtctctttcctccgcccgccccgtgcactgctttgggggaagacttgcttccaggctctattaatgacgcttcagggcacccttgttaacgaagagcatagatcgcagtggatggggtccagtcaatagtttgcatgacgttgaatttgtattgggtctttatatttatttatttattttctttagatttatgtggtagacacctgtggcttttttatttcattttttaaaatcttcctaactgttactgatgttttccccctttccttttgtctattgagatttggaacgtattttgtgactgatccactatgccctttcccccccacctcccacctcccacctccgacctgggccggggaaagcagtgttcagcctgcagctgggactgcgcttgcccctttgggtcttctgtatgctgacttgcagtgggtaaggacagtttaacattagctgacctacttcagtagatccagctctggcagtaaacggcaatgctccgcaaagaaatgcagagcgggctcctggcaaggaacagctccacaaaagcagccttctgataccagtgctgacatcccagcctgtcatttagcgaaacaaactttgacagtcccgggcctagctgttccttgtttgaaatttgttagaagccacccaaaagcaggtaaagaattataggagctgtgaatgactgtaatgccctcgaaaattgtgaattttttttagcttcactattctcccccccccaaaaaaaaaccttaaataaaggctgtaagatttgaggccactcttccctcctttcttttaaatccgtgggcagtgttaaatcggtcagagtcagaacagtttcagaagttgctcatctgcaggcggacggtgccttttgtggttgcataacaggaaggcttaagcagctgggtggctccagttgatagagctttctcaggagtctgtcgcctcctctgttgtcctttcttttcatcttgaatgaacagggtggggggagaggatgttataaacaccaggcctccctcacgcaggccttgggaaagtggcctggctcctcctttgttgtcttgcctccttgtgttggctaattctcccttttgtctgggggcaggtacctctgccccttcaacagtttaaaactctccagtgcctgtgagtgctgctctttggtttctagggtgaccggtcctcaagtgcagagagtcttgtgttccctactggaagtacctgcaggctgctctcagtgggagcatgttgggaagttcccacccaggctgcctggctgggcacgtgtgtgtgtgtgtgtgtgtgtgtgtgtgtgtgtgtgtgtgtgtacagggctgggtgtgtgagcgacccatagcctcccgatagccatcgatggatgggcaggtcttcctctctccacgctgcaccgttgcaggtgacgtggacagggtccatattgaccttgtgcgttaggagtttggccacagtggaaggcagatgtagggagctggagattgaagtggccaaccatatgtgaagctgatagcttagagatatcccaaaggagcaccatttcatagtgcttgaaaggatattttgggggtgatattttaaccaacccaaattctcaaaccttatagtatcctttaaattctctccaaacagaaacacgctactcattatatctccgtgtattatgaaagttttattcgttttcacgtaacatgcattagcagtggggaaaaaaggcgcctacttcaagtcagtaccgtaggacaccggaagcctgtacctcgagttagtgagcggaatggtgtgaggggtcccgttcagcttcagagaacactcagaaatggccctgacgaggaaggagtggctgaagctgaggctaagctctctaaagggaaactgaggaacagcctcccttttatcttttgtggctacatcttgagactctcagtggatgcccgaagccatggatgggtgcacagtatcaattcctgcatgtactgggtttcttatgcacacagctgttgatgaagtttaatgttaaatcaggcacattaagagatgcatgacaactagtagagctattgtgcacaaaacataggaacataaaatacaatgcactttgataaaggttttgcaagcagggtgttccctggaagagccaagacaaatttagtgttttccactgatagtgcaaaactgagaaagtcaccccaaagataaagttggataatcacacttaatgtatgtgtatgctcacatatctagacacacacacacacatacacacagagagagagagagagggagaagggaggggggagaatagccaggctgcttagggaaaccatccaggaaggcctctggttgtggggatgcagagcggcagacagatgctgcgtcacagagaccaaggcgctcccttgtcccactctggcaaatggatatctttgggtgttcatgataccacggaggactcaaaacctcagaaatcccattccacaccttctgtatttagcctgcgcaaagtgacccattgtgatgggtcatgtcttttgggatgccctgcttctggtgtatgtgagaacctctcacgatgctggctgcttttgtgcagccgaggattctgtgtggagtggtacccggagtcacctgggtaaccgtctcagtgctgaaagtacaggaaagggtattttactgataattggggtttggtgctgggtgcgtttgtcatgggaactgtgtgtgaaggacagccagctgtggttgcagatggaattgtacaggcgcatggtgcacacagaggtgccatgggcgcctttgtttgttagcctccttagccacgtggcaaaccagagcagccccaggaaatttgtgttaggatgggggctgggcactcactcagcttttaccatcttctgcacgtgagattttctccagaagggcacagtttttattccctcgtaaccacactgtcttaattaccatcagatcattaaaaggggacgtgaacattatgttaggatgactatgtttgttccccttgtttctatttttatgacaaagcccaatttgactatatcaagatgaccccaagttagtgaagtcctatcataactaattccattgtttctgcacaaagaggctttggcggaaaccggtcgtctttcctttctagcaacctcactgagataacactcacgtagcgtacggagcagcccatttgggtgagccttctgtcacctaagggacattactcgtctaaaccccgcggttctctggaggatcctgaagagtacctgtgacaggcgacatgctctttctggcaggtagcggagttagcagtagccataaataagccatggcaattagaagagacttggagtgctagctgtgtgaagcacagtgcaggccctgagctttcctgccctgtgctgcccctcaggaacctttcgggaggttctgagtaactccgtgttctcttttgcatatgcaaatgaccttcactgtatctatagaccaggtcttagtgttcctgccttacttatttgagaaaaggatgctctccctaggtgataaaggaataatttttttttatccgcacctgaaatcaagacaacaaggggattgaagagaaatgtaaggaggaaggtatccacccaacgtgattgattcatgtgcatttgacagacaaacacggttcctcgctccaaaacagtgcctggggcagtccactccaccagacctttaacctcggcgcccaggaaacagaggcaggctagcatgtctgtgagttcaaggccaacttggtttacatagtgagttccagggcagcgagggctatatagtgagaccttgtccttaaaaaccaccccaagccaaatcccaggtccttccgatcccaccataggtcctgatctaaaggatctgagccgtgtcattggggtggtgaggagaacggggcttcagtggactaagctgctgagcccaccgggtttttcatcagcttacaccgcagacggccgttgccatcactctgtagggtggaactgcagaatcctaaacttgagatggagaaggcaatcttggggaatcattgcagccttcccctccgtcttgtcctgagctccacagtggcctgtttcagggtcactcgcctcctgttcagagaagaagctggaaacagcagaactcacaaaaacacagccatctgtctacacgtgggagtttttagtggctacagatagacgttgtcttccagcagtctacataagtggacagtgtatggaacagcttcgggactgaatgggaagccttgttctttgtgtcgggcagcactaatcccatgcctctgtcttctcctttgtcagtttctcatggaggggtccaggctttgggcttggggcattagcttggtgtcagagcacttgattcggaggcctgggtttcattccttggtagcatttctctatacactccctggctatccccatacataaccacactcccccacaccccggtaccccttaaaatcacaggctctgagatatgcttagtagttcaaatcccaggtccgctgtgccaccttgaatgagttacttaacctctctgggccccctttgtttcagctggtcagtaggagttatagcccttcttacaccctgtgaatgagtattaatataatagtgtgtccgaggggaagtgagctctcactagcattccttacattgaaaaatgccttgtgagggacggggtgtggggcagcaaggctccctgctgagaggtgacactatctgctgtgccccacagagcacagaacaggttgcagcgttttgccggagtctgcacgagatgagcccctctgactcaagcccgtcccctcaggatgccacaagccctcagctggcaaccacacgacagctgtcggatgcggataagctgcgcaaggtgatctgtgaactgctggagactgaacgcacctatgtgaaagtacgtttgcctcctgggtccccagcctcctcagccaccaaacccctcagcctcccagtctccaacccccccccccaacattccccctatctctctctctacacacacacacacacacacacacacccctcaaggccttacctacctttccttctcttaaggaaagagtgaagggggccattgcctgggtgtaaacctacaccgaggtccaattatggacatcgagatcttgatttcttttacagaactagaatattgattaacattgattgttagttattttatatattcatatgattggtgaatattaaatcatctttctgacttttctaactgtatgataagctgctgctgtatctgaatttagggcctggtgagatggttcactggttatgaacacagtggttatgaacctgtgcaagcataaggacatgagttcaagggaagggtcacatctgtttcctgtgtgttagtagttgttctgttcctaccccagtctgacagcagtgtgatccggttgctttctgtttttctaagacagggtttcaccctggagtccaaactggccctgaattgaaagtagttctgcctcagcctctcatatactaggatcattgcctaagcaaccagggctggccatctattttcactgcttctattttagtctaaacacagctaaatattgtacgtgacccgcaggcaatatccaaccttgctgcctgtttttgcaaataaagttttattgggacaccgtcatgtccattttgtatgtagctgcctagcctcagagtataacgtgagcttaagaattgatttccgaagtgcccgtggggcctgcagggtctgtgctccttgtagaagaagcctgcttcttcctgtggtaacgggctttcatccctggctcctcagagtccggaacacagtttgtcttccaatcccatagattccttgcagactttgaggtatgctaatgaagtgtccttccaatttgtaggacttaaactgcctcatggagagatacctgaagccccttcagaaggagacctttctcacccaggatgaggtatgggggggctgtcttgatcttgtgaggtactcactgctgttgacctgctggtgaggaacgggagatcgagcccttctaacgctgaggggtggtgcatcttgatccattgggtcacagcaagtcagatgcagcttgttaagtcttgatggacacttggaacaagagcgactgccccattctctaagagtagactctttagcactcagaaaccgtgcagtcaggcccaagtaaagttggtgaaccctcatgtgatacagggtagattgaattctttttcattttctagcttgatgtactttttggaaatttaaccgaaatggtggagtttcaagtcgagttccttaagactctagaagatggagtaagactggtccctgacttggaaaagctggagaaggttgaccagttcaaggtaagcccggtcctcaagctgcataaagccaccccgctgtgctgctgctgcctgtcttgtgggtcagggtgaatgcctgacgctgtgctgcaggcggagctctgaacttcaggagcgtgtctgatgctgtggacttgattaaacgtatttagctgccagtgtctcctttggaagcagcatagacctgaaggttacgttagctagtaacaaaattaaattagccgctcgggtctcttagtaaggagaatccatgctgtcctggggaactttgatggtcatactgatccctgtccaaatgcatagtgtccttgtagtcttagtgatgattgtgactatggccccgggaagggttactcacacatggctcatttcctctccctagttcatattccctggcaggaatttcctgtgccaaatttcaaatcaacaaaactcaatgatgtgtgtgctggcttacatgtcacacctcctgtacttttaacactaggatcaactgtgatgtcattgacaaagcaccacccatatttaaagtataggatctgagaatatatatatgtatgtatgtatgtatatatatgtgtatatatatatatatatatatattctcacatatatatgtgtgtatgtatacatacacacacatacacactcatacacgagcacatatacacacatgcacacacatgcacacacacagacacatacatatacacacacatatgcacacacacacacacacacacacacacacacattcccaagtgcccgtgaagccgtcaccatagtcaggacaatgacataatcatcttcaaaagtcagttcctgtcacttgtgatttcctgctcccacctcgcactgcctcccacccgcaggcagccatgataatgtgagctggttcacatccggctgatggaacttcctcttgggactctgcagtgcatgctagcctgtggggcttccacagtcctgcaggtgacagcacagggcacctgcagtaggagtctctcccatcatgtgcaacacatatcggagataacttttttctggttactgtatgataaacacttggtaaccattactgtaaacaatgtggtgttgttttgtgattcttcccagcttttcctgtttaatttgtgatcatgactcggatagtcacatcttacatagacctgtagccgtggccctggagaagtagaggaagaggtgaacatgaaggaagagacttcaagtctctgattaccgtggatgccagttacgtgtggtctaaaaaagacatttcctttattagtagatgacctgaacttcctccacactgtgtgttggataaactttgtgtctgtgagcccaggttatcattcacatgtaaagtcttaagcccttgcttggaacctaactcttaattctttttaaaaaatattgattatcgttgtcatgtgtgcggacacacgtgccacggcgagcatttgcaggccagctggccctccccctccacccttccacgggttccagggagagaagttcccaggtttttgtagcaggtagttataactggtgactcacctcgtcagttctgtgttttaattctaagcctaaatgaagaaagcccctccctgagcaggaccagagcctcgtggaccttctgaggctccctcctcattcatagggcaaatgggagggatagaaagctacacaccaagtgtatctgtcctaacaaggaaggtctgtcccggggtgattggtcacctcggggcagcgtgtccaggctgaagagatggtgcctgctttctacacttgaacgtcttctgcgttggtgttgcttaggttcttatctgctccctgggagacgacaggagacgacggaggggcttaaatgctttggtaggcctggagactggggttggtgcagagtgaggcagaggtgatctcctcctgtcctcgcctcgtctaaatgaggaggggcacgaacccaccgcacttcttctctttaatctagaaagtgctcttctctctggggggatccttcctgtactacgcggaccgcttcaagctctacagtgccttctgtgcgagccacacaaaagtccccaaggtcctggtgaaaggtaaggcagggtccggtggtttggacgggtgtgctggttgctggttcgcatatgtgtgggtggctgtggtggatggctcttggagagaaatccgagaggcgctggccggtgtgcgaggctgacatcccgtatgccacagtgttggttttgaggagagagatgtattactgtcttaaattcatcatttatgagttttctcacactggaagttttgactgagccatcttgggctcgattcagcaggtcttcctgcagtggtgtgcagcccccctttgcccttccttctcattcatttctgtgatgaccactgtgcttctcgaactccgttccggaaggtcgtctttcctgagcttgtttttatgcgtaggtgtgtgccagtggccatcagtgtgactaccgaaggttttcagttatttgtgaaaattactcttcttgtagttattcttacacagtccaaagtatagttcttatgttgggggagttctcttactgccccctccacttcctttctcctctcctcctctccctttcccttcttcccgctctttctcctttctacccacctctattttctccttctccctcccgtctcttccccatcccctctccttaagactcaaaccttgaatgcattatgcgtgtaagacaaacactgcctgcccctgtgctgcacttccggacacttcctttggaggctttgaagatatacaaactttctgcagcctccacagttcaccgtgtggtggtcagaggcaggcgaaagctgatctctcagagataacagaggaatggcagtcaccagaggttgagaaggactggatgggttcgtaggaagaggacggttagcaggttagcaagtagatagatagtgcagctaaaggggagggatacggtccgagtgcacagaaaggatctagcacaacgggcgggtagagcgctcaccctgtgtgcagagagccttggggttaagccccagctcctgcaagagtgcacggcggagtggtggtgagtaacactagttagaagaaagagtgttatcaacacatgtcggtgaggatgtttttgacgggtatctgatcattcccaccagtcatcgtgtatgtatatatgaagatagcacagcctaccgcatggctttgtgtagttactgcagatccattttaaaacctgtgtctggtccctgtggcagcacccatctgtaactccagcacgcagcaaactgagacagtaggtaggtctcgagttcgagaccagcatggactatctggctagacctggtgttttttttttttttaaatccagtttatttaaaggttttcacctttggtgtcagtgtaatgctcaccatatgtgtatcatcctctgctgcagacagaggaagtgctttggagggtggactcagtggaaggtgtggcttcagaaagatctatggaaacgcggatgcttcacctcagcgttgctctgtggttgccaagaaagcctctgctcatcaagtgcctggacgagtgacttccatgtgttgggtttatgtttgctgcccaagaggaccagcttcacttcatttaactttaggaaatactagagtaatgcaggtctctgggcgacaaaagaccctgcccaggacagcatgaggcaggcatgctgggagtgctagtctatgcagcagggttctcagaatttccctgtcatgtggtctgatcttaatccattttcacagtgctgtgttgcctgtgtgtgtgtttcttttaaaacctttattgattgataatcgttatcggaatgccagaatagccattattagaatttttgctctgtagtgaagttatgcaggcattatcatttttcaagcagttagtacttttaaaatcattcagttagattaaattttgcctgtgtagatttttttttctcaattcactaatattttctcgcatctgaaaagcatatcttcactcccaattgtcccataaaacagtaggcacgacctacatttttctagttgtcagttgagctgtgggttttttgagacccagagcttgtttctaggtatgattcttagcagactgagtcggggagggtaggaggactacatgtgttcgtgggaggactgcacatgttcagggaagcccactcctccctcataggaaattcggttcatgacttagtgactgagagctacgcggctgcacttgagagccagggtgggcttttcaggcaggaggttcctaggccctctctgaacataatcagatattagaagccagctttctccatgggacagctctcgagccagaccagcgtccctagcacctgtaggccagtgtcactctgtccttttcctccagggattttttttgaaaggagagtcatgatctgaacctgcagaatccgatcccccccgcccttctcccctcccccgctttgtttttaactccactccctcttctccttttgagacagggtctcactttgtagccccatctaacctggaacttgtcatgtagaccaggctaaccgtgaattcacagagactcatctgcccctgcctcctgagtgctgggatcagagacacagggtgctcttgattcttcctaacaggatttcaaagggctcagaagttgtggccctgtgggctccttttcctaggactgatgtctttcttgctgggtaaaagcagaagactcaccctttcatgaggcccttacacagtatctcaggtcttaggtaactaaccggggggcgggactgattttaataagtacacgagtagccactgccttttaggaaactgctcatttcttcaagagccatcgggttcctctgaatctgggaccacagagggctgaatctaacttctgatgagcaaacgcaatcctggtgaagactaaggtcctgagtatgaaggaggagtttgtcctagcagggatgattctgtgtactgatctgctcaaaagtaactgagcagaagaaacatgcaagggagggtgtggaggagcggctcgctcgtcacccgacaggcccacagtggggcagccaccccgccagcacagtcacacgttcaccagcccagacgttgttgacatccacagtgaagttacagactgtccctccctttcttttgctttattttgcttccccctgcacctggaagccgttagccatttccccaccatcctggttaggtacccctctccacggctcccctgggccacctgccatcccagctgggacacagatgaaagtgagactgggcaagaggttcttgccagagctccgagctcagttggcgtgatccccaccatccagaagctaagagctggtaggctgcagagctgacatcaggctgtccgaggatcctgcctcattccactttaaggagatgtaggatgctctttctcttcctgttttagtcttttttttttttaatgttgtttttatttgtttgttttttctgcttgtttttaaattcctcccaacactgaagtgtttagaagcgtgggaaccaggaggggattgcagctggaggtgctatgattattgcgtggtgaggctcgtagatcagaggacatccacagtttgtcagtctcaggtcccaggagaaggaggcagccatgcagtgtcccttaggggaagcactgggattgttcaggacatgagggaatagcatgccagcttgaataacttcagtggcctctgggctggggcagatgctgagccaccagtgtgacatctgccccagcggctggggacctggagcatcagcacctcctagaattagcaggtgtgggagagatgctctctgaattgattctttcaggcaaatcatgtgctatcttcaggagctggctaggcctgcgaagattctccccaaggacagtaagagtcacatgtcagaatggcaagacatgctcaatatgaggagggtgaccaaaaccctttaattagtcttcgtccctgtcaatcacacacgaccgacaggcccatcccgtgcgtgcctcagcaaagacctctccggctccccagagcctgctgtgcccagtcctataaaaagaagccttgaaattagatggagtgtgcctgacggcctgtgttctgtcccttccagccaagacggacacagccttcaaggcgttcctcgatgcccagaacccgaggcagcagcactcatccacgctggagtcttacctcatcaagcccatccagagggtcctcaagtacccgcttctgctcagggagctgtttgcgctgaccgatgcggagagcgaggaacactaccacctggacggtgagcagaagttacacatagacacgcgcacgtgagcacacacagagacacacacacagacatatacatatgtgtgtgtgcaaacacatacatacacatccatgcattcacacacgcacatggatacacatacacgtacatacgtgcacgtgcaaacacatgcacatgcatgcatacatacacatgcatatgcatacacacacacacctccaccatgcctgtcccagcctaacctctgcacagctccttctcaatgcctgtgttcttttagtggccatcaagactatgaacaaggtcgccagtcacatcaatgagatgcagaagatccacgaagagtttggtgctgtgtttgaccagctgattgctgagcagacgggagagaagaaagaggtaaggagtgttgttgaaccccactccaccatccccctaaccccccctccctcccagcatgatactctctttttatgaggtgcgattgtttccgttggctggtgttgtgcaacaacacttttcctcaggaaatacaaacacccgacctcaaaaaaggaccccatgatagacaacaatacagacaccaccaaagtctagtttggcgaactagtgagttttattggggttacatataggaatatgggtaaggggttacttacaggagcagaagtgactcaaggacagctgtatcaccaaagcccaccccagcatggtgacagctaacaaaagctgggaacctggagctcattgcacagcctgcaggcagctcaacaggttggacagtgtcctttccaagtgactcagttgatctaaacctcttccaggagctggtttctgcttcttcagggcagctggtctgggctaagaatattcactgcatcctgacttgtctgagagtgactctgagctgtctattttgcttacggggggggggggggtgttacggtgaatcctgtcagtttcagggacttcctgaagctgttttgagttatttaatgtctgtcttgaggatcttcctgggagatggaatacttcaatcttgaggaaactgctatacatcaggactattgtctttaaagccccatatgtcatagtttcttttactgtcactttgaggaaatactcagaccatagcacttagaaggaggcttatgttggctcacagttcagggtaaagtccatatggcagggaagtcacagtgacagatgcttgaaggagctggtcacattgtgttgtaagtcagagagcattacacacatactggtggtcagttcaccgtctccatttttcccagtcctgatccctgcctctggttaagatgaccctccccaccccttataaagtatcccccaaggccagccttaacctaggcagttcttcaggtataccccatggtgtgcctcctacgcatcgaactgactatgctcaaggctacacaagaatctttatttttacctgagctgtttcttggtagagtaaacatgcatctggtgttctgttctttgcctttggggtctctggttttcatttgtactgcatgaggaagtgagcaccctaacccagtgtgggctatttctgtgaatgcctctggggtgtgactctgagtctccgggttagggtattagttttcatcaagtaccagccacatagctagtgcctagcaaattagaagcagccaaggggatattttcccttagtggtccattgctccggaggcttcaaagggagaagaaaccaaagggcagctggagacccaagggctgcgattgggcagagtgagcagcactgagcctcttggtactgtcactgagcgcaaagttgtcaggacgtctcggaggtgatggcagtccatttttacccatgcctttcaaggcttctttctacaacccagatagatccttgcaggagccagattgctgtcttgggtatccatggcaggactgtagaagttcttgaggtctgatagagatgtgttatgccaagttcataacccaagtcatggctgtgccccagctcacatgggcagggatctagattctaccgcatctggcaggaggtgactagaacatcatgtaacagaaggtgagtgtcacatgtacacaacacacacatatgcacctaccacacacacctgccatatacatgtgccatacgtaccatacacatacatacaccacaccatatgtacatatataccacaatcacacacatgtaccacacacatctaccatatacatatgccatacataccatacacatacatatacaccatatgtacatacataccacaatcacacacatcatatacatataccacatacacaccacagtcacattatataataatcacatacatgccacagtgacacacacacacacacacacacttttgtttcctggaggaaatagagtttaaccctcctatcacaaagactttttaaagacaaactccataaggccgtatctcagcacatctcctgagtattaattatgtctacactcttccacgggaggtatgtggagagccatggtggagactggttcccttagctgcagatgtcctgccagtttgctcagtgtgtgttacttaatatcaataagtgtattgatatgaacgcttaatatttttattcttggtaatgatatgccccggcaataattgccataattactagaacccctgtcaagggaggcatgttcagtccgagaggtgatcctcgtcagagcggctggcagctgggcctggagaatggaagtgagctgcctggtgctgaggcagctgccgggttgtcgctgtgcatgaacacagtcggaacccctagaggtcacatgctgcaacgtcagtagacgccatttatccttcagaagtgaaatctcacgttttctaggatctgaagcatggccttaaggagagaattggacttaatttttacagacccaaagaattgagttgagtgatcagccggtggctgcctgagaggcgtctctgaggaacttacggtggtctgtagcacttacacgtaggaaagatcatggagttttgggacaagcttacctagaccccagctgattctctcacctataatctcgttgcagagagcacctgcctggggaaaggggagcactaggttttgtttttttttttttttttctttttaattggacataagtaaagttatttgggaagaaggactttggttgataaaatgcccgacaggttgccagtaggcaaatctgagggcattctcttgattaatcattgatgtgacagggaccagtcttcagcaaaatagtacctaccatttctgagcgggtggtcctgagttctctaagaaaacaggctggacaagccagtatgggggactcctccatggcttctgtttcagttcctgctccaggtccctccctgtcttacgttctctccaaactcccttttgtcacagctggtcactcaccacacgtggtggccacacctttgctgttggacatgacaacaaaaccagagtgaagttttgtttctttcttcatggtttcctgggtagttgagctatgatttttctcccctagttgaattttttttgccttttgaatgggaaggaagcacattggctttttatatctaaattggtagcatcgcagtttgaaggctttgggaccatcattgaataatctgagtattgcgaaactgtaacagttaatttgatattcaaggtggctgttaactgccacatgggcagatggcaaatctggaccgcagcatggttcaagtctcaggaaggatggacagggatggtgtgcatcgcggcacagtgtttggaacagtttgcagtttannnnnnnnnnnnnnnnnnnnnnnnnnnnnnnnnnnnnnnnnnnnnnnnnnnnnnnnnnnnnnnnnnnnnnnnnnnnnnnnnnnnnnnnnnnnnnnnnnnnnnnnnnnnnnnnnnnnnnnnnnnnnnnnnnnnnnnnnnnnnnnnnnnnnnnnnnnnnnnnnnnnnnnnnnnnnnnnnnnnnnnnnnnnnnnnnnnnnnnnnnnnnnnnnnnnnnnnnnnnnnnnnnnnnnnnnnnnnnnnnnnnnnnnnnnnnnnnnnnnnnnnnnnnnnnnnnnnnnnnnnnnnnnnnnnnnnnnnnnnnnnnnnnnnnnnnnnnnnnnnnnnnnnnnnnnnnnnnnnnnnnnnnnnnnnnnnnnnnnnnnnnnnnnnnnnnnnnnnnnnnnnnnnnnnnnnnnnnnnnnnnnnnnnnnnnnnnnnnnnnnngatatgaacgcttaatatttttattcttggtaatgatatgccccggcaataattgccataattactagaacccctgtcaagggaggcatgttcagtctgagaggtgatcctcgtcagagcggctggcagctgggcctggagaatggaagtgagctgcctggtgctgaggcagctgccgggttgtcgctgtgcatgaacacagtcggaacccctagaggtcacatgctgcaacgtcagtagacgccatttatccttcagaagtgaaatctcacgttttctaggatctgaagcatggccttaaggagagaattggacttaatttttacagacccaaagaattgagttgagtgatcagccggtggctgcctgagaggcgtctctgaggaacttacggtggtctgtagcacttacacgtaggaaagatcatggagttttgggacaagcttacctagaccccagctgattctctcacctataatctcgttgcagagagcacctgcctggggaaaggggagcactaggttttgttttgttttttttttttaattggacataagtaaagttatttgggaagagggactttggttgataaaatgcccgacaggttgccagtaggcaaatctgagggcattctcttgattaatcattgatgtgacagggaccggtcttcagcaaaatagtacctaccatttctgggcgggtggtcctgagttctctaagaaaacaggctggacaagccagtaagggggactcctccatggcttctgtttcagttcctgctccaggcccctccctgtcttacgttctctccaaactcccttttgtcacagctggtcactcaccacacgtggtggccacacctttgctgttggacatgacaacaaaaccagagtgaagttttgtttctttcttcatggtttcctgggtagttgagctatgatttttctcccctagttgaattttttttgccttttgaatgggaaggaagcacattggctttttatatctaaattggtagcatcgcagtttgaaggctttgggaccatcattgaataatctgagtattgcgaaactgtaacagttaatttgatattcaaggtggctgttaactgccacatgggcagatggcaaatctggaccgcagcatggttcaagtctcaggaaggatggacagggatggtgtgcatcgcggcacagtgtttggaacagtttgcagtttatttttatttttttttttttaaagatttatttatttattatatgtaagtacactgtagctgtcttcaaacactccagaagagggagtcagatcttgttacggatggttgtgagccaccatgtggttgctgggacttgaactctggaccttcggaagagcagtcgggtgctcttacccactgagacatctcaccagcccccagtttgcagtttaaagtgtatggctgtctctatgaggggacctgtctttcattgaatgttcatcggctgctgacccctggcaactgcgagagccacggtgctgttgggtgagcacaaggctaccactggccgctttggctcttcatgcccgcttaggtctaaaacaaaacccctggtctgagtctgtttagcacttgatcgtgagaagcgcccgattggagtctgaccacatggtctctgaggaggccattgtccgtttcacatgtgtggcaagaaacctccagacttctggttctgcttccccgggtctaaagtgaagtacgggtttctttaaaatgaattggaaaagggaagccagatcattctacctctcgctgaggactgaactcactggtgtgactctgggtgctctggtggggcgtctgtcatccatcctccttaagaaactatcttcattgaatataaacgttttaactatgtagactgtgaaccctggcttagccccctttgtcatctcattcctgatattttgatagataaatatagaacaaaggaaaaattagaacttttttcttcatgtatattaatgaatgaatgctgtatggggtgtttctaaatttaagtgtgagtatatcctggtaaacctatgttcagatagaaatgtctaaatcaaaaaatatatttaattactggacaaactcactgcaagttaaaacattagctaaaactatggtaagtcaaagccatctgtctataacacacaacatgaagctttggttctcactcacacacacacacacacacacacacacattgtagaaatgccaaataaagctatctagtgtctttaagtgcatactaagcaagcgtttttaggagcaatatttccatgaactatatttgaaagcgacctcctcccgtattgtataaccacatgcagaccttcataggatgacaccaagagtaagtaagcttttcccgcctctggtttgcaggttgcagatctgagcatgggtgacctgctcttgcacaccagcgtcatctggctgaacccacccgcctcactgggaaagtggaaaaaggagccagaattagcagccttcggtatgtgtcagaagggggcgccggggatgggaaacagctgactcggttttccaaacaagaatattccctttccgagggatgttttattataacaaagctaattatagcctgctgctccaaataaatacaaatgaatataagttaaaccttctcgataaatgggttcaatggtagccactcagcttcgtgtgtgggcatggctctgcacatacaatctgggaagtgatcttttttttaacatcttattttaaaaaataattttacctgcttgtccatgtgtccttacaaaataatgaactgatagtaaacgaagaaaagccgaatgaaggatcaagagtaaactgtttccaatagctcagatcctggcccttcatctcctccgtggctcagctctgctctacttaggaggccatttctcagctgaactattgtggtgtctccccaggttatcagggggctcccaatcgtgttattagtgctagtgggagtagacatattggtcatttaccttgataatctatttcagggaggtcaggtggaggtcagataggagaatctcaccctcatgttttctgagggagaaaacctaagctggcacactgggagactgcctagttcaggagctgccacttgtggcttgcaagtgtgaatatggcctcttgggggctgttcctgagcaccaagtgcttagcagcccctgctgctgttttttatagtgctttttgtccctatccttccctagaaggctcaggctaggaaatctagcaggcgctgccctcccctggcctgatgtttttggcttgggaaggggcagtgcttactgctttttttttttttttcctcactgaatgttcttccttccctgatatattcccagatggacctgcccagtcatattcaaagcagtgttaaatactaatgtttattgaccactcccacttcagagctacttaactctcattaaggaattaggccaaaaaggtgaattctagttcctgagttacaaataccgtgtgtgttagatgtagagagagtgtgtgggggcttaattcacataaatataaatcacttaagcagttattagaggcattgcactagttagtccttcagctactacagtgagcacagctaagtttaaaccttaaaacaataaagctaaaatacagtagaaactcaattgctgtgagttaccgcagtcaagcgtggcagcctgcgatcttctgtaatggcccctcctgtttctcccttgcagtcttcaaaacggccgtggtccttgtatataaagacggttccaagcagaagaagaaacttgtaagtgttctcccttcgtcccatattttccaagtgtccccatctgctggtctagttctacccttatcggcaaaaagcctcccatttcctctgtgagtgtccctaagttctctggaggggaccccagtctgcctgcttccttcagacaggttcctgtgtggagcacatgagcagatacatactgagcctccccgtggccagaacgacttttgcctgtctgtctgtctgtctgtctgtctgtctgtctgtctctccttcttgtatgaggtttattttctctttgttgtctctttccctgaccctctcctctgcgtttaattcgcaaggctgtttgcacagcatcatattggtcacgcagcctctggaatctggcagggagcggaagtgtgtgaggctgacgtgatgttcctgtggctagctctgagatccccgagtctgtcactgatgtgcagagtggggagctggttcaggcagacgaccttgcccttgaacaacattctgctgctctcccgcaggttggctctcacaggctgtcaatctacgaggagtgggaccctttccggtttcgccacatgatccctaccgaagctttgcaggtccgagctctgcccagtgcaggtaagcactggcgtctgccaggtttccatttctctcctcctccttctccttctcctccttctccttctcttctccttcttcccctcctccttctcttccttcctctcctcctcttcctctgccttcttctcttttatattaaaaagctgggtatgtttgtatatgcatgcatgtgttatgtcacttcctggggaggtaagaggacagcttgcagcagctgcttctcccccatcacgcaggactcagagttttcttaggccaccatgcttggccacaagcacctttgctgctaagtcatctctctgggcctgggttcccatttcttacccatgtgtgagttatgtctatattcattcctggtctgtcctcctacctcttatcttctatgcttaagttaattcttccctctatctccattgcctcatattaacacacacatacacacacacacacacacgtatacacacacgcatatgcacacaggtgcatacacatatgcatgcacacacacgcacacatgcacatattctacccatatacatatgtgtgtgtgtctgtctgtctatctatctatctatctatctatctatctatctatctacacatatatatatattaactgctgagccatctccagcccccttttttcattccttaaaaccttaatacagtatattttgatcatattcactcttccccaacgcctcccagatttccccccatcactaccccttcccaaactctgcacttcttcttcttaatcggtaacccaccaagtccaatttgtgctacgtctgtactcaggagtgtggagactaatctaatggaacatggtggccacacccttaaagaaaaccaactctcttctcagaagctggactctcagtagctgctcagctaggggtaggggctgcgagctcccatctctatgctagagtattcactacactgcctccttttaaacagcttcattaactagtgaatgaatgaatgaataaatgaatgagccgattaagcgagcaagcagagtaggtgcatgggattttctttagaattgttgtaggggattgcaaacttgatttacaggtaaattggcaggtgctttgggatcgtaggtctattgccgctgtggtagtattttgaggtttagacacttaaatgctagtgctgtcccttttaaaattgatatatgtgtattagagttttgtttgctggtttgctatacgccatatgcatgcagttcctgaaaaagccagaagagggagccagacccccggaataacacttgttagtggccatatgggtgctgggaagtgaagccaggtcccctgggagagcatcggagtcttttaaccaatgagccacctctctagccccccccccccgatgtcttttaatgccattgtcttaaagttaatcggtttatgttatctgatcatatttcctcagaccaggtttataaatgtggaggctgatttctgtggcaggcagtgggcttcttagccaggaattttgccttggttaaggacataacttcacattctgaagacaaagcagcctttgtagtaatgacatttcgtcctcccaacctctgcctttcattcaaatcaaatttaaagccttgcagataaaagcatattttagttgagttataaagactggtcacaatgctacattatggggtacattccagtggattcaagagacagtacttgaagtttctagatttttgtctgagtttggggaagtttggcagatagagcattaggtgatgtagccataggggaggattctgaaccactggggaagtcggagcctacaggtgtggagccccttacccaccacttaacacaatgttgggttgttggcatgacatagcttcagtccttggagctggccctctgtttccatgggttccacacccgtgagcccagccaacagtagctggctctgtgggtaaaggcacttgccatcaaccccgacgacccgagtttcatctccagggccctgtggtggaagaagacagcaggctcacatgtgttccccagctttttacgcgtgcctgctcacagtaaatccgtgaatgttaacagatagtttaaaagaatacagagagcagcagcttcgctcccttaacgcacagctctgctcttgtttagtggacaacttggggaggctaggagaggaatgttttgttttggttttcaattgttttatttatttacattccaaatgttgcccctgacctgacctggtccctcctccaagagttcttcatcccatctccctcccctttgcctctgagagggtgctctctcctcaccatctccccctccaccccctccattcaagtctacaggattaggcgcgtcctctcccactgaagccagacaagctctgctacatatgtgccaggggccacggaccagcccacctatgctcttggctgctccgtggcccctaagccaagtctctgagaactcttaggggagtccagattacttgattctgttgttcttcctatggggttgccatccccttcagctccttcagtcccccccaactcttccatggggtccccgaccttagtccagtgctgggctgtgagtatctgcatctgtctcagtcagctgctggtagagcctctcagaggagccgtgctaggctagagaagcctgttttgagtcaccaaggtaacctgtttgggcgttagctgtggtcaaatagagagaggactccaacacataagccagtgctggcctccccttgccctgtcctggtgaaggtgcgcactgggctccgaggaaccattggccccaaagaacttagcgcctacctgaactagttcagcccacgaggctggggagcagggtggctttcctcagtgtggctcatctgcgaggccatctgcgagatcttcatggtgttgtattaagatctgtgtgtgtgcgcactcgtgcatgcttatgcgtgtgtgtgcctgtgtgtgagagagagagagagtgagcatgtgcgtgttctgtaagcccctcagtctcttaaccacttccccctctctccagcctctgttctgttcttcacagcacacactgagctcgtagcgtccgtctgtctctttagctcagggtggaggtgaagtgactttggtctcaagttgctttgcactgtcttaagcagacaccaagcatgaaaaattcctctgtaaaaaaaaaaataagtaagtctgctaaaatatgccaaacctgacattattttaacttatttccagatgcagaggcaaatgcggtatgcgaaattgtccacgtgaaatcagagtcagaagggaggcccgagcgggttttccacctctgctgcaggtgagccgggctctgggaagttgggccccgccccagggaccttcttttctgtctctgcagatgagcccatgcctcctctcagagaagttaatacttgccaacgaactgtagctgtgtaaattaaaactactttcattagaatgcagacaggaacctggtttgcttactcgctttctgaaaggaagcgggcactcttttctgtagagcagggcgagctgtaagggtccctcggagagttttgtctggcacttggcttcacggcctcttcgcactctgagaatctgctgtgagagggaataggggctgaaggtcttaccagcagtcctaagctttagagacccagcacagggacactgaccacagtgatcacagggacatgtagagggactcctaaattgttgatattgattgtccccgctccttccttcctcccgtgcttctgcctcctcctctttctgtctcttcctctagaatagtgtatgccatcctgttgggcttgaaatatgacccatctttaattagtcatgtgcgttcagtgattagctcaatattcatctagttcttcacgtagagtaccaatatgctacacactgcctgcagtgataacagaattcataccattgtcatcactcataatatttttaatgtcattgctaatataacaagaagacacatttatcaaacattaagggcgcaatgtacctcaggttcattgcttccttagtcagcttgaggggcagccaggactgacaagaggaggctctgcccagagcatcacagaaaatgcactgactatgttcagtgtctgcattcagatgggccacagcccacgagacatgtttgccatatcatctctgggcggcggcggcggcaggggtggggcagcgtggtgcttggggctgatctccagaaaactgtcacgcgtgtgcgcatgagtgcaccacatagatacacacacatatatgtatgcacacaaatgttgaacttgaagaaaaagaactctcacctaaaagatcctttgctgccgtgagaattgggactgtttcacaggtcttaggcacagtttttaggaatctatccttggtacttaatgtgtgcatcaggacccgggaagaaagagcaagctcactgggagggctgccaaggtgacagtcttgcggcccattttctccttaatatcattctacagcaagtacgtaagaccgagacttagtgtcaagagcagaattccggcaacctcttggtacccaacaacttcatcgtttatctattcattattggtgggactctgtcctaatatggctctagaggaggctttgcaaaccgtgaggggattgcgtgttttacctctgccacgaggaggcagctgagcatgggaacgggggtccgtagcctctttccccttcgcccttgcagatgtttatttagctgcacccgacggcatttctaagttccctccgttgagtcctggctccctaacgcgtgtaaatcttcttttcatagttccccagagagcagaaaggactttctgaagtctgtgcattcgatcctgcgagataaacacagaagacagctcctcaaaacggaaagccttccgtcagcccagcagtatgtcccctttggaggcaagagattgtgtgcgcttaaaggcgccaggccggccatgagcagggcaggtactgtggggattcagacctacaagatccctgtcaccccagctccactgtaggtctccagggggcaggagttaggcatggtctgggggtggggggctgatgtaagtagggtcgtcttctgtggtgtgaggctcatgccttgtctccttcctgatggcttcttctgggaatcttcccttcgcttgcggttcctcccttccctcagccttccctcagccttccctcgctggctcccctttggctggcacgctcctctctcattggccaacccaatgcatcctcttttggaaggggttctcttagcctgcttggggaatgagagtcgctgcttggcatggcagccagctttgttcagtagaaagcggtgagttgaggtcagcaaggtcatagcccctctactgagaacacccgtgactccacagtctagcggaagacacagcccgttctcagcgaggatgcggacgtgctctggcatggcaggccagttgatgcagaagaagttgaccctcacttcgtgcctgtaactttagtttcagcctcagggttagtttagggaaggtttcagctgctattgggaaagaagaaagaggagtttaactggtccccagtaaattctctggagcacttatcccatgtctctggagcaaagaagaagggacaccattgccaccacgtgcagatggcaatagagcaagcccggaagagtgttattttcccagtgctggacttgcagagagagccatccacatcctaaccctcctttcctaagatgcagcccagaatttttcagggaggagtccagtagaataaatttcctctacacacaggcaaacaaacaaacaaacaaaccgatttctacttttgacacagtcacctccccaccagtcctcagtcgtgttgcagagatgcaggaagagctgtgacgtcataggcgtaacctaccaaccctgactcggcctgttacaatcctaggtaccttgagattgactaatggatgtcggtggagcctacctgaagtctgttctccattcagttgattgaaaacctagaacccagaatcccagacccccaaactgcaaggctctccaaacagcctgagagccatgcatacatccatgcccacagcctctcaggaagtactctgtaaaaacaggctgttgtttcatggcaagagagaaatttgttgaagtgttttttgtgctcctcttgtttgctgaggggtgtttaatcgggaaatatgcaccaatctcagggaccctaactaccactggctcttgctgttaacttaggaacctaaattcaaaagtgcatttacaaaaaacaaaacaaatccaaaacacatatgcactcacattttgtccataggatgtaccaaagtttttctcctgagatgatcttagaaataaaaaacaaacaaacaaactcattacctgctctaaagcattacgaatgccaagagaaagcctcaacatgacagcctgttggatttgtataactgaaagcatatttgtttgtttgtttgttttcctgccagagggctcattttttggctgaaaaacatttctatccaccctgcctttgacgtaactcactaccattggagagtctgtgttccacaatttccaaaatggcgctccagtggttcaggcaaagactgcctctctgagacggagagagacccactaatgccatctggcttattaaatgtccttttcataaaaggcagacaactgtaacacactctgcatttcacaagacccgtgtgcagtctggagagcgtatagacagataccccgcctccatacttactctaaagtgggactacttcagccaataaccgacttaaaatttctcatagtctataatctttttatggaaaatctgaggcttatggagcagctaaaagaatccatccctacatctatattccataattagtattttgctttattttcactgctgcccacccatctgccatctgcgtgcaccatcttaccttggcacgtttcagaggggcagccatgactgcacttggcccctaaatcccaccatgaagaccatgctcacgtttccagtagagcagtagtgaactgatgccattcagatgtagcgattgagtagaacaaggttggactgcagtggggttaggctcgaagcgaagacgacacttttaggagaagtagctttccatttcctcccatgttgcctggagtttctttctattgtgcggtgcccatctggtctgtgtgtggagataatgggactctcagaacctggacagtaggtgtctcctggcaatgctgaagcagcctcgctgcttttgagacttgggttccaggacagctgctcctgactggtgtgtgcgttgctccctccatggaaaaagcctgtgttgcatttcacctcagagtgtccgatgcaacagttacttcggcctccggggagaagtggcattgtttccaccagagccattgcgtgcgtgcgttcttgcgtgcgtgcgtgcggcgagtggtgggagcattcattgcttgattgattggaatctctatttgtttgcttgcctttagtaatcctggcttcctggagggcagtggggtaaatgaataaaccccaatattttaccttggagtaactttctgtggcgcactgttcctcagtgctagagtggcatctgttatttctcttacgccactcaggcacactgtagttttaattgcactgtagaagagttggcgattcacagcttggagttagttaggactatggctctgcttagcctcagaggtcatgttggaccttatcagaaagggtacaaagagtggactggaagggcagtgtctctgacaactgacatccagtctccaagaatgtgatgccctcaatctaactgtgggtgcttacgtccctggaaagcactgtccacagcacagtgctccagagagcacagcaatgcttcacagcaaaacccctgaaggcttctctcaggcttatcaaacacctctctcctggctacgtgaccctcggataaccctggggtaagctctctagctctgtgccgtgggcacagtcgtgttgaggacagtctctggcccaatgctgagaacagtagacatctgtgtttcctgtcatgtgggtacacgggttaaagtagattatttctttctccataacccagagcctctagtgtttagaccctcactcctcacttagtctctgggcccgtccttagatctgaagatcccttcagatgtctgagcaaagtagacaccactgggacagtaaggggtagaccccaaactcctgaagccccattcaccttttatgcttcttttctttgcttgctgggttttcatctcacagtaaagcatgtgggggtttatttttatatttttgtgtgtgtgtgcagtgtctgccccaagcaagtctcttgggaggaggaggcggcgactggcccgaaacaggtttaccatcgattcagacgccatctcagccagcagcccggagaaagagccccagcagcccgccggtggtggggacactgaccgatgggtagaggaacagttcgatcttgctcagtacgaggagcaggatgacatcaaggagacagacatcctcagtgacgatgacgaattctgtgagtccctgaagggcgcctcagtggacagagaccttcaggagcagcttcaggctgcctccatcagtcagcgggcccgaggccggagaaccctcgatagccacgcctcccgcatgacacagctcaagaagcaagcggccctctcgggcatcaacgggggcctggagagtgcgagcgaggaagtcatttgggtcaggcgcgaagactttgccccctccaggaaactgaacacggagatatgacttccttgtccctgtagagaatatgtgtgtagatatgatgccggccccaccctcactccgcccaccctcctgtgccgtccacgagaatgtccccttaggtcgcactcttgacacagattttggcagctgacttgggtctgaagccatgtagccacccaccttcatcattcttaatgacaccagagagaatcgttcagaatcccagacaaacaagcttgagtcctttcctctgtgccaagggctttcttttatttattctcaattcatcggggcctgaagatttagaacgaagaaccgatagcgctagaaatcaaaccgtccccaccccagcagtcaaaacagggacaggacggtgtgcacagattgtcccagctccacctctctaaatccagtctcgcagctgaggaacaaccaccttcaaacacacatagagaaacggaacagatggaaacacctgtacagcgtgcagtgttctgactcctcccctcttcagcgtccgagaatatctgtgtatcttaagaatgtgtgaggaaagggtggtcgtctctgtacgatgagcctttattcttattttttttttcttctgttcatgtctatagctggtcttactctgtgtcagtgtctggaagctctagttttgcagagaattataaagatgccaaactcttggaaaagagatccaaatttatcacttagagggagagagaagaaaaaaaagaaacactattttttgtattttccttgagatgcaggggcacaaatagatgagaattttacagtgttaggtgtaactcagtctgaaaatgaggatataaccttttgcagagcaagcggggcacgatgactttatatttatacacaaacggccaacaagaagctcatgctaagaataaacttttctgagaaacagattttttttttaaatgtatgaatctatatttgagatgggagtttggttggattacagggacaggaaatggggcagtgtgtgcgtgtgtctgttgttcatggtgggggaggggagcctcctcatggggttgccatggcaatcattggttttcccatcaaacttgcatcttcatccacagatgacctccccttccctgagagtccacggcagaatcttagaacctcttcagagacgtcctttgtggttaatatttcctccatgccaatgagacagggtaaactcgctacggggcctaaccttctaaatggatgtccagacaggaagaacaaaacccattctagcactttcatttttaaaaaaaaaaaggtttatagctttttgttccgccctcctcctccccatttcacaatgtccattccttaagaagggtttaaataatatgaaaactttgtttttggaaataaaaaaatatctatatatctatatatctatatatctatttggtgtttgatacatcggtaggtactttaaagacctgaattttatagtagctttagcaattatattttataagaatcagttatgactttatatttccagatagagagttcagaacaccatgctctaaagcctcccccaccccggcttgctttcctgctttcctgacctctcccccccccccccctttcgggtttccagggctttgagcttgatcttttgaaagttttattctattacagtttttgctattaccttctggttttcttaagaagctttagagtggtttctatgccctttgtaccactgcactgttcgtaacatctcggggtcgattgcgtccggatgggaaactgaagcagaggtgtcggatagtcacattttctggtctccctgcaacacgtccatcggaaaaaaaaatactggaaagtctggtgcttagagagggtgccattgtctcttgtatatacggtcatgatgtgtctatgtcaaaagttcttatatatttcttttataagctgaaagaaggtctatttttatgtttttaggtctatgaatggaacgttgtaaatgcctgtccaacaataaaagtactgaaaagg

SEQ ID NO: 36 - DNA, 6967 bp, Mus musculus
ggtttctggcacattctcccagactcaggtgagaccccgatgggcaccccgtggggcaggtcctgacacacgtcccgactccagccactgacaccattgccagcctcagtctctaaatgccacaccgctcctggggccagttgggctgggcaccactgttgcctttgaagaccataaaaccatgggaaacgcagaaagccaaaatgtagaccacgagttttatggagaaaagcatgccagcctggggcggaagcacacttcacgctccctgcggctgtcacacaagacccggaggacacggcatgcttcctccgggaaggcgatccacaggaactctgaagtgagcacccggtccagcagcacgcccagcatcccccagtccctggctgaaaatggcctggagcccttctcccaagaaggcgccctagacgacttcggggaccccatctgggtggaccgagtagatatgggcttgagacccgtatcttacaccgattcttccgtcactcccagcgtagatggcagcatcgtcctcactgcagcctctgtgcagagcatgccagactcagaggagagccggctttacggggatgacgctacgtacttggctgagggaggcaggaggcagtgtccctatacatccaatgggcccacattcatggagacagcgagctttaagaagaagcgctccaaatctgcagacatctggcgggaggacagcctggaattctcactctcagatctgagccaagaacatttaacaagcaacgaagaaatcttgggttccgcggaagagaaggattgcgaggaggctcgggggatggaaacagaggcgagtccccggcagctcagcacctgtcagcgagccaactccctgggtgacttgtatgctcagaaaaactctggggtgaaggctaatggaggaccgaggaacagattctcaagctactgccggaatttggtgtcggatattcccgatcttgcaaagcataagatgccaccggctgctgccgaagagactcctccgtacagtaattacaacacgcttccctgtaggaagtcgcactgtctttccgagggtgccaccaacccacaaattagccttagcaagagcatgcaaggcagaagagcaaaaaccacccaggatgttaacacaggcgagggcagcgagtttgcggacagtgggatcgaaggggccaccaccgacacggacctcttgtccaggagatccaatgccaccaactcaagctactcgccccccacaggccgagcctttgtgggcagcgacagcggcagcagttcaacaggggatgctgcgcgccagggggtgtacgagaacttcaggcgggaactggagatgagtaccaccaacagtgagagcctggaggaggctggctctgcgcacagcgatgagcagagcagcggaaccctcagttccccgggccagtcggacatcctgctaacggctgcgcagggcactgtgcggaaggctggagcgctggcagtcaagaacttcctggtccacaagaagaataagaaggtggagtcggctacccggaggaagtggaagcactactgggtgtccctgaaaggttgcacgctctttttctatgagactgatggcaggtctgggatagaccacaacagtgtccccaagcacgccgtctgggtggagaacagcatcgtgcaggctgtgcctgagcaccccaagaaagacttcgtcttctgcctcagcaactccctgggtgacgccttcctcttccagaccacgagccagacagagctggagaactggatcaccgccatccactctgcctgcgcagctgccgtcgcaaggcaccaccacaaggaggacacgctccgcctcctcaagtcggaaatcaagaagctggagcagaagatcgacatggacgagaagatgaagaagatgggggagatgcagctgtcttccgtcaccgactcgaagaagaagaagaccatcctagaccagatcttcgtttgggagcagaacctcgaacagttccagatggacctgttccgattccgctgttacctcgccagcctccagggcggggagctgccaaaccccaaaaggctgcttgcttttgcgagccggcccacgaaggtggccatgggccgcctcgggatcttctccgtgtcatcttttcatgccctggtggcagcccggactggtgagatcggagtgagaaggcgtactcaggccatgtccaggtctgcaagcaagcgaaggagcaggttttcttctctctggggcctagacactacctccaaaaagaagcagggacgcccaaccatcaaccaggtgtttggagaggggactgatgctgtaaagagatctttagagggaatatttgatgacactgttccagatggcaagagggagaaggaagtggtcttacccagtgtccaccagcacaaccccgactgtgacatttgggtccatgaatatttcactccatcctggttctgtctacccaacaaccagccagccttgacggttgtccggccaggggacactgcgagggacaccttggagctcatttgcaagacacatcaactggatcattccgcccattacctgcgcctgaaattcctaatggagaacagagtgcagttctacatcccgcagcccgaggaggacatttacgagctgctttacaaagaaattgaaatctgtccaaaagtcacccagaatatccacattgagaagtcagacgcggccgctgataattacgggtttttgctttcttctgtggatgaagatggcattcgaaggctctacgtgaacagtgtcaaggaaaccgggttagcttccaagaaaggcctgaaggcgggggatgagattctcgagatcaataatcgtgctgctggtaccctgaactcatctatgctcaaagatttcctctcacagccctccctgggcctcctggtgaggacctaccctgagccagagggaggcgtggagctgctggagaaccctccgcaccgagtggacggccctgtggaccttggcgagagccccctcgccttcctcaccagcaacccagggcacagcctctccagtgagcagggcagcagtgctgagacagctccagaagagggcgaaggaccggacttggagtcttctgatgagacagatcacagcagcaagagcacagaacaggttgcagcgttttgccggagtctgcacgagatgagcccctctgactcaagcccgtcccctcaggatgccacaagccctcagctggcaaccacacgacagctgtcggatgcggataagctgcgcaaggtgatctgtgaactgctggagactgaacgcacctatgtgaaagacttaaactgcctcatggagagatacctgaagccccttcagaaggagacctttctcacccaggatgagcttgatgtactttttggaaatttaaccgaaatggtggagtttcaagtcgagttccttaagactctagaagatggagtaagactggtccctgacttggaaaagctggagaaggttgaccagttcaagaaagtgctcttctctctggggggatccttcctgtactacgcggaccgcttcaagctctacagtgccttctgtgcgagccacacaaaagtccccaaggtcctggtgaaagccaagacggacacagccttcaaggcgttcctcgatgcccagaacccgaggcagcagcactcatccacgctggagtcttacctcatcaagcccatccagagggtcctcaagtacccgcttctgctcagggagctgtttgcgctgaccgatgcggagagcgaggaacactaccacctggacgtggccatcaagactatgaacaaggtcgccagtcacatcaatgagatgcagaagatccacgaagagtttggtgctgtgtttgaccagctgattgctgagcagacgggagagaagaaagaggttgcagatctgagcatgggtgacctgctcttgcacaccagcgtcatctggctgaacccacccgcctcactgggaaagtggaaaaaggagccagaattagcagccttcgtcttcaaaacggccgtggtccttgtatataaagacggttccaagcagaagaagaaacttgttggctctcacaggctgtcaatctacgaggagtgggaccctttccggtttcgccacatgatccctaccgaagctttgcaggtccgagctctgcccagtgcagatgcagaggcaaatgcggtatgcgaaattgtccacgtgaaatcagagtcagaagggaggcccgagcgggttttccacctctgctgcagttccccagagagcagaaaggactttctgaagtctgtgcattcgatcctgcgagataaacacagaagacagctcctcaaaacggaaagccttccgtcagcccagcagtatgtcccctttggaggcaagagattgtgtgcgcttaaaggcgccaggccggccatgagcagggcagtgtctgccccaagcaagtctcttgggaggaggaggcggcgactggcccgaaacaggtttaccatcgattcagacgccatctcagccagcagcccggagaaagagccccagcagcccgccggtggtggggacactgaccgatgggtagaggaacagttcgatcttgctcagtacgaggagcaggatgacatcaaggagacagacatcctcagtgacgatgacgaattctgtgagtccctgaagggcgcctcagtggacagagaccttcaggagcagcttcaggctgcctccatcagtcagcgggcccgaggccggagaaccctcgatagccacgcctcccgcatgacacagctcaagaagcaagcggccctctcgggcatcaacgggggcctggagagtgcgagcgaggaagtcatttgggtcaggcgcgaagactttgccccctccaggaaactgaacacggagatatgacttccttgtccctgtagagaatatgtgtgtagatatgatgccggccccaccctcactccgcccaccctcctgtgccgtccacgagaatgtccccttaggtcgcactcttgacacagattttggcagctgacttgggtctgaagccatgtagccacccaccttcatcattcttaatgacaccagagagaatcgttcagaatcccagacaaacaagcttgagtcctttcctctgtgccaagggctttcttttatttattctcaattcatcggggcctgaagatttagaacgaagaaccgatagcgctagaaatcaaaccgtccccaccccagcagtcaaaacagggacaggacggtgtgcacagattgtcccagctccacctctctaaatccagtctcgcagctgaggaacaaccaccttcaaacacacatagagaaacggaacagatggaaacacctgtacagcgtgcagtgttctgactcctcccctcttcagcgtccgagaatatctgtgtatcttaagaatgtgtgaggaaagggtggtcgtctctgtacgatgagcctttattcttattttttttttcttctgttcatgtctatagctggtcttactctgtgtcagtgtctggaagctctagttttgcagagaattataaagatgccaaactcttggaaaagagatccaaatttatcacttagagggagagagaagaaaaaaaagaaacactattttttgtattttccttgagatgcaggggcacaaatagatgagaattttacagtgttaggtgtaactcagtctgaaaatgaggatataaccttttgcagagcaagcggggcacgatgactttatatttatacacaaacggccaacaagaagctcatgctaagaataaacttttctgagaaacagattttttttttaaatgtatgaatctatatttgagatgggagtttggttggattacagggacaggaaatggggcagtgtgtgcgtgtgtctgttgttcatggtgggggaggggagcctcctcatggggttgccatggcaatcattggttttcccatcaaacttgcatcttcatccacagatgacctccccttccctgagagtccacggcagaatcttagaacctcttcagagacgtcctttgtggttaatatttcctccatgccaatgagacagggtaaactcgctacggggcctaaccttctaaatggatgtccagacaggaagaacaaaacccattctagcactttcatttttaaaaaaaaaaaggtttatagctttttgttccgccctcctcctccccatttcacaatgtccattccttaagaagggtttaaataatatgaaaactttgtttttggaaataaaaaaatatctatatatctatatatctatatatctatttggtgtttgatacatcggtaggtactttaaagacctgaattttatagtagctttagcaattatattttataagaatcagttatgactttatatttccagatagagagttcagaacaccatgctctaaagcctcccccaccccggcttgctttcctgctttcctgacctctcccccccccccccctttcgggtttccagggctttgagcttgatcttttgaaagttttattctattacagtttttgctattaccttctggttttcttaagaagctttagagtggtttctatgccctttgtaccactgcactgttcgtaacatctcggggtcgattgcgtccggatgggaaactgaagcagaggtgtcggatagtcacattttctggtctccctgcaacacgtccatcggaaaaaaaaatactggaaagtctggtgcttagagagggtgccattgtctcttgtatatacggtcatgatgtgtctatgtcaaaagttcttatatatttcttttataagctgaaagaaggtctatttttatgtttttaggtctatgaatggaacgttgtaaatgcctgtccaacaataaaagtactgaaaagg

SEQ ID NO: 37 - protein, 1575 aa, Mus musculus
MGNAESQNVDHEFYGEKHASLGRKHTSRSLRLSHKTRRTRHASSGKAIHRNSEVSTRSSSTPSIPQSLAENGLEPFSQEGALDDFGDPIWVDRVDMGLRPVSYTDSSVTPSVDGSIVLTAASVQSMPDSEESRLYGDDATYLAEGGRRQCPYTSNGPTFMASFKKKRSKSADIWREDSLEFSLSDLSQEHLTSNEEILGSAEEKDCEERMEDRQLSTCQRANSLGDLYAQKNSGVKANGGPRNRFSSYCRNLVSDIPDLAKHKMPPAAAEETPPYSNYNTLPCRKSHCLSEGATNPQISLSKSMQGRRAKTTQDVNTGEGSEFADSGIEGATTDTDLLSRRSNATNSSYSPPTGRAFVGSDSGSSSTGDAARQGVYENFRRELEMSTTNSESLEEAGSAHSDEQSSGTLSSPGQSDILLTAAQGTVRKAGAVKNFLVHKKNKKVESATRRKWKHYWVSLKGCTLFFYETDGRSGIDHNSVPKHAVWVENSIVQAVPEHPKKDFVFCLSNSLGDAFLFQTTSQTELENWITAIHSACAAAVARHHHKEDTLRLLKSEIKKLEQKIDMDEKMKKMGEMQLSSVTDSKKKKTILDQIFVWEQNLEQFQMDLFRFRCYLASLQGGELPNPKRLLAFASRPTKVAMGRLGIFSVSSFHALVAARTGEIGVRRRTQAMSRSASKRRSRFSSLWGLDTTSKKKQGRPTINQVFGEGTDAVKRSLEGIFDDTVPDGKREKEVVLPSVHQHNPDCDIWVHEYFTPSWFCLPNNQPALTVVRPGDTARDTLELICKTHQLDHSAHYLRLKFLMENRVQFYIPQPEEDIYELLYKEIEICPKVTQNIHIEKSDAAADNYGFLLSSVDEDGIRRLYVNSVKETGLASKKGLKAGDEIINNRAAGTLNSSMLKDFLSQPSLGLLVRTYPEPEGGVELLENPPHRVDGPVDLGESPLAFLTSNPGHSLSSEQGSSAETAPEEGEGPDLESSDETDHSSKSTEQVAAFCRSLHEMSPSDSSPSPQDATSPQLATTRQLSDADKLRKVICELLETERTYVKDLNCLMERYLKPLQKETFLTQDELDVLFGNLTEMVEFQVEFLKTLEDGVRLVPDLEKLEKVDQFKKVLFSLGGSFLYYADRFKKAFCASHTKVPKVLVKAKTDTAFKAFLDAQNPRQQHSSTLESYLIKPIQRVLKYPLLLRELFALTDAESEEHYHLDVAIKTMNKVASHINEMQKIHEEFGAVFDQLIAEQTGEKKEVADLSMGDLLLHTSVIWLNPPASLGKWKKEPELAAFVFKTAVVLVYKDGSKQKKKLVGSHRLSIYEEWDPFRFRHMIPTEALQVRALPSADAEANAVCEIVHVKSESEGRPERVFHLCCSSPESRKDFLKSVHSILRDKHRRQLLKTESLPSAQQYVPFGGKRLCALKGARPAMSRAVSAPSKSLGRRRRRLARNRFTIDSDAISASSPEKEPQQPAGGGDTDRWVEEQFDLAQYEEQDDIKETDILSDDDEFCESLKGASVDRDLQEQLQAASISQRRRRTLDSHASRMTQLKKQAALSGINGGLESASEEVIWVRREDFAPSRKLNTEI

SEQ ID NO: 38 - DNA, 365877 bp, Homo sapiens
agaactgtgcgccaaataaacctcttttctttgtaagttacccagtctctggtgtttttttatagcagtgcaggaacagactaatgattctgcaagtctccagtgcagggcggcaccagctaaggtgacagaggaggggaaaatagtgattttatggaacttatttcagactttgttacggacagtggaggccactgatttagtgattgtctcaatccctggctcactcgctgatctttgactgtactgggacccctttcctgctactttttctctccacttccggttgttttccttgtgtgcccctgctaaaggtttattttccatgaggccctcagactgacgggaggccagctgtgctccaggggccaccaagaagccaacatagtgacctgaaaattactccaacagcaaaaaaaaacaaaattaaccttaaatcaacctgggatctaatatgcaactcagcaacttctaagccatgtttttttttttttttttttttttttttttttttttttgagatggagtcttgatctgtcccccagcctagagtgcagtggcacgatcacggctcactgcaagctctgcctcccaggctcacgctattctcctgcctcagcctcccgagtagctgggactacaggcacccgccaccacgcccagctaattttttgtattttttagtagagatggggtttcaccgtgttagccaggatggtctcgatctcctggcctcgtgatctgcccgcttggcctcccaaagtgctgggattacaggcgtgagccaccgtgcctggctgccatgttctttttgtaagtaactaattctgggaagacaacagagtgggaaaaccccagaaaatgcctgaaactccacagcatctttctgtttaccgaggccattcccttgccagctccagaccgtgcatctttggtaccagggtcaggtgatgcctggattgagtgaggggtgaggaagaatttccacatttgactggagtgcgaagacttgcagcagatcagatcaattactgtaatgacggtgaaaatacctgcagaggacaatttctgatgcgtacgccatgccaagctctgttcaaagcattctgcttatattaatccttaatcctccactaatcttgttagctagatgctgttattatccccatttaacagatgagaaaatctatgtgaaatgtgcatgtctattgtaagtttacgaacattaaattacagaacccatcttaggatcaaggccatgtagtagtaggctcatgggccggtggtgccagtatctggagcacagaggcctctttgttaatggtccttggaaactcactgaaacatgcggggcatgtgacagccagcatctattgagttattgctgcacaccagacactatttttatttatttattttttttcagacagtcttgctttgttgctcaggctggagtgcagtggcacgatctcggctcactgaaacctctgccccctgtgtttaagcgattctcctctctcagcctcccgagtagctgggactacaggcatgtgctatcacacccagttgatttttgtatttttagtagagatggggtttagccatgttggccaggccggtctcaaactcctgccttcaagtgatctgcccgcctcagcctcccaaagtgctgggattacaagcgtgagacattgagcctggcccagacactattctgagaactttgtttgaatttatttaaacctcacagaaacacaggtactatgattatgatcatcctgatttatggatgaggaaactaagtcacagagagatgatataacttgcacacggccgtccagtcagttcctggcaagaccaagtgtccaccgaggctccccatccaggctcttaaccacaacagccttgtgcctctgagctgaggacactgacacagctggaaaagggaccacagcatgggagatggagatcattgtagggctccctgtggactcaaggctcccgcccctctcaggtggcattgcctggctggcttgccactccctttattttattattattattattattatttttgagatggagtttcgctcttgttgcccaggctggaatgcaatggcgcaatctcagcttactgcaacctctgcctcctgggtttaagtgattctcctgcctcagcctcccgagcagctgggattacaggcacgcaccaccatgcctggctaattttgtatttttagtagagatagggtttctccatgttggtcaggctggtctctaactcctgacctcaggtgatccacccgtctcagcctcccaaagtgctgggattacaggtataagccaccttacctagcccttgccactccctttgggcaagggccctgtggaactgggaagttgattccatcaacctcccttgtcacctgctgtttgtttgtacccgtgatcacccctgcagggaagaaaacagagaagagctctgatactaatcccaacacacatctgaaggcatttactgggtcttggtgacatgcaaagcacattttctccttgaccccacaacagccctatgaggttcattctgaatgatcgtgtctgtgtggtaaaggggggaaccgagcctagtgggagggggccgctgatcctccccacacagctcctgaggggcggatctgggctccggaagggctgaccgatgcccaccggggcaggaatctgcagacagctccgggcttcgttgtgcccacctgggcatttcctgtgtggtccgctctgctgttctcttgtctcctgagtattttttccctcctggtttgctgcctggagactctcagcagcccggaggttttcagaacaacacgatgagattttccccagccccggaactgcttttgctgttgcttgtgcatccgacacctgctgggctgatgagctttgcaaatgtcactgagtgttgagagggagctgtgagagatttgcaggaacgcaccatcccagctgccccctcgggggtgggtggcggctggaggggtggtgctggtccttcctccagcccagctccccttggcaagggaagaggtggcattcctgctcatggagctgacctgggtacccaccacctgccggttcctctctcttctcctggggagacagtggctgtttctacatggttttcccggcagcattgtctcttaaaatttttggtcaccttttgaggatatagaaacattttgaccttttcctttctggatttctcttttcagaaaaatgcacacatacacacaattttgtgtagaaaattcgaggttttagccaggtgtggtggctcacacctgtaatcccagcactttgggaggctgaggcgggtggatcacctgaggtcaagagttcgagacgagcctgaccaacatggtgaaaccctgtctctactaaaaatacaaaattagccaggcctggtggcatatgcctgtaatctcagctacttgggaggctgaggcaggagcatcgcttgaaccctggaggtagaagttgcagtgagccgagatcgtgccactgcactccagcctgggcaacaagagtgaaactctgtctcaaggaaatataaataagtaaataaataaataacatttgaagttttcagcctggcgtgggagctcacacctgtaatcccagcactatgggaggctgaggtgggcagatcgcctgaggttaggagtttgagcccagcctggccaatatggtgaaaccctgtctctaccaaaaatataaaaattggccaggtgtggtggcacacacctgtagtcccagctacttgagaggctgaggcaggagaatcacttgaacctagggggccaggggttgcagtgagctgagatcgcgccactgcactccagcctgggtgacagagccagactgtgtctcagaaaaaaaaaaaaaaaaaattcaaggttttcactgacactcgtaacactcggagcctcctcagacagtgcgccacacctgcccctacccatgcctggaaatctagcttaaaaatcaggttctctgtttcttccctctccattgagggcaaagatagaaaattgattttttttttgtttgtttgttttttgagatggagtctcgctctgtcacccaggctggagggcagtggcgcgatcttggctcactgcaagctctgcctcccgggttcacaccattcttctgcctcagccttctgagtagctgggactacaggcgcccgccaccacacccggctaatttttttgtactttttttagtagaaatggggtttcaccgtgttagccaggatggtctccatctcctgacctcgtgatctgcctgccttggcctcccaaagtgctgggattacaggcgtgagccaccgtgcctggccagaaaattgaatgttaaattctctgcccctcttcttcttctactgttgtcagtcagaggcttggcaggaaagtatatcgcacactcacaggtgacagaagagagtcacgagagaaagtgttttcacggagttaagaaaagcagacaggctgggtgcagtggctcacacctctaatctcagcactttgggaggctgaggcaggaggattgcttgagccctggagtttgagaccagcctgggcaacataatgagaccctttctctaccaacccccctgctgcttcccagattagccaggtatggtgtggtggcgtgtgcctgtagtcccagctacttgggaggctgaggggcaagatcatgtaagctcagcacgggagttcaaggctgcagtgaactatgatcgtgccactgtactccagcctgggtgacagaatgagaccctgtctcaaaaaaaaaaaaaaaaaaaaagggattggttccactggggcagcaggaggaagcccctttgttccctagaactgaagcctgagagaaaaagggacttgtgatcgagagacctccaggtgctgctgtggggaggaagcagggggtcagtgttcctactgtcttgaccctcttccgacagtcatccctgcccgtggtgcctccccagggccagaaagtgtggaagggcagcctcccaggcacagatcccagaggaaaaagaggaaaagtcatctgaagggcaatctgagagtatttagcacgtcgcccttctaggttcgttttttttgagatggagtctcgctctgtcacccaggctggagtgcagtggcaccatctcggctcactgcaagttccgcctcccgggttcacgccattctcctgcctcagcctcccaagtcactgggacaacaggcacccgacaccacgcctggctaatttttttgtatttttagtagagacgggtttcaccgtgttagctaggatggtctccacctcctgacctcgtgatccgcccgctttggtctcccaaagtgctgggattacaggcctgagtcaccgtgcccggtcttttttttttttgagaggtagtctcactttgttgtccaggctggagtgcagtggtgtgatcttcgctcactgaaacctccaccttgcgggctcaagcgattctcctgcctcagcctcccaagtagctgggattacaggcatgcaccaccacacccggctaattttttttttctattttttcagtagagtcagggtttcaccatgttggctaggctagtcttgaactcctcacctccagtgatccgcctgccttggcctcccaaagtactgggattacatgcgtgagccactgtgtgtgaccaacccttctggattcttaaataacctctgcccagcaagtagatcgcacttttgagatcaagaaaggcagctgtgtcgttttatttatttctactttttttttttttttaagagtttcgctcttgtcgcccagggtggagtgcaatggtgtgatgatcctggctcactgcaacctccacctcccaggttcaagcaattctcctgcctcagtctcctgagtagctgggattacaggtgcccaccaccacgtccagctaattttcatatttttagcatagacagggtttcaccatgttggccaggctggtctcaaactcctgacctcgtgatccccccacctgccttggcctcctaaagtgctaggattacaggcatgagctgccgcacctggcctgtttttacttttattattattttagaaacggatattctgtaaccttgaaccctggactcgagcaatcctcccacatcagtgtctcaagtagctgggactacaggcatgccaccatgcctggctaattttatttatttatttattttatttttatttatttattctttttttttttgagatggagcctcactttgttgcccaagctggagtgcagtggcccaatcttggctcactgcaacctctgcctcctgggttcaaaggattcttctgcctcagcctcccaagtagctgggattataggcatgtgtcgccacgcccagctaatttttgtatttttagtagacacggggtttcaccatattggctaggctggtctcgaactcctcattacctgcccacctcggcctcccagagtgccgggattacaggtgtgagccactgcgcccggccttatttttattttttaagaaacagggactctcactctgccactcaggctggagtgcagtgttgtgaacgtagttcattgcagcctggaactcccggactcaaatgatcctcttgcctcagcctctgaagtagccagggcaacaggcatgtgccaccacgcccacttaatctttaaaagaagtttttgtggagatggggtcttgctatgttgaccaggctggggtcagctttaaatgctctcctttggatttggggattatggaactttgtttaactttgctagggtagtttagtaattctgttagtgatcgcaagcttcctggtttttgccagaggcttttaaatccagtcttttagtttcagtttttttttttttttggcctattttatttatatgcctgtcattacaaggccactttgaaaagcctcattgtcttcatgatgatgaatcaatctgcctcaatatcacagggaattgtatataaattgctcacatggcattatgtgcaaaggtagtttccccttattgtacggtagcttgatgtttagaaacggccatttctagattttgcaaaaaagcgcaattatacgtgggaagaaatggagaaactagaaggtgttatgtggtgtcaggtattactgggcaccagctacaactcaccccactgagcttcgggccaggacgtctggattctgctctttgctctggctagtacttccctgttgccttgggcaccacctcgaggtatcaggacctctgttccctggagttactattactgatgaagacttgctccttgaccaaacttgaatccggcttctctgagcccccttctcagctaggccgttagcccacccccaccttccaggccttcccagttagttttagcaagaatcctgctaaagttagagagctgctagatgagtttagagagatatcctttattctggatatctgatcacacctgatcaagttccttgtccctatccttgttgtctaagtcaacctgccttcagcaggaatcctgttaagttgatttagcaagaatccccctgactttaatatctcttcttagtaatttcccctccacagacgcctccccggctcattggctactgatctccagacgtctttgctgtatttggagttgagcccaatctttctccctattgcaatgaccttgacacctgttgttgtaatcctaaataaagtctgccttaccatttgtaaaaaatgtcagaataattttttgctttgacatgacccatcataaaaccttggaattgattgggatcctcaaggacctctagttcaacctcgcctgaatatcaagacctgtaagaaggccgggcgccgtggctcacgcctgtaatcccagcactttgggaggccgaggcgggcggatcacaaggtcaggagatcgagtccagccaggccaacacggtgaaaccccgtctctactaaaaatacaaaaaaattagccaggtgcggtggctcacgccggtaaacccagcacttttgggaggccaaggagggcggatcatgaggtcaggagattgagaccatccaggctaacacggtgaaaccccgtctctactaaaaatacaaaaaattcgctgggcatggtggcgggcgcctgtagtcccagctactccggaggctgaggcaggagaatggcgtgaacccgggaggcggggcttgcagtgagccaagatcgcaccactgcactccagcctgggtaacagggcgagactccgtctcaaaaaaaaaaaaagaagatcactactcactgccaggggcccagtcactgcccttataggctggttctccttgttaagaagccctgccttggtctcaagcaagggctgaaatctgcctcagcttttactcattcatcttaattctgtctttctttgaaagctgttccctcccttattaagagaatatattagcttttaaccaagcatagtggcacatgcctgtagtcccagctacttgggaggctgcggtgggaggatcgtttgagctttggagttcaagactacagatcttgccactgcactctgcactaaaaataaataaataaataaaaataataaaataaaataagaatatattagctttgaaaagaaaaatttttttttgagacaggttcttgctctgtcgcccaggctggagtgctgtggtgcaatcacgcaatcaccgttcactgcagccttgacctcccaggttgagggaatcctctcaccgcagccttcctagtcgctgggactacagttgcataccactgcaccaggctgatatttttcatttttatttttaaatttatttttatttttttaggcagagtctcactctgtcccccaagctggagtgcggcggtgccatctcagcttattgcaacctccgcctcctgggttcaatcaattctcgtgtctcagcctctcaaagtgctgggattacaggtgtgagccaccgcatctggcttttttttttttttttttcccgagacggaagcttgctctatcacccaggctggagtgcagtgactcgatcttggctcactgcaatctccgcctcccgagttcaagggagtctcctgcctcagccacccaagtagttgggattacaggtgcatgcccccacgcctggctaatttttgtatctttagtagagacagggtttcaccatgttggccaggctggtcttgaacttctgacctcgagtgatccacccacctcggccttccaaagtgctaggattacaggcgtgagccaccgcacccggcctgtatttttattttttgtagagacagcgttttgccgtgttgccgagactggtcttgaactcctggggtcaagtgatctgccagcctcagcctctcaagatgctgggattagggtgtgaaccactgcgcctggtgcaattttaaccatcttaagaaaataaaaataaaaatagaataaaaacgtattactcatcttgtgtccttgaacaggattctgagcctggttgagcctgtgttgccgacctaggaatattgttactgtagaaggctgttagggtgatgtgccggggttgactctgtgtggactccatctttatttcaaggtcctggatggttctgctcctctgcttctaattttacggcctttgtttctttcctctgttattagcgatggctgttgcctcctctggtagagttttataaatgacgcacttctttttcttctgtggaataaaatggatgggctttgtggaagctgtttgtcactcagaagtttttttgtttgtttgtttttcttaccttccaggttgatggtcgcattccagatgtaaacagcttcagaagcctgacggtcatatggtgagcagtttacactttcatatacgccctgtcatgtgctttgaaggactttctaggggcatcaagggtatgtgaataaatttgctttttcacttatttgtctattatctagccccaaatctgtgcctgctgtttgttgattttcaccccctattcttttttttttttttggagacggagccttagtctgttgctggagtgcaatggcgctatcttggctcactgcaacctccgcctcctgggtttaagccattcccctgcctcggcctcctgagtagctgggattacaggtgcccgccacaatgcctggctgatttttgtatttttagtagagatgaggtctcgtcatgttggccaggctggtctcgaactccttacctcaggtgatccgtctgcctcggcctcccaaagtgctgggattacaggcatgagccactgcacccggcctcttacttcttttttaacatgacaatattctgttggaagtgaggcaagagcaaagtcagggagaccaattaggaggtgacagtgatgagggtgctggcgatgtagctggtactggcaatgggctgctggcgatggagatgcagcagattctggaaccctttgagggttgaattgacagggtttgctccgggcggagtgtgaagtgtgagaggaagatgtgtccacgagaaggaagaacccatgtatttggggtttgtgaagtgacagtggttgatcacggctgctctgggctcagtgggctcttctcggcccttcggcaggtaagagttcaaagctggagtcgaaaggcttatgtcttgagctctcatcgagttgttgattagttcctgggtaaggtcactccctggtagagcagttacctcttttgaattggtgaccacagcctgcgtccccagccctggtgtgctgctagacataagaagaggcaggctggctgggcgcggtggctcatgcccctgtaatcccagcactttgggaggccgaggtgggtggatcacctgacgtcaggagttggagaccagcctggccaacatggtgaaaccctatctctactccaaatacaaaaattagttgggcatggtggcaggtgcctgtaatcccagctacttgggaggctgaggcaggagaatggcttgaacctgggaggcggaggttgcagtgagcgaagattgcatcactgccctccagcctggtcaatagagtgagacttggtctcaaaaaaaaaaacaaaaaaaaaaaacaaaaaagtggggttaggtaggcagttcggagaggtcactatagaatctccagtggatatgcagttcaggggacaaaccccatgatggaatgttgctgcttctgtgagggagaggccctcgtgtcttgagagttgtggttgttgagaaatgatgcctccctggtattagattggtgcagaagtaattgcagtttttccattactttcaggggcaaaaaccacagttacttttgcaccaacctaatatctctcgacttggtttttgtcttacaagaatactcctgggtgtaatcggctatgcctggtggatacattaggatcaactggatctctttgcttattcctactgtgttctttcaggagtgtcttaagtgtatctctgcttcactcctcctttctagcaccctgagaactagaacaggggtcagcaaatcacagcccatgggcctgtttttgtaaataaagttttatttggaacacagccatactcctttgtgtacctgttatttatagctgcgctttcttgttacaacagcagagttgagtagttgtgaaatatggcctataaagcctgagatcgttactatttggccctttattttaaaaaaaagtttgctgatctttgggttagaagagaaacaaaggatgaataaggctgtagtagatggatcacacaggaatacttctcgtccccgacacattgttcagtcttagtacatgtgaatgtgaagtttgtagctcacaaactgtggctttaaagtatcaaaactggctgcacatggtggcccatgcctgtaatcccggcactttgggaggctgaggcgggaggatcgcttgagcccaggagttcgagaccagcctgggcaacacggagagaccccgtctctacaaaaatatagaaaaattagccaggcatagtagcgcatgcctgtggtcccagctggccgggaggctgaggtgggaaaatcacctgagtctgggaagttgaggctgcagtgagccatgatcacactactgcactccagcttgggcaatagagcaagatcaggtctctcacacacacacaaaaggatcaaaattatttaattttccttgtttactcttgtacatgtgagacattatccttatatttgaaatgtaattcagcatgggtaggctcacactaaataatggtgtccttttacttcatcgataattgaatgctggcagtccccaaattcagcattttaaattttttaaatttttatttttttgagagagggcctctctctgttgcccaggctgcagtacagtggcgtgatctcagtttactccaacctccgcctcccgggttcaaacaattcttttgcctcagcctcctgagtagctgggattacagacatgcacatcacgcccagctaattttttgcatttttagtagagacggggttacaccatgttgaccaggctgatttcgaactcctgacctccagtgatctgcccgcctcggcctcgcaaagtgctgggattacaggtatgagccactgcacctggcctcaaattcagcattttgagacccgattcgctgtgccctcttcttttacagagtaaagctttctctttcataggagtatgctaccatgtggtttgttttatctgtgtttggtcgggagttccccatattttaattgactatttcatgctaagggctttcaaaatacgtagacttgtattttttccccctaaatggaattcatcttgttttatctaagttattcatttttcctttggctatattgtgtgctacattataatggatggctattgaattctttatgtaaaaaaaatgaaatagattgaaaatttaaaggacttttcttttttaattgcatcttaatataaaaacaggagtttaattattaaaaatggtggaagaaaagaattaaaacagtaaaatagcttaccaaagattctgttttataatgcattcagatataattggtgtcataatgtgtaattaacagtctttgaagtgtgaagcttaagtttgggtggatgaaggacctcttaggatgcggggatgtctatacttgttcttcaacagtagcacttcctttttcatttttgtttttgagacagagtctcgctctgttgcccaggcaggaatgcagtggcaccgtcttggctcactgcaacctctgcctctcagttcaagtgattctgtggcctcagcctctcgagtagctgggattacaggtgcccaccaccacacctggctaatttttgtatttttagtagagatggggtttcactatgttggccaggctgatctcgaactcctgacctcaagtgatccacccgcctcagcttcgcaaagtgctgggattacaggtgtgagccaccacgcccaaccttgaacagtggcacttccggagtggtgcacagattgtggggttttgctacctgcctttatgtgtgtgtggtcgaaggagatggtagaagaaaggcagggacaggggatcatcctctgatgcttgaccacccacccactactgcctggggtttgtcagggaggagaggacaaactccttaaaatgggcagtggcttcagcttcaggtctcaggctaacttcctggggagttggagtctaccacgtgctagactgacctggggcttgtttaaaacctgcagaggagcttccttggtgcattttctagatccacactgtaatctgggtgtgggtcccccatggaccttgttgccatgctggctgggaataataagtatgaggaaaagcaccctgaggaaaaagaggggaagataatggaacctcaggctgagagtctcagcctccgtttttcccatgcaccatccggctccagttggctctttgaagactgggagaccagaacactcaagaacacaaataaaatatgagagagagtataccacgcagatctgagcttatattcactgttactctggtccaaaagttccttgtgcattgctccctctggccaggcttctcccaggtggtgggtgctcttcaccaccccctgatggtaaaatcccagagtcccagcctgttggagaaagttattaatagcttcacaccagagtttctggttgcggacgccatctagggtggggaggcaacactgcccagcacccttactggaaagagaccactaataattaaacatctggggccttttctcttcttttgaaatagcttttaggagtgaattcttctttggaatatctttatcaatggcagatatttctctttttgggtggttttgattttcagtaaaattcttaatgcagttgcctctcagttggttttcttcttccttcttgcctgcataatgtccattctccacagaatagctagagggatctgaatagtttgcatccagaagttcaagaccagcctgggcaacatagccagacaatctctatgaaaaaataaaaaaaattaactgggcatggtggcacgtgcctgtagtcctagttactcaggaggctgaggtgggaggatcgtgtgagcctgggaggttgaggccacagtgagctttgatctgcagtcagcctgggtgacagaacaagaccctgtctcagtcaatcaatcaatcaatcaatagcaatcaagtctccttactcctccggttgaacttccaatggcttcccattatagtttgtttgaaagctagactttctgctgggactaggaggcctcaagggatttggccccgcctctctctcacctcctgtcctcctcatttagggcacttcagaggcctttcttctgggactagaatacacgcagcgtgcccctgctacaggccttcccactgcatgcccccaatactctccttccaagctctgcctggctagccattcacttccttcaggtcttggctcaaatatcgcctccccggacaggcttccctgagaacctaagctgaagtagcagccctctccccagacccctccctcccctccccttcctgttccggctctgttctcgtcatggcactcatggccacctgactctttctcatggacgtattcattgtcagtcgctcccattagagtaaagggttcccaaggatgcaggtgcccattgtctaaatcagcgcaggtgctgtcattcagagacaggtctgctaagcaggtaaattcttcagttggacagtgtctggtaagtacagtttcccaagaagaatacattgagggaatagttcagacttagaaatatatattgtgatctatctcggtaacaaaaccaaaccaggacagttttcttttttctttttctttttcttttttttttgagatggagtttcgctcttgttgcccaggctggagtgcaatggtgtgatcttggctcactgcaacctccgtctcccgggttcaagcgattctcctgccacagcctcctgagtagctgggattacaggcgcccgccccctatgcccagctaatttttgtatttttagtagggacggatttcactatgttggctaggctggtcttgaactcctgaccttaggtgatctacccaccttggcctcccaaagtgttgggattacaggcgtgagcccccgcacccggccgattgttttatcgaacctcatgtgttagggtagcccacagtgtggagggttgtaatacaaggtgtctgacttcctgtgccttcaggcctcagtagcctccctagtcccctggtctagtacagttttagttgggtaacaaggggacttgcctatctcaggatctctcagtttctgaactactgacattgtgggctggatactttgtggtgcagtctgtgccaagtatcgaaggatatttcagtgcagccttggcctctgcccagtagaggtcaggacaccttcctagctgggacaaccaaaatgtccccagacattgctaaatgacccctggaggcaggaggtggggggacacaagattaccctggttgagatccactggcttagtgaaacacctgcatacccaaggttccaccattattaaccttttataccattctttatcatttacctattagtgtggctgagatttgctaatgtataagaaagtgctttgaaacatagcatgttattcaaatttagatatgacaatgaccgtagttttcttttgtcatctacatttgtggtctccgttcctttgttatcattgtcttacttttcatttgtcatttatgaaatatctcccccctaaccagaatgttgctcttcactaatatattgaagtgtgtttgatggttaaaatcacagagaaagtcttgactggaaggaatcttgagggacctttggacaaatattaaatgtcctgttaatgtcgttgtcattgctgtcattatcatgatctttttcaatgcctttaatttaaagatgaggaagctaaggggacagtggtgcacccaaatcttggctaatggtagagcaatgaccgtctgggtgtttctgtggaatttacttgcacttttgttttctgtgaagttcgtgctgggattagcagagctctctacctcctcctctgagctccctgccggagcctgaacataaagtgcccgtattctgggctcatggaagatttgttaataagaaattttctaaaaaaatgatcagggaggagacatggggagtcagtaaaaagggggagagaggagcatcttaaactgcaaagatgttgaactggaaaaggaaaactgtgaaaaacattgcaaaaggaaaagaaatagaaggaatctgtggaagaatcaaatcaaccaagtgcaatgttgggtcttgtatggatcctgatttgaacacaacaactgtgagagaaggagagagaggcagacagaatcagggacatttaaacagggaatggttaattggtggtggtaaggatttttgggtggtgggtgggatgatgtttaagtaaaaggtccttctcttttagaaataagtgttgaggtattaatggatgatagaataggatgcttattttcttcaaaataaataagccagtgttgggggagtatagcaaactaggattgaatagttgaagctatatcgtgagtacatggggattatgtacctaccataaaacatttccaagtaaaaagttttaaaaacatgaaagttgatcaactgtagcacatcacaaacctctttgcagcctaaaataataatgaaagaagcagtgtgagaaatttgccaactttttcatcttatcttaaaaaatcttccaaatgcagcagacgtttcccagtttccctggcaaaggccctttgccctgagtgacaggcggatatgggaacaggagctcgaggaagctcacccttgccagggcggcagggaggctactgatcctcacgcacctggtcctgggttccgccaggtatgaccctctctgtgccacagtgtccctgcagagctgataggagagtcttccttcctgagcctcctccatctctcctgcacccttccagaaatgatctgtggaccagcctacctttttttgcaaatgttttattctttagataatatacaaattttaaacagtcacagaaagataagaatataatgcaaaagagatttcttttccaacaacccccttctggaaccacttgagtgtagtgacatattgatgttctgctaccctggaattctcagtgtgtgcttcccacaaccaggaacattctcctgtgtaatctcaagatagccgttgatatccggaaattaacacggacacattgccaccctctagtcctcagaccccagtcagatttctccccttgttcctggaatgtcctttgtaagcaaaaggatctagttcagaatcatgcatcacatttagtggtttccttcagttgagatcagttcctcagtttttccttgacagccatgattttccttaacacttttgaggatggcaggctattgttttctagaagattcctcaattttggtttgcctgataatttttccacaattagaatctggttctgcatttttggcagcagcgtcacagaatcgctgtgttctagcgcttcccatctggtggtccagattttgagctgttctactattaactcatagtttactgtgtcttgttcagtggcctatatttcattactctcattctactaaaagtacaaaaattagctgggcgtcatggcaggtgcctgtaatcccagctactcaggaggctgaggtaggagaatagcttgagcctgggaggtggaggttgaagtgagctgagatcataccactgcactccagtgtgggcgacaagagtgagactccgtctcaaaaaaaaaaaaattaaaattaaattattttgatactcatattgccactcatctggctgagaggagcttgtttctctgtgctatcattctttaagtacttccttactttctagcctatgttctagggtctttttttttttttttttttttgaggcagagtttcactcttgttgcccaggctggagtgcaatggtatgatctcacctcactgcaacctctgcctcttggattcaagcagttctcctgcctcagccacccaagtatctgggattacaggcgtgtgccaccatgcctggctgattttgtatttttagtagaaacgggtttctccacgttggtcaggctggtctcgaactcctgacctcaggtgatctacccctctcagcctcccaaagtgctaggattacaggtgtgagccaccgtgcctggactctaggctcatcttattctttgcttgccccagcaggggaaccagccatttctctaaggagtcgtggtttcttttagtggacaccaggacgtagaaaccaaaatctgggcttaaggtgtgctccctgcttattggggagtcgctgtccccagacgctcactagggagttacatcttcacacacatgaattcacactgatgccttcaattctgattcagctccacaaggttcattctagttttctctttttccacatttaaatggcttctccaacaagcaaaactctggtgcccattatccttcatatctttacttatttggtcaactggcatgtttgtaaccaatctctatgtcctggctctacctcctcccacgtggatgccctccttgtcatgcttggcttggacacgcgtgctgggctgctgttccacatggccccttcctcaccctgctgggttgggttggacaccccactcagtgacatcatggcctccccttcctgtgtgaacgcctaccttgctctggcccgtgttaagacttcaggaatggattgcttggaaaggaaagtttttgttttttacatatataagaaaggatcatagtacacatgttgttttctgacatgctcttaaaatttttaaccttatgagatctcatggacatcttacaacagtaatacatgtagaccaatctcattgcttaatgactgccttgaaccattcagtaaatattttcctgagcatgtgttttgtactatgtattgttctgaaatcttggaatttatcagcaaaaaaatacagacaaaaatcggtctttgtggagcttgcattctagcagggggagacaaaaacaatcaacataacaaatagtaaatcttagagcatggcagaaggtgataaatggtctggataaaagtacagcagctcatgaggtaactggagtgcaattaaaaatacattggtcagggtaggcatttataggaaaggctttgggcaaacaatggaaggaaatgtgtctatggaggaagagcattctgggaagaggtaataacagctcgtgctggagtgggagcaacagaaaggtggccagtgtgcctggaccaggctgagcaagaaggagcgtatagaaggttcagcgaggtcaagcaggccaggtcatgttggtctttgtagcacaattattttcccccctcttttggccatttcctttttaacccatggaaatgtattcattctactgcactttctttttttttattttttaaaatttatttatttatttatttatttatttatttattttatttacttggagatggagtctcgctctattgcccaggttggagtgcagtggcgcaatctcactgcaacctctgcctcctgggttcaagcaattctcctgcctcagcctcccgagtagctgggactacaggcgtgcgccaccacacccggctaatttttgcatttttgtagacatggagtttcgccatgttggtcaggctggtctcgaactcccgagctcgggtcaccttgacctcccaaagtgctgggattacagacgtgagccaccatgccctgccccctggtttcttaatggctgtcagctggaggccacctcagtgcttagaggccgttctccctacctatagacacccacagttcctgccacacagccccttcataggcagttccaacatggcaattttctttttttcttttttctttgactgcttcctctaccactagaaagcagctgtattgcaaaaagcaatccgtttatttagacattctcttcctaggcaactttaagtttttccaccgccgtaacaccactgtgtttttcactttcagtcttcaaacacttttttcaggagaatcctcatcactgtctcggttcctccttctttatcctctccaaacagaagatccaatatatctcccagatacattggatccagaagatctccaatgagaagatccagtgtatctcccactttgaccgttctgtttttcttccataacttttccccattcagcctgagttcacctttgtagaacgcatcttccactttgtttctcccaatatctaggcctgtcttcaggacatcgtcataccaaaaagactgcactgctttttccaggtcttgatagtctttgactatcgtagggtcatcctcaagctcctcttcctgctcactcatctcatcatgattgctgtcttcatcagagtcctcttcatcttctactttttgcagtgactttgtagtagatttattagagcttttattacttttgagtcttatggaaaatggaaaaatatattctggagatattaaaagccctgagaatttcagtgagaaaatattatggataagtcttttataatttggtgcacataacttagtgctatatcgattccaggaagtacagagtttgtgtgacgaaggtgtccctcggagaacaccccagagtccaatccaggtatctggctttcttaaaacaatggcaagcaatttgacactagtcatagccatggcgcttataacctttcttttgttgttgttgtttcgaaatagggtcttgctctgtggcccaggccggagtgcgatcttggctcactgcaatctctgcctcccgggctcaagtgattctcatgcctcagcctcccgagtagctgggactataggtgtgtgccaccatgcctggccaacattttgtatttttagtagagacaggatttcatcatgttggctcggctggtcttgaactcctgagctcggcagtttgctttttcaaggcccagcctgcttagatgaaatcttacataatgaaatataatcagaggagtgacacctcatcattttgtcatgtcctgcccacattcaaggggaggggttatacaagaacatggatcatttgggatcgatcaccttaggatgtgccctctgtaaggtggtctgccaatcttggaagtttaacctgaaacccaaacttactgttttccctcttccaacttcttcatctctattagcatcacctccagtgttccagccaccagatttttagtctgggtgttagcactgacccttctttttctttgtcattttcagtatccttgcacttacgaagtactctcaaactttcctggacatgtcctttgtaaaccatcttcctaaacactagtttttgtatctctcactctctctttatctctctttctctctctctctctgtgtctcacacacacacacacacacacacacacacacacacacacacacgcacacacatgctttcactcagcctggtgcctggtgttggcttaattgtccatccttttctctatgaacaaattgcttcacttccacatttctgctgtgttggtttggagcttgtctgtccttcctgggatgtccttggccacatttcccattacccctcccaagccaccgcatttgctctttctctgaactacagactctggtccacttaggcccagtgactttctttatgttagaatcatcaaggtcattgaaattggattactcagtcatgtgtagacttggctaacttccctgtatgcagtgtgtatatatacatctataaaagtaatgcggggtgaattatctgaatttaaaaattcatgagaaaaatatgataatattaatcaaacatgctgctgtttggcagccagtcaccaagccctcctgtccccgtggccgactctgctgatggctgggcagccacagtgtgatggatggtgctgtggcatgcctgtggccaggtgggctggccgcacctgtggctctgggcctgatttatgctggcctcggagccgcatattgctccacgggatgacgcagatgccggggcctatcctagcatgtgggacctcagccatatccatccagagcgaaccttttttttttttttcctctgagaatctcagtttagcttcttagcttaattgaccactagatggattaggagctgcttaatgatgtctgaagcccacaaggactgttttgatagactcttgatatggtttggctgtgtccccacccaaatctcatcttgaagtgtagctcccgtaattcccacatgttgtggaagggacccagtgggaggtaattgaatcatggaggtggcttcctccatactgttctcatggtagtgaataagtctcatgagatctgatggttttaaaaggggaaaccctttccgcttggctctcattctctctcttgcctgacaccaatgtaaggcacgcgtttcgccttctgccacgattgtgaggcctccccagccatgtggaactgtgagtccattacactttgttcttataaattactcagtctcgggtatgtctttatcagcagcatgaaaacagactaacacaactctcaaggagggaagagagtccccctgtccccctggtgcctctgtgggtcaatgctgcccttcactgaggtcctttgggtatgtgctctgcattttcccaggcccaggaaagcaatgtgcagagagaaagcacctgttctgccttgaagaatctcggatctgggtgggaggcagggtgcccaggggcaagagtgacacttcctaacaatagagctacaggaggagctggcaccgttaataagcacgacctgcttcttgcagaaagtcaaggaaacattccaagaaaacatctcggacgtgcttctccttggagtaggagagaggcactgttgtttctgtagggaagttggatggggcctctctgaaaagaggtaatttgcaggattccagttatgataggatacagagttgtcttgtatattctgggaagaagggaaattgcatcctgcctttgtccgataacaggcagtggggaaaagggtagcaatgctttcggggcccaggaggcctgtttgctgcagctgcacgattcacgagcagctccttccattatcccttatattctgtggggagggaagaggcaaggccagttacgtggttgctgcctgattatcggcctggctgcccaaaggaagtcccccaggcccctctggccttcctctcaaccaacctgccaggcatttgcttttctgcctaattcagttatgcctcagtgtgaacattttctgcctaggcttggtcaatctgcagggacctctcttggtacttgacatagtcagttgcctgactacaaaccaggcctaccctggatagaaagaaaagggagttgtgacagttgccaggaagatttctctgtggaagtggctggtgtttttctgggcagaaactttgtggagggaacaagcatttaattaaaaaacagaccaggcgcagtggctcccacctgtaatgccagcactttgggaggccgaggcgggcagatcatctgaggtcaggagttcgagaccagcctgaccaacatggtgaaaccccgtctttactaaaaataaaaaattagctgggtgtggtggcgcatgactgtaatcccagctactcaggaggccgaggcaggagaatcgcttgaacctgggaattggaggttgcagtgcagtgagattgtgccactgtactccagcctgggagacagagcaagactctgtctcaaataaataaataaataaaataagaaacaaaacaaaaagaactatgactgtttttttgagcacctagtatgtgtctggtattgggctaattccttagtatctgttgcttctttctcatctcataacaatcctgaccagccacggtggctcacacctgtgatcccagcactttgggaaacaacagtgtgacgatcacttgagcccaggagttcaagaccagcctgggcaacatggtgaaaccccatctttacaaaaaatacaaaaattagctggatgtggtggtgtgtgcctgtagtcccagctactcgggaggctgaggtgggaggatcacctggcctgggaagttgaggctgcagtgagccatgatggtaccatggcactccagcctgggtgacagagtgaccctgtctcagaaaaaaaaaccaaaacaagccaatcctagcaggtgggcactgttatatttgctgttgcaaatggggaaactgaggttgggagaggtcaagtacctaggccacagggactttcagaagtagatgccagggatctccacttggcagagctggactttctgacccgaaacccatgcctataatttgaggatttgccatcctgtcttgtagaggttctgagagctgccacagttctgattgtggagtcttgagtgacagggaagttgcagcctgaggtctgtggtggagctggaaaggaatatttgcaagacacctccatgctcagcaccttccttgggcttctccaatttgcacttcttgtttttttttttttttttaattgagatggagtctctctctgtcacccaggctggagtgcagtggcacaatcttggctcactgcaatctctactgcctaggctcgagcaattctcgtccctcagcctcctgagtagctgggactacaggcacgcattaccacgcctagctaattcttttgtattttaatagagatggggttttgccatgttggccagactggtctcgaactcctggcctcaggtgatccgcccgcctcctcctctcaaaatactgggattacaggcatgagccaccgcgcctggcctccaagttgcacttctaatttagattctgtcctctaatcttggtcaatgtagatgttttaggagtaaccagtgttcctcatgtgtttttcttggggcctattacacaatgactgctgtgatggttaattttgtgtgtcagcttgactgggccacaaggtgcccagatacgtggtcagatattctggttgtttctatgagggtgtttttggatgagatgaaccttgaaatcagtagactgagtgaaagatattggcctcgtctctcctcctctcctttcagttgaaggcctgaatggaacaaaactcgggccctacccctgagtgagggggaatttctcctgcctgactttctttggagctaggacatcattttttccctcctgctttcagccttggactggaactccaccattgctctcctagttctccagtttgccaactgcagatcttcagatatgttaacctccataatcacacgagccaattccttataataaatctcttcatgcagatatatacatgtgtgttgtgcatatatgtgcatatgtatagattctgtttatcatgagaaccctgactagtacaagcactcatccctggtcactgtccacctcctcatttctcaggccagcaggcatctgaccaacattcctgcagatgcttcagggaaacacgtgagccacagtctcttcacttccatttgcttttgctcctcttatctccgaactcacagttcagtttttaacacattcagatcactctcatatttttcctcctttattctaatttattgatcttcagagaatttctttcctatttctctgctttctccatttttctttccttttttccttctccttgcttttcttccttttttaaatcttcttgagatagagtcttgctctgttgcccaggctggagtgcagtggcatgaacacagctcactgcaggcttgacctcctatgctcaagcagtcttcccacctcagcctcctgagagctgggactacaggtgcacaccactacaccctgctaattaaaaaaaaatttttttcccagttgctaccagctatagtaaaataaagaaagaaaaattttgtagagttggggtttccctttgttggtcaggctggtctggaactcctgggctcaagtgatcccccttcctcagcctcccagagtgctgggattacaggtgtgagccactgtgtctggcctacttttctatctttcttattatcctaccctatcctgtcctaccttaaggcccacaatggccgtaataattgtggttcataggggtaagaatgatactgatatcatttgtcttaacacaaaatccctgatagtaaacaaaaccaatggttttgcaaaccagaatttccaagaatgtctccagctaccctactttcttcaaagtaaatcttttctttaagatgaataaagtatttctatgtgaactttactgttttgcttttactgcaagatttgcaacttttctgtgcttagcatttgttttcactgaagatgtgcagcacatcgataacattttgcacgaaaacgctctggtgggttggctgagcgtggcccggctgctgctatggtgcctgccactgtggctagaggtctttcttgttctatttcctgtttgtggtgagtgactgtctcccatcgttatgtcagggacataagctttgtgtttcttttctgttttctttgccttctctgcatctttcatattcatacttcatcactctccctggccttctctcagtagtgtccataaacactgaccttgcagtccaccatgaaagtgtggtgtgtaagttttcagtgtgtaaagtttcactagaagttcagcatgctctctgaaagtgatcacccatgaatcttagcatgagacagatggaattatgcatgctgcctgctgcctgtgcccctagaatggctgtttgggtcatgaggcatgatgtagccaggacttacatacctatcttaagtagaaagcaactagagcttgcttctatttttcagctgcagaaatttcagccaatggtagggtaagttaaaaaacaaacacagtggcagggcgaggtggctcacacctgtaatcccagaactttgggaggctgaggcaggtggatcacctgaggtcaggagttcaagaccagcctggccaacatggtgaaaccctgcctctaccccaagtacaaaaattagccaggtgtggtggcgggtgcctgtaatgccagctacttgggaggctgaggcaggagaatagtttgaacctgggaggccgagattgcagtgagctgagatcgtgccactgcactccagcctgggcaacaatagcaaaattctgtctcaaaaataaaaaaataaaaaataaaaataaaaacaaacatagtcctcaaaaaaccaaaagtaaaaccatgaaaccaaccttcccaaaactcaaacgttaaaatacaaccaacaaaaccccaatctctcctttagcgtctctcctcccctcctccccctggctgtactcatgtccctgagtcagagagggctgttaaaatgtaatgggtatagtccgatccaggaaacaatggttgatagtcttgaataaactcttgaattttacaaggattggggatctcctgggtctcctgatgaagagaacaggtctttggatactgcctgcagtttgagtgcctgagatttctgcagggtaggcagtgagaggtgagcatttggggtgatagaattccatgtagtcaccaatgagctgtgtccctattaattggaattaatagacgacatccagaatggcaagtgggaatataacatctcctggatttaccagattattttccacaaagtttggaacttacataaaggagtcttttggagtagccattgcccctctttcagcaaaaccagaggaaatgtcatacagaagaactgtggttaaagaacattctggaagacacacgtattaaacagagtgaggctggtcttagcattacagaaggttgaagccagcaggggcacagtaatacaatgagcctagattctttatttaatagatttaaaaacaaaacctgaggccttggagtttccgtgtgttgctcaaagtcaagattcactcatcatcatagactgtttctcacattagcctgcgacatttgatgttgtatctcatatgctaggagacatttcccacagaaacatctacttgttactggtcataaaattgcctgtatcaaaagcagtagttgtctttgcattctgttctttcttttctcttctcttctgttctttgttttccttttttttttagatgtaatttcgctcttgttgcccaggctgaagtgcaatggcgtgatctcagctcactgcaacctccgcctcccaggttcaagcagttctcctgcctcagcttcccaagtacttgggattacaggcatgtgcgaccatgcattgctaattttgtatttttagtatagatggggtttcaccatgttggtcaggctggtctcaagctcccgacctcaggtgttccgcccaccttggcctcccaaagtgctggcattacaggcgtgagccaccgcgcctggcctgcgttctcttcttagaaaagtttgctgactttttaaaagaattgtcaaatatttaatggcagactgcagttctttggatattggatcattatttgctgaggtcctggtaattagtccagtctcatttccctcaagctgacaaattttgcttcatgccttatggggaatgtaagtatgaaattaatattgtagcaattagtcatctatccctcatttttttctagtaaagtcccagagcacaaacatgaaattcatcagatccaaccccttatgcttaaaaaccatcgtggcattctagatatttcacccctcctttgaaatagaatgcaataaggaatttagcagaaacttttagtagaaatttactgatttatttttaaatcaggaagctgtatttctcaacagctgttttcttgtgtggttgcaggctgactcagcgccacgccgtgaacgacagaaaagccagtgcgaattctaaattttagtgcctctacttaagagtgcattaaagttgtttgataactgctgctgtaatttccgtgggacagcttatctttaatgctgttcatataaacacagatcccgctgctgggagctacagaggttaggattgattttcatgaaattttttacttaatgaaatctcatcaatttctatcctcctggatattttaatttgagaccaaggagggtctaaggatgaactgcagctttgctttggctttgagaggctgcctcccatgaggttcagcttttatgaaacatgttctaaatgacttgaatggaagccagctctgtctgatgttttatattatgtaaccagtcagatttatgttgcatacaatgaatttcaaattccagtttttagggatttgcaggagggatagggatgctctgagcttatttgagaatgaaaacttggaaaaccacaatagttcagggctcattgtagaaaccatggctataaaatatgattctttttgcctctaataaacatcagaaattatatttcagaagctaaaagagattcaccactgatggaccacaggagtctgatatcaggggattttcttccagtggtgggtggtggtggttgtgggtcaggtgagacttcttacatgagggcatttaaactggtccttgatggtcaaggagggcttcaacaggcagatttgcaaggaaggcaagagaggctaaaaagcaggagaatgcattgaaagaatattaacacttagctctgcatgataacgtttaaaaaaccattaaaatatcagatctttccttaaaaggaaaagaattaaaccactgacatacagcagcgtggtccatagactctgggttatggacgcatctctactgtaattgtcttgtgggaagatgttgcctcccctacttcccatgcttttataatatctggggagctggccctgatatgtctgttcattatttcttgtctgttactagggggtttaattattcccaatgaccaaaagcagctggggagtccaacagccctggccttgtcccatgttgggcacttttgtaacccattcctttccatcctcttttccctttgttttttcagagttaaagttgtaaaatgaaactccacagtccaaggtttctacttctcaggcagatacgctttctgtggaaattgctccaaggcagttcaaagttgctttcaatcctgggtaacatgtacataggagccgcattgcaatttgctatttaatacactagttcattgaaacactggatccaacctgaccagtccctggggacttcttcaggtcctggccgtctcatatttgcatatgtgacctggtgcatggtctttctccttcctcagcttatttttctttctaaatcttaatgagcttgttaaatacagaattccagagccctaccttgacaataattccctccttgatgaaactgtagtcaggctcctctgagccctctttttgactaggctgtgaccctggccccatcctctctttggcttatccattccagtcttcgcaaagaatcctgctaggttatcctttcattcttgatatctgaccacccttgataatctgatcaagttcctcattttccacctttgatgtgtaagtccttggcctgtctttagcaagaattctgttaggccagttttgcaagattgcaagaatctcccggctgggcgtggtagctcatgcctgtaatcccagtgccttgggaggcggaggcaggcagataacttgaagtcagacgttccataccagcctggccaacatggtgaaaccctgtctccactaacaatccaaaaattacccaggcatggtggcgtgcacctgtagcctcagctactcaggaggctgaggtgggagaatcacttgagcccaggaggtggaggttgcagcgagccaagatcgtgccactgcactccagcctaggcaacagagggagactctgtttcaaaaaaaaaaaaaaaaaactccctactcctgacgttacgtcttagtaattgtccattgactgaccctctcagcttcactccttggctgtaagttctcacttgtccttgctgtgtttggagttgagcttgatctcttttccctgttacaatacccttattgttctatatatatatatatatttatttatttgttctgagatagggtctcatttcattgctcaggctggagtgcaatggcactgtctcagctcactataattcccacctcttgagctcaaatgatcctcccacctcagcctcctgagtagctgagactccaggcatgtgccaccctgcctggctaatttttgtatttttttttttttgtaaacatggggtttcaccatgctgcccaggctagtctcgaactcctgggctcaagtgatccacccaccttggcctcccaaagtgctgggattacaggcatgagccaccatgctcagcaatagttttgaattaagtcttcattactcttttaacaagtgtcaatttttttcttcagtgacctccagatcttacttgctatgtctaagataggaagcctgtatgttaggtagggaaggctcaatcctggaacaaagtctgaaattacagtggcttaacccaacaaaaggttatttcttgtccacataaaagttctttaccaaatggtgattccaggacccaggctccttccatattgtggctctgctatcgccaacttgtgccttccaacattgccatattcctgggactcaagtcctagaaggggaaagtgcttgcaggtttgtgagaggggcagacacatctttcccactcacattccttattggctagagtcaagccatgcagccacatttaagaaggaatgagtttgttgaataccaacacatgaatctgcattttaaacaagtgtcacatgtgattcttatgcagggggatgcttgggccacaccttggtaaatgctgtttataatatttgctaagttccttccaaccctaatgggccatgattctgttgtgctgtgagctttcacatggaaaaaggcaagcatttccctctaagatgaagagagaaattgaaccagcaaaatcacaaaggattcttcccatatcctgagttcataaaagcatggtgacctgttaagaccagctgattaaataggcaccataatcatcttgctgtgactcttctgctctgggaacccactgagatattaccttatgtgtttccttccacgatggggtgctgggaactagaatggggaacacagaaaatgtaaatgcatgttttcctttgcaactaattaaagtggacagtttaccacttcatttgtctttttttctttttttttgaaacagtctcactctgttgccaggctggagtgcaatggcatgatctctgctcactgcaacctctgcctccctggttcaagtgattctcccacctcagcctccccagtagctgggattacaggcacacgccaccacacccagctaatttttgtatttttagtagagacggggtttcaccatgttggccaggatggtctcgatgctctgacctcatgatccgcctgcctcggcctcccaaagtgctgggattacaggcatgagccaccatgcccagccatttgtctttcaatccattggaaatctaaaggttttcttaacctattctgctaagaatcactgatctgggaccaggacaaccctgatagcatctgtattaacttggtcatttgtgttgtgacttttttttaaaggccaagaatttaggtttattttgtgtcaggaattaggctataatcagatatttggggactgggggagtcagcagtgtggtgatcagattttcttaattccactaaggactaggtaagaagaaatatttggacctgcatgagatgtagtttgagcacactgaaattataagggaaagctagattgtgaatacagcctttgagtgagactttttctgagtttctcatttcttaacaccttcagttgctacgctgctggcaaatatgacacaagctgttggatgctttctcgattgaatatagttctgacatcacacaatattagctaacgtttgtagaatacttactgcatatggcttttgttattctcttatttcttcatcttaacaacactaggaggtatgagtactattttttccctgttttaccaaacgagggaaactgagacacagagaggttaggtaactgcaaggttacattgccggtgatcaagaccctattgacaatcggaagcatcagccatccatggttttgttccatctcagtctggtttgttctacactagctgttatattcttagacaaccagtggttcttcgagagacccctccctcttttttaaacatagattacatggttcagcagaaagtggttctatttcttttcacgataattatggtttctgggttagcactcagtgctgccaactttttgaggatgcgggtaaagtaagttctatttcttaccagcctttgatggcgtacagcgtgcttggatagaataggaagcttatacatattaatgactggtcaactgtagtttcttctggggatcatttcgtaggatgttataatcaaatgcatgttaaagaatacaatactgtatgggtgtggtggcccatgcctgtaatgccagcactttgggaggccaacgcgggtgaattacttgaggtcaggagttcaagaccagcctggccaacatggtgaaacactgtctctagtaaaaatacaaaaattagctggacatggtggtgcatgcctgtaatcccagctacccgggaggctgaggcacaagagtcgcttgaacccaggaaacagaggttgcagtgagccgagatcgtgccactgcactccagcctgggcgacagagtaagatgccatctcaaacaaacagacgaacaaaaacaaagaatacaatgcttttaaggtttctgttattcttctgtgggttcaaggaaagatggtattgggtctgggtctcttggggccaagtctagttttaatcactgtggctaccccctgttcctgttcagctgcctctggtgaggtggtggggatggcaggctgcccttccccaacctgtggcagacatccccaatcaacgatagcactttcccctgcatgacatcaggtaatcgctacctagtgattatagtcagcatgttaatgtaattgaaactgaattctcacagctctagtggatctctttcttgcgtttattatcaaataagtaaatgatcaatttagattattatttctcaactggggatgaaactgccttctaggagatagacagttggcaatgtctagagttggttttggttgtcatagtggggttgttgtgggttgctactggcatcccagtggatggaggccagggatgctgccaaacatcctacaatgcacagaacttctctctttccctgtgacaatgaattattcagcccaaaatgccaatagcactgagacagagacttttgacctttggagggtttcttaacaggtagttggtagtaagaagtgggatacaaaagaggacttgggggagagagcaggacacatgcaagaaaaagagggaaaagggttacatcatgacaggtgagctgatggtacgtttgtgcacagatcttttcattctctccagtgccctatttgacaaacacagcacagactgtcagctcatggaaaagatcacaaatatgctgggtgcagtggctcacacttgtaatcccatcactttgggagactgaggtgggtgggtcacttgaggtcaggagttcgagaccagcctgtccaacatggcaaaaccctgtctctactaaaaatacaaaaattagctgggcatggtggcaggcgcctgtaatcccagctacttgggaggctgagacaggagaatcacttgaacctgggaggtggaggttgtggtgggcccagatcatgccactgcactccagtctgggcaacacagtgagactctgtctcaaaaaaaaaaaaaaaaaaaaaaaaaaaaaagatcacaaatacgcaattacatatgtatgtgtggcctagtaacatggtcacgtcttgggaccttttgttgtcttgtgcttaaggggttagtaaaaagtagttgatgagggtagctgctccattcatgaattcctgcagcatcatcttggaagggttaacctcttattaagaaagcaagctgagataattttttgaatgttcaactaccagaggtgatctaactgtccaaaaagaaagaaatggttaagtaagttatggaatatccatacgtattagtctgttctcacactgctataaagaaatatctgaaatttggtaatttataaagagaagaggtttaattggcttatggtgctccaggctatactggaagcatggctgggggatctcgggaaacttactttcatggcagaaggtgaagcaggcaactcttacgtggccagagcaggtggaagagagagagagggtggaggtgctatacactttcaaacaaccagatcttgtgagaactcactcactgtcatgagaacaacaagggggatgtccaccctcgtgatccagtcacctcccacaggccctttctccaacattggggattataattcaacatgagatttgggtgggaacacaaatccaaaccataccaccctattatgtagttgcttttttttttttttgagacagggtctctctctgtcaccaaggatagagtgcagtgacacaatcatgattcactccagcctcaacctcccagggtcaattgatcctcctacctcagccccactgagtagctgggattacaggtgcctgccaccacgtccagctaatttttgtacttttagtagagatgggtttcaccatgttgcacaggctggttttgaactgggctcaagcaatccttaggattacaagcgtgcaccagtgtgcccagccataatattttagtgacatgggagtatgtttaagatattggatataaaataaattagatcaataactatgtataatatgagcttaactttgatatatttacattaaaaatagaccggaaacctatagtttgaacagtggagaactattttctccataatgtgatattttaccaaattttttcttttacaaagacattacttttgagataagaaaaatgtaaatatttcagagtttgctacagtggcgaaggttttatattgtatcgttttttatttttatttttattgttgagatggaatctcactgtgtcacccaggctggagtacagtggagtgatctcagctcagtgcaacctccacctcctgggtgcaagcgattctcctgtgtcagcctcctgagtagctgggatcacaggcatgcaccaccacacccagcaaatttttgtatttttagtaaagatggggtttcaccatgttggctaggctggtctcaaactcctaacctcagacgatctgcctgcattggcctcccaaagtgctggaattacaggtgtgagccactgctcctggcctatatttttttaaattaattaattaatttatttatttttatttgagaccgagtctcgctctgtcacccagggtggagtgcagtggtgtgatctccatctcagctcactgcaacctctacctcccaggttcaagtgattcttgtgcctcagtctcctgagtagctgggattacaggcatgcgtaaccatgcctggctaatttttgcatttttagttgagatggggtttcaccatattggccaggttggtctcaaactgctgactgcctgccttagtctcccaaagtgctgagattacaggcatgagccaccgcacctggctctggcgtatactttagataaatgaatttatcttttgggaacaagagtcctttgcttattaagtggctgccatgtgccagaggcagtggtggacactggtgattgaatgacgtgtatattacgtggtgcttgtccttgggggagcctgcagtctatagtggaggctgataaatgaatagatagatcccaccatagtgcagtaagtgttgctgtagggatgagaacaaagttctatgggacaatagaggttgaatagccaagtttcttcacagatataaaatgaggctttatggaggaggtggcatatgtgaaggatcttgtcttagttttgggctgctataacaaaataccacagactgcataatttataaacaatataaggttatttggctcatgattctggaggctgggaagtccaagatcaaggggctgcatctggtgagggccttcttgctgccctgatgcaaagcatcacatggtgagagagagtgagagagaacaagaaagggccgagcttgtttttataacgaacccacttccaagacagtgacattaatccattcatgagagcagaaccctcttgacctagttacctcttaaaggtcccacctctcaacattgttgcattggagattaaatttctaacccttgaatgttggggaacacattcaaaccatggcagatcttgatggcagtgtagaagtttatgaaccaaagtggggccaagaaacactaggccaatttttcatttgctttctgtaatgtgaatgggagctgcctacttagtttcatcccataatctataagttgctgtgtgaatgaaaattagtactattgtcattagtactacatgcagcaaacgtgtatgaatgattcagggctcaaattccactgggcctttttatatgaaaattagattcatcaatttcctggaattaattaaaatcttgtttacaacaattgacaaggcatcttgtgaccttataagcatgtatctttagagtaactttaaagttactctataagcatgtatctttagagtaattcctgggtgcataaagtaaaccctttttatcttcttgccttaaacttgaagacgaagagcattttaaagactaacttgaatgaagcaggatgttagttttaaagacatgaaggctgagactgctggtgtgcaatgtgggttccagtgttcttttacaaacaggttcagttcaggcaaaggggtggtgtggccagtggccccgaagttcttggcaagaatgttggggatcactcttagggaaggaagccaagaatctgctcagtaccaaagacatctccgtagtctgttcagactgatctaaatatgaacagcatatgaatttagcaaagaggatacatgctgcctgagacttttaaccataatacttcattcgtttactaagtaattaattagttcagtggttattcattgcatgcctactgagtgccaggccagaggtcacttgttggcaaaagtctccgtgggacattacagagaactgggacggccaagctgttaacacagagctcaccacagtccttgtagtagtgcttcactctggagggtcactgtgtgtctcacctagagcctgtccacacactcagagctactgcgtttgggactcaaaagatggaaggtgcaattaactataactgcaattaaaacacggttgtggttagttgcagtgatggcctgttaggaagtgaggaagtaaaaattcattataagagcatgtctgaatttttaaaagtttaacagtattgagaagagatctttccagctcttaaccatggtcttcacaatattcgagcataacatagtatacaagtgaccatttgccatcaagaagcaaacgctttagcatgcccatttcaaatggtggcatggttatctatttcagcttcaacttctcaactccagggcaccacagattctgctcgagttccctctccctgtgctaaggcctagcagccgggacactggggcagatcgtaatgctcatctgtttggtatttagtctgttagagatcagtgtcctgtgctacctgttgttcagtgtctgaaaaccattgtttcatagattttgtccaatttttaaattgtttcaggtgggagtataaatctggtccttgttactgcatcttagctggatgtagaagttctgcaatatattttacaatgcctttttttttctttaaaaatagggatttaaacacatttaaacaaatatttggacatttaggccaggcacggttgctataatcctagcactttgggaggccgaggtgggtggatcgcttgagctcaggagtttgagaccagcctgggcaacgtggcaaaaccctgtctctaacaaaaatacaaaaattagccgggtgtggtggtacatgcctgtggtcccagctactcaggaggctgaggtgcgaggatcgctggagcctgggaggtgaaggttgcagtgagccgagatcaaaccactgcactccagcctgggagacagagcgagacttcgtctcaaaaaaaaaaaaggacatttagaaatattaaggttcagttatgtggtaaattcacatgtgtggaataacgtattccctgacaatctgatcattaagttgtgtctgtgtatgagcgctgagttaagatgtttcagagtataagtcaattaccaccctcatcttaaaggataattaaaatctctcagcctccaagggatcaatcctttttttaatttgcttccttttcttcttatattctgagaaattgttctaaaaggaatgatttgagtttccagagtttggtatgcattgccctagcttccaactaaaagaatggaccataaagcattattgcagttgaagtataaatctaattattccatttactttcagaggttgtatctgcaaatggcataactgatgtattcgttttcattctccttctacccagtttgctcaacctaatcacctgaatgatgttaatttgggtttaaggcacatttcagaagattttggctgtaaagagcaaggcaaacttagctcttctgcatagctctaaatgataccaataactataaatggcatcattcatactggtgaagtctttcttactttttaaaggctaggatcaaatctaggaaggcttgggtgactcccctgctctgaagagctctggctttcaatttctctagtacctattgcttcaattggttatttatctaccttatgttgttttggaaatgaaatgagagagactgaaaagagaacacaaaaggccattacttcaatgttggataaagacatacccacatacatttaaatttgttacatgtttcccttgcagtttcatttggcatttctttatctgtaatgcacagaatgtcccctccaatgccccttttatcattcatccagccattagagttgttttccgacatgtaattctgatcattgccactcccctttgacgggagcgaccacatacagattaaagtctgatctttgtgatacggcacttcagaccttccacagtctggccccaaattattttctgctcccgtctcccatcacacattctatttcatccacaaggcacatttcctgacactgcaggggcatgtcatttattttaacacccctgtgtttgtttctactgtttccctggaaaatctttcttactgtgccttcccctcccacttcatgcatgttgccgcatctttccagtctttacaagtggagttgcttttcttctctgcattcctatggctttttcacaaactggccggagagtgtgtctgggaaggccatggtcactattaccaggaaggtaatttagaaagcaggccagatcacccaactctggctcctcgctttggtactgccagcctgtcatcattatagaggtagaaacgcagtggcagaataaagagtatggaagggcagggcgtggtggctcacgcctgtaatcccagcactttgggagcctgaggcgggcagatcatgaggtcaggagatcgagaccatgctggccaacatagtgaaatcctgtctccactaaaaatacaaaaattagctgggcatggtggcatgtgcctgtagtcccagctactcaggaggctgaggcaggagaatcgcttgaacccgggaggtggaggttgcagtgagttgagattacgccactgccctccagcctggtgtcagagcgagactccgtctcaaaaaaaaaaaaaaaaaaaaaaaaaaaaggaatcttagatttttgacatgttcaccccatatttattaaggtttccagatttcacaaagatatgatcaaggaattagttgtaagatggcatgtaactctgcatagcatgcgatgtggcattctagtgatggcagccatgtgtatgggaaaggattttgtttacagtcattttgcagtgcatgttgcatttcggttaagggatcacatacatgatggtggtcccataagattgcatatatgacggtgatctcatattttgactgtatttttttctttattgggatatgtttagatacacgaataccattgtattactgttgcctgcagtattcaggacagtaccatactgtacaggctttggcctacaagcaaaaggctgtaccatctgggtttgtctaagtacactctctagtgttcgtaaagtgacgtaattgcctaacggcatttctcagaacatgtatctgttgttaagtgatgtgtgactatatatgactgtattttaaaaagtaaaataaataaaatgatttctgaccaatcttgcagtaagtgtcaggtactgttcttgggccttaggatgcaacattgaataaaagtccccaccttcaagagtctcagagtctagctcagtggttctcccactgtggttcccagaccagcaacatcagcatcatctgggaacttgctagaaatgcacattcttgcccacccccatccacccccaatctactgaatcagaaattctaggggtatagcccaacaactagaggtttaacaagccctacagctggagagatggacacattcagtacagtctggtaagagctactgaacatacgtggagtgcatctcagagtagtttgggaggtgaagttgaaggcggtgcagaattaggtaggtcttcagatgagccaagttcaagttaagtcttagatgatgagtggttgttcttccagtggataagggggagaaggaaagcattttcaagccaggagacccatacatgcagaagtacagaacaatcaaagggcctggtcacctctggggatgagaattattattattgtcattatgttcttattattactattacatattcttaagtcagggttataagatgagctaagctggcaagatcagtggccagatcatgccaagaagtttggcttttcttctggaaaacaaccaaagatgtttttagcagtgaaatgaagtaatcatatttgcaattctgttacatatatacaaaaaatagaggcttttttaaattagaaaaattactttatgatagactcaaaatctaaggtgagagtggaggaaaagatacagaacaataaggaatttaaatgaagaaaacaataaagaatttagaacctaattcttagaaattcatacaaaatcttcagagaattttaattctaaaacaaatccatgcagaaaatctacagaaaactttaagaacggaagaatcaaaagctaactcagttcagcctagactgaaactatttttattttgcaggtatactttgatttcatcttttttccccctttgtctggtctttgtttattatacataatacataagtataaacgctagcttgatgtttttcccatttagtggtaaaaatggttgtgttgcaggtggccttaaatcatttgtaaatattcatttaacaagtgtttcctattccatgggtgctgcactggggtttacttagctcttgtttgcatgtatggtaattatcagtttgggttcggtgaggcgcatggcagagggatttatcatggggattccccactgtgcaatatatatatatatgtgtgtgtgtgtgtgtgtgtgtgtgtatatatatatatatatatatattttttttttttttttctttgagatggagtttcgctcttgttgcccaggctggagtgcaatggcgcgacctcggctcactgcaacctccatctcccgggttcaagcgattctcctgcctcagcctccggagtagccggattacaggtacccgccaacacgcctggctaattttttgtatttttagtagagacggggtttcaccatgttggccaggctggtcttgaactcctgacctcaagtgatccacctgcctaggcctcccaaagtgctaggacaggcgtgtgccaccactcccggctccccctgtgcaactttgggagctgaaagaagtctgtggaagactgttgtctctgcctctggctgggccaggagtccagaagaaaagtaacatgtggagtagcggagccagttcgcggtggagcccatgtctgtttcttccacttcccatctggatgactgggagcggtgcacagaagactccacgccctggctgttggactgcacagtgcctgacccaggagcccaagggactgtgggaggctgcagccacaggtggtgcgcccacgcctaactctgcttgacctgcttctcccctcctgccttcacatactgtgcaaactcccccatggctgccactcactccctgccgtccaggagagggaattctgggaaatgaggtcccacttagctacagtggcagggcacacccctccgcctccccggggtgtatttccaatttttattctcttcttaggaaatactgcagtggatgtcttttttttccatgtgcaacgttttctaaatcttggatcatttccttgggacagatcctcagaaaaagaattaatgggtcaaagggtctgaatatttttgagtctttagatgttgccaatttactttccacaaaggtaggttggccagtgctgtggcttacgtctgcaatcccatgcaatcccaacacttcgggaggccaaggcaggcggatcacttgagcccaggagttcgagaccaggctcggcaacataatgaaaccctgtctctacaaaaaatacaaaacccagctgggcctggtcatgtgcacacctgtggtcccagcaactggggaggctgaggtgggaggatggtgtgagcccaggaggcagaggttgcagtgaggcatgatcgcaccactgcactccagcctgggggacagagtgagaccctgccttaaacaaacaaacaaacaaacaaagttaggttgtatcaattctgccaccagagtaggatatgaagcatgttatcttacctcaccttggatagtgctgagcactgtatctgctttacttttacttttttttttttttgagacagggtctggctctgtcacccaggctggagtacagtggcgtgatctcagctcactgcagccttggcctcctgggctcaagaaggcctcccacctcagcctccccagtagctgagactacaggcatgtgccattatgcctggctaatttttgtattttttgtagaggtggggttttgccatgtttcccaggctggtctcgaactcctggcctcaagccatttgcctgcctcgacctcccaaagtgctggaattacaggcatgagccactgtgccaggtctctccttttacatcttgaggtttccatttgaattgtttatttccagcctttaaagggaagagttgtgtgtattttgtgtatatatatttaattaaattgactttgcaacaagtaaacattagtggctttgaacctcgagagaatcgcttaatgtatatcatgagtaataggtataccaccctctcctgtcctggggacttactaatcataataacaataaaaccagaaggtaaattagctgacacatatataggaaggggtattaacaagtgcagtggaaattagaagcttatttggtgcagagttagtttgccacattcagtttctttctttcttttttttgttgagatgggatttcactcctgttacccaggctagagtgcaatggtgtgatctcggctcactgcaacctctgcctcctgggttcaagcgattctgctgcctcagcctcccaagtagctgagattacaggccactaggcctggctaattttgtatttttagtagagacagggtttcaccatgttgatcaggctggtatcgaacttcttacctcaggtgatccacccgcttcggcctcccaaagtgctgggattacaggcatgagccactgcgcctggccgcgttcagtttctatagaggatttttgggatggtttttggttgcaaggaattgattatttgctttctctttttaaaaagtttttcgttccctttctacaagaagactgcttttaatttaatgtatttaaatttatttattgtttttgagacggggtattgctctgttgtccaggctggagtgcactggtgtgatcacagctcactgcagcctcaatctcctgggctcaagcaatcctcccgcctcagcctcctgagtagctgggactataggtgcacaccaccacacctagctatttttaattttttaaaaaaaatttttcatagatatgaggtctcgttatgatgcccagtctggtcttgaactcctgacctcggcctcctaaaatactgggcttataggcattagccactgcgtctggctccatgtttttaattttaattggtgatctttaatcttttttaaaatttattttaatttattattatttttttgagacagagtctcgctctgtcccccaggctggagtgcagtggcataatctcggctcactgcaacccccgccttccaggttcacgccattctcctgcctcagcctcccgagtagctgggactacaggcgcccaccaccacgcccggccaattttttgcatattttagtagagacagggtttcaccatattagccaggatggtctcgatcccctgacctcgtgatccgcccaccttggcctcccaaagtgctgggattacaggtgtgagccactgtgcccggtcgatgacctttaatcttaaagacatagtatattgccaaggcgggaggattgcttgaggccaggaatttgtccaacctgggcaatattgcgagatcttgtcattacagaaaataagacatgagccaggcatggtggcacacacctgtagtcttagctactcaggaggctgaggtgggaggattgcttgagcccaggagttggaggctgcaatgagatatgattgtgccactgcacttcagcctgggcaacaaacactatgtataaaaaagtaataataaaataaaaataaaaactaaaaacacccaccccaagcccctcaaaaacatagcatgttattaaatattctaatttccctcaagtgcttgtctttatagcatctgtcttgttggttgatgaggctctgggccttacaaattgctttttcttgctgttctgatgacttttctttcaagttaattttcactaagaactggcatgaaaccccagacttcatgaaaaccaaagttgaaaaaaaccgtgctatgactctctgcaaagtggaatgtttgggctctctttcagttgtagctcctgacattgtggcttaccaagggacctgagtgagtttctgaatcagttattagaccacattccactgacttctgagttttaagtcctattttatatttcctttagaaacagaccacagttggtttctttccttcccctgcaatcaagcaaccaatccactggcctgattttaacataatgaagatttcattttcacaaaccgtggaagtgaaatatgtatgttttctaactcaacctaaagtgagctgaaatgtgttggcttgtcatcgtgtgcttagatctactgaaaatagaatgatcccatggagccccaagtctgagaaggtggcttctcatttggggtaaggaatgtgatgtagtttcattgctacgccagctactcaaagtgttaaaaagcgggcccttatgcaaagacataagagtgatacaatggactttggggactcaggaggaagggtgggaggtgggtgagggataaaagaccacatactgggtacagtgtacactgcttgggtgatgggtgcaccaaaatctcagaaatcaccactaaaggacttatccatgtaaccaaaaaccgcctgatccccaaaaactattaaaatggtctgggcgcggtggtttacgcctgtaatcccagcactttgggaagcccaggcaggtggatcacctgaggtcaggagtttgagaccagcctggccaacatgacgagacctcatctctactaaaaatacaaaaattagcaaaaccctatctctattaaaagtacaaaaaattaggtgggtgtggtggcatgtgcttgtaatcccagctactcgggaagatgaggcaggagaattgcttgaacctgcgaggcggaggttgcaatgagctgagatctcgccattgcaacccagcctgggcgacagagcgagactctgtctcaaaaaggaagagagagagagaaagaaagagagagagagaaagaaagagagagagaaagaaagaaagagggagagagggagggagggagggagggagggaattgaaataaaaatgtaaaaaaaaaaaaaaagcagtccctggaccagcatcatgtaggagtttgttagaaatgcgtaattgcagaccaactaaaccagaatcacagaatctcaagatccctagttgacttaaactcatttaagtctgagaagctgtctaacctgcttggcactcaataccagattatcttttgctgccatccatttacctcttggcagggctgcgttttgggaagactcagacctgtggagtggcctccattttattgatctgtgtactgattgctcctgctgagatttgttaaaattctcgaaattccttggaagcagtgacttgggcctctctgatttctccgttgtgaagtctgagcaagcagcctgctttcctttccatctgtgcattccactgggtccgggaagggccaccgtggaagagagttcaggatgagagttaggagacttgactttggatttaaaaaaattgtttatttttaattacggtaaaataatataaaattcaccatcttagctattttgttttgttttctttttttttttttgtttgagacggagtcctgctctgttgcctggactggagtgcagtggtatgatcttggctcactgcaacctctgcctccccagttcaagcgattctcctgcctcagcctctgtagtagctgggattacaggcctgcaccaccacacccagctcatttttgtattttttaagtggagacaggattttaccatattggtcaggctggtctcgaactcctgacctcaagtgatccgcctgccttggcctccaaaagtgctgggattataggcgtgagccactgcgccagcccatcttagcacttttgatgtgtacagttcagtacagttaatttacattcctgtgcagtctccagaactcttttcatcttgcgaaacggaaactctgtgtttaataaataatcactccacattctccctctgctcccccagcccctggcaaccaccattttccttccttctctatgaatttggtactctaggtacctcatataagtggaagcacacaggatttctctttttgcaactggtttatttcagttagcataatgtcttcaaggttcatccatattgtagcatgtgtcagaatatttttccttttaaggctgaataatattccatggaacgtctacaccgcatttcgtttatccacacacctgttggtgggtacttggatggcatccacaaatccaccctttttcttctgtgaatagctgtgattgagtttgaatcttaagcttcctcacactggctgtgagatcgtagacaaatcactgaacttctgagtctcagtttttatttctttagaaatgagcagctcagaccagatgttcacaagcatttaagctctagttacaggatactaaataaaaccgaatctgcatctattaaaaatgaaaaagaaagaagaccatgcgtcttctaaaagatttccatggtttctcccaattagaccattttccttttctgagcaaacttaattttcaagtatctgtaacagcagaacttctataactttaacagctttattgagatataattcacacaccgtgcaattcatgcacgtaaagtgtataattcagtggttttttagtatattctcagtgttgtgcaatcatcactacaatcaacttcagaacactctcatcatgccccaaatcattccctatttctccccaactcccttgaccccccccccgccccccccgataatcattaatttactttctttctctgtggccttgcctattccggacgtttcatataaatgggatcataaaatgtgtggtcttttgtgactggcttctttcacgtagcataatgttttcaaggtttttttttttttttttttttttttttttacaactttctaggatgccaaatgatctcacatgtgaaggattcatttatcaccatgagttcgttatagggctagggcctagaggtacagcagtaaatagcagacacagcccctggctgcagagagctcacaggcttgtggggaagatggacattaagtgaattagtatgctgatattaatcacaagtgtgctagtttctataatggagaaactgtggattctctgaatgtgtataatgatggggcagggacagcgagggtaggctactcttgacttttatttcacatcttcaagatagtgccaggctgggcgcggtggctcacgcctgtaatcccagcgctttgggaggccgaggcgaggggatcatgaggtcaggagatcgagactatcctggctaacatggtgaaaccctgtctctactaaaaatacaaaaaattagccaggtgtggtggcgggcgcctgtagtcccagctactcgggagactgaggcaggagaatggcgtgaacccgggaggcggagcttgcagtgagcggagatcatgccactgcactccagcctgggtgacagagccagactccgtctcaaaaaaaaaaaaaaaaaaaaaaaaaagatagtgctgttcacagttctcttatcaggaaccccctcaatcagtgtgtattaagtgacttttaagtgactctgttaggtgacagtgatacagtgatacagtaaagagagagagagactgggcctgtagggagcgccccatgtcatggggcagacagctgtctatgctgcaggctggtccagtgtgctgcaggagcaatggatgattctcccttaagcatgctagggaatctttacggagcaatgatgcttaattgggattttggaaggtgaacaaactttctttagaaagccaatatgtccatggcagggagaggaacccctgagtagagatcatgagcaaaggtacaaagatactcaatgtgttcatgagaggtgctcattggtgcaaaggtggagtgcaggtggaggcacaggacattgctggtggcagtcgtggatggtgtgagcgcaggcatcaaggggtcatctggttttgggttgctggatagggagtttgatgaacatccccagaggatgtttttgttatatgtatgttcagctcccaacagacttctcgtaaatgtgatcaggaggccagtgtcactggaatctagggttccttgttaaaaataccatctgttgcatcaggatcttgggtgggggcttgggagtctgcactctaatgctcttgccacgtaacgcttatgcacaccaatgcttcggaaccactgctcagaggaacaagaaaactgcttataaaatcttaattttagctttcagcatttcttcaggagtatcttccatccttgatacgtatcctgagacggagctgtaaagtaacatgtgttcttaatattctctcctctcaataatccctcttttgtgtgattttcttgtctttactttgagacttttgtatgtaggttgtattagttttctagggctgccatcacatattgccaccaacttggtggcttacgaaaacaggaatatattctctcgcagttctctggaagccagaagcctgaagtcaaggtgttggcaaggcatgctacctttttttgttgttgttttttgttttttttagagacagggtcattctgtcacctatctaggcctatggaactcttgtttacctgcagcaactcgactggagtgcagtggtgtgattataactcactgcagtctcgacctcctgggctcaagagatcctcctgcttcagcctcgcgagtagctaggagtactggcgtgcactaccatgcctgactaatttttttttcttttgtagagatagggtctcactgtgttgctcaggctagtcttaaaagtctggcctcaagccgtcctcctgccatggccttccacaacgttgggattataggcgtggccactgcagccggctggcatgctccttctgaatgctctggggcagtgttccccaagctttttatcaccagggacaagtttcatggaagacagtttttcccacggacccaaggtttcagaatgaaactgttccatctcagatcatcggcattcgattctcataaggagtgcgcaacctagatccctcgcgtgcgccgttcacaacagggttcatgctcctatgagaatctgatgtcaccgctgatctgacaggaggcggagctcaggtggtaatgctcacccgcttgcccactgcccacctcctgctgtgtggcccagctcctaacaggccatagactggtatcggtcagcagcccgagggttagggacccctgctctatggaggaattcttcccgactcttcttctggtggctcctagcaatctttagcatttcttggcttgtagctgcaacgtccagtcactgcctccctcttcacttggccttctctgtatgtcctctcttctttaaaggccactagtcattggatttaggggccattctaattcagtatgacctcatctttttttttcttttcttttcttttttttttttaagaggaagtctcactctgttgcccaggctggagtgtagtggcatgatctcggctcactgcactcactgcaacctctacctcccaggttcaagcgattcccctgcctcagcctccgaagtagctgggattacaggcacccgccaccatacccggctaatttttgtatttttagtagagacggggcttcaccatgttggccaggctggtctcgaactcctgacctcaggtggtccacccaccttggcctcccaaagtgctgggattacagacgtgagtcaccgcacctggccgacttcatcttaattacacctgcaaagaccctatttccaagcaacgtcacattctgaagttctgagtggatgtgaattttttggggagaccctatttgacccactattttgagggagaccctatttgaccccctagatagaagtttgagttctgaaagcaattctactctgctggacaaagtttggaaaatacacacttggttaaaaccacatccaacactaacagtgatgtagaccacagtaaaacaagtcaggtggtcatttcaatgaattctaaatggttgcatcattttggacaatctgatatgctttgcttcgaggctttattgcatgtactcacctttagactctttagggtctgggatactggaaaagtttttcacaaatttcccttaagtaagcctccctggaaaggtcaactggttctttctattagttcctggaatttctgtggagcttgtgttcactgatgtccagaggagatgcaacagaagaggagaaggctctggtgcatgggtattttttacagacatggaggctgatgtggctgtcctgggctatgagctgttttgtccctttcaaggcttgttttctataccatgacatatcattattattatgtggcaaagtcaggaaattgcatctcatccaaccttgcccatttgctaggttctcaggtagctcaggttctcctgacagatatttttcctaaagtcgctttttcaaaaattgcagagaagtttcttataaggatgttatatagtttatttattttttatttttagtttttgagacggagttttgcttttgttgcccaggctggagtgcaatagcacgatcttggctcgctgcagcctccacctctcgggttcaagcgattctcctgcctcagcctcccaagtagctgggaccacagacgcgccaccacgcttggataatttttgtatttttagtagagacggggtttcaccatgttggctaggctggtcttgaactcctgacctcaggtgatccacccgccttgacctcccaaagtgctgggattacaggtgtaagccaccacgctcagtctaggatgttatgtagtttatttaattgcttctttttgctcatcattttgttttccacttttgtttttctacttgtggggtgtattaacttctttgtgtgtaaatctttgtatcttttattccatccttagattaaaaattttaaacacagatttactggaaaaagagtttaaactgttaaacgcatctaatgcatattattgctgaattagtgtccagaaagagggttttaaatgctgtcatcagcgtctggacatactagtattaacagctcacttgtaagtgttgctgaagattttgtatctccgaaggatcaagatcttggggaggatggcatttaactgaaggtgagtcttctgttccttgaatagatgttttagatgacacatcgctctacaaggtgcgtcactgtcctgtttttatcactctattgtttaatgatgatgcatctattgcttatggtaccagtgaatgtttccattattttactttacttaacatgaatttctcacgcattcatgtgcagctgaagagaattagcaataatgatcccaataataactcccctttgctgagtaccatccttgtgctgagtgctcttcatacgtgaatctcactgaataccgatttttggaggagaagcgaggaggttggaggagtttagttaccagggtctcaggctgagttgattccagagctgaagctccttcaggagggtcactggccagccctggtgtgcccggcagatctcgtggagaccatgggaggtgcagagaagagtaatttgcacacatcttcaacctaggattactgggctagaccgctcggtgggggctgggcttcaaagccacctgagtgtgtgaccttgactcctttttctttccttcaactgcagtaaaagaaacggtagttctaagaggcctcgccaccctgcttgcagcaaaaggcctctctctgaagctgattctgtgcaaagtccagtgtcgctggtattttcagggcgactttcttctctggcggtgtgttttcctctgtttccaggggagctcccaagagaaggttgtctctcagtctccttttcatttgaggtgacccctctaactcctgtgtttaaagctgggctgcacttactgctaacctttctaatagcttctgtggagttggcctgaaaaactacagagagctctcctttcatccctcgccaggatgctgcaggtctttgtatctgcagccaccggggtaggggagagtggacacccttggccattttcttaaatccaagttggtagctggtgttttcagtccctgcctgaaaacagcagctgtttaatttgcatttggatgctgctttttctcttgccttcccaccaccctgtgtctaaacagtagccagagggcaactttttttttttttttttttttttttttgagacagagtctcgctctgtcgcccaggctggagtgcagtggcgtgatctcggctcacctcaacttccgcctgccgggttcaagtgattctcctgtctcagcctcccgagtagctgggattacaggcgtgtgccaccacgccctgctaatttttgtactttcagtagagatggggtttcgccatgttggccaggctggtctcaaactcctgacctcaagtgatctgccaaagtgctgggattacaggtatgagccaccgcacctggcctagagggcacctttttaaaagtcagatagtgtcactctgctcagtaccttttgggcctttccaattgccccgaaataaaaactgaagggctcacagtggttcctggctgacttgagctgccccttcccatcttcaatttctctctctctccactcagctgttgctcattcatatggcaagtgccagcctcaagcctcttgtcctgtgtctctctacctggagcactcttccccaggtagttacataatgtacccccttcaggtgtgggttctgtcatgtttctttttcagcgagactgtccctggtcatcctgttgaaaacctccatgtccctgactgcacaggtagagtgtggcaggaattgacctgcaggtgtacatctgttctcttctgtccctgatggcaagtgcttgctttttgcttgttaggacactgatatagtttggctgtgtccccacccaaatctcatcttgaattgtagctcccataattctcacgtattgtgggagggacccagtgggagataattgaatcatgggggtggtttcccccgtactgttctcatggtagtaagtctcatgagatctgatgtttttataagggatttccccttttgcttgattctcattttttccttttgcctgccaccatgtaaggcgtgccttttgccttctgctgtgactgtgaggcctccccagccatgtggaactatgagtccatttaaatctctttttgtttataaattactcagttggccaggcacagtggctcacaactgtaatcccagcactttgggaggccaaggtgggcagatcacctgaggtcaggagttcaagactagcctgacaaacatagtgaaaccacatctctactaaatacaaaaaattagccagacgtggtggcgcatgcctgtagtcccagctacttgggaggctgaggcaggagaattgcttgaacccaggaggcagaggttgcagtgagccgagattgtgccattgcgctccagcctgggcaacaagagtgaaactctgtctcaaaaaaataaaataaaatgaaatacaataaaataaaataattactgaatcttggatatgtctttatcagcagcgtcaaaacagatgaatacaggcagcatccccattaaagacattcctttgacttgttgattcggtcccacaccaagatctttgcttggatcatatcagatgttaatttgattcactttagggcccactacatgatgtcccaacatagtttaaggagtcccccttaatatgtgtcatgtaagcaaagtggttgagagcgctgagcaagtgatcacttttatctggatattaaacttcactttgtgtgcacattagccaatgagtagataaagaaaatgtggcatatatttgccttggaacagccacaaaaaggaatgaaatcatgtctgttgcgcaacttggatggagctggaggccattattctaggtgaagtaactcaggaatggaaaaccaaatattgtatgttctcacttataagtgggcactaggctatgaggatgcaaaggcataagagtgatataatggattctggggactcagggggaaaggttgggaagggggtaagggataaaagactacatatggggtacagtgtatactgtttgggtgatggctgcaccaaaatctcagcaatcaacactgaagaacttatccatgtaaccagaaaccacctgtactcccaaaactattaaaattaaaaaaatttcactatgtggaatgcacagtatttgaggcatatcttgcagggtgcttcgaagactagccagagttgggaggcatcgggtggcagaggcatgcagggaaatggtggagtgttgaaggtgcagggcacaataggagaggagttgtcctatggggctggtatataggatttgtgaggatttggcgagaggggagaagagagagccccactggcgtcacgttatggaggcctttttaaaggtaaccccaaagagcttgaattttactaacagaaagttaaagccactgaaagcttctcattagggaagaatgaaatctatgtcctgccttggagagaaatcccttgggtagcattgggaaggctggttggtgggaggaggcctagaaggcaggatgtctgttaggagcctgtggtcataaactaggataaagatgagcttgacctgggaggtggccgagacagagacatggaggagacagtgtggggaaggcattctgttgggtcatggccaaaaatgaatgagaggccagttttgtccccacatcacccaggagctcaaacgttcaaattatcttccctgaccagtaaaacggagtcatggagcccttggaaacaaagcaatgtgaagaaaagggtgtagaagctgagaatggtaaaaccagaagaggccacaacaatcctaccatttcttcatatagtggagaagtaaaggagagaaaaattgtggcgacagagaaaagcaagctgggtgaaggtagtgtgttgtattttagttggaatgaggacattgggtcctagcatcagtaactgatcacccatatccctgattgctgggttagaaatgggaggggaagaaggggcagacactgcaagtgtttgcacatgggggatactggactttgaaagaatattttgaatagctatgatttccagaaagtggttcattagcgaactcaatgggtttgcttagacggtaactgagtttttaatctctggagggaacacctgcttcattggcagctatgaatattattgttgttgttaataagataaccaataacattataaatttaggttaaatttactgaggattcctgaccttgtgctaagcactttgtagagacatcttatatgggatagtgggattttctcttacgctttggggccgttgggtaagaagacattctatagctgaggctctcccatttgttttacgtggactgctgattttgccctagctttagttttataggtgtaaggagacactcagtgttggaagagtcacagaacattccccatccctcaggggtacaccctttctgtgacttcctgcctcctagggccatctaaccacctgaccacacaaactttcccaggggccatttgtgagaatgttccttggagtgcgtgatgatttcaaatcagtggtggctttctcctattgtgggcggtgtgtgtccgcccatgccttttgggactctcttcgtttggttgacatatttgtttggacgtgacctttttccagttcctcttccctgggtttttgcccgctgaggaaatgattctcagatctcatccatctgcaccagtggcaacagaagagagaatttcttttttctatggttcgggtccaactgcccagacacctgtccttcagaggctcatattgttctggttgatgtcacttcctgacgtagacactctttaatattttagttctggaagtcatcaagttggacaagagacaggaggaaatggtggagggtcctcagctgacctgggatgcttttttgattgttcactggacacatagaaaggggccgttgctcccacctccatctgccactggcccctggaattagccctgttagtaagcttttcccagtggtggctgattcattctgagagcttttcatatcctttgggattcttcactgttagattcgagaagaaaaaggacagcttcgcttttgagtctgatgaaaaccacctgcagaagacatgtgtacataagctgtatatttatgcttttcttacggacacttgactgctccttgttgttaaggagattcacaagaggacgggaacttttacatggggacccttagcttgtatgttccgctgtcacaaagaaaatgagttctggccattttcgaggcttgccaaagatttttctccgcaactctggaattctctctcttgtgctttcagagtggcaaaatccatgggctcctgagagcctgaggcggtagggaatgaagtacagagttgaaccaaatcctaagtctccttttaggcctttgtcatccgccaaatgtcatgtttgcagttgccttgaacttggaagaatgcaccactcccatcacgacggttgctctgctgctttccagatgttgaccttgtgcaggtgacgtaaccccagctcgtgttgcggggggactggctgagtcacactcacagctttgggactgggtcttcatctcatttagcagcactggaaccctgtggaaggagatggcatctggttggtctgtttgcacgttctttgcctgggacttcaaatctgatctggagctggtatcaagaaacagcatatctgtgatgaggggcctggcgaatgctagataatacattttacccattgttttttaatggagcagaatgataatcaatttaatcgtattcctttcgcaggggacaaagacaggagcaaaactgaggggagaatggagtgcaatgaaatatgcagaaagagggccgggcgtggtggctcatgcctataatcccagcactttgggaggccggggcgggtggatcacgacgtcaggaaatcgagaccatcctggctaacacggtgaaaccccgtctctactgcaaatacaaaaaaattagccgggcatgttggcatgtgcctgtagtcccagctacttgggaggctgaggcaggagaatggcgtgaacccgggaggcggaggttgcagtgagctgagatcgtgccactgcactccagcctgggcaacagagtgagactccgtctcaaaaaaaaaaaaaaaaaaaaaaagaaaagaaaagaaaagaaaaaagaaatacgcagaaagaggaagacatgcacaagccaggagtaagggagatacaaattagtggatgtggggagatcttcccatccaggaacagaagcatctgagaaaggagaattacgatattattttgtttctttatattttagtttagtggtccaaatttatggaatacatgtccgattttgttacatgcatagattgcagcatagtggtgaagtcagggcttttaggggaggggtccccaatccccaggccatggaccagtacctgtctatggtctgttaggaaccaggccacgcagcaggaggtatgcggcctgtgagtgagcattaccacctgagctctgcctcctgtcagatcagcatgagattctcataggagcatgagccctattgtgaactgcacatgcgagcgagggatctaggttgcgtgctcccttttttttttttttttttttttttaacctgagacagtcttgctctctttcccaggctggagtgcagtggcgtgatcccagctcactgcaacctctccctcccaggttcaagtgattctccttcctcagcctcccaagtagctgggattccaggcatgcactatcatgcccggctaatttttgtatttttagtagagatggggtttcaccatgttggccaggttggtctcgaactcctgaccccaggtgatccacctgcctcagcctcccaaagtgctgggattataggcgtgagccactgtgcctggcttcgtgcaccttataagaatctaatgcctgatgatctgaggtggagcagtttcatcccgaaaccatcccccaccccctcatccatggaaaaactgtcttccatgaaaccggtccctggtgccaaaaaggctggggactgctgttatggagtaccaatggcccaaataacatacattgtgcccataagtaatttctcatcatctaccctctttgcaccccgccatcctttcaagtcttcgttgtctatcgttccacactctacagccatgagtacacattatttagctccgacttagaagtgagcacttgcaatacttgtctttctgtgtctgacttaagataacggcgtccagttccatctaggttgctgcagaagacatgatttcattcatttgcacaactgaatactattccattgtgtatatatgtcacatttcctttatccagtcatctgttgatagacaccgaggtggattctgtatctttgctactgtgaatcctgctgcaataaatataaaatgcaggtgtctttctgatataacgatttcttttcctttgggtagccgtcttgtttctttaaaagagctgacgaggccgggcgcggtggctcacgcctgtaatcccagcactttgggaggccgaggcgggtggatcatgaggtcaggagatcgagaccatcctggctaacaaggtgaaaccccgtctctactaaaaatacaaaaaattagccgggcgcggtggcgggcgcctgtagtcccagctactcgggaggctgaggcaggagaatggcgtgaacccgggaagcggagcttgcagtgagccgagattgctccactgcagtccgcagtccggcctgggcaacagagcgagactccgtctcaaaaaaaaaaaaaaagagctgacgaaatgcactttctagtgctgtccgattgcccattacatacgttcttacacttgatacccagcagtcggcaaaccatagcccgcctgcaggccagatcccgcctgtcatctgtttttgtaaataacatttattggggctgggcatggtagctcatgcctgtaatcccagccctttgggaggccaagacggatggatcacttgaggccaggagtttgagactagcctagccaacatggtgaaacctcatctctattaaaaatacaaaaattagctgggcatggtggcaggcacctgtaatcccagctattgaggaggctgaggcaggagaattgcttgaacctgggaggcagaggttgcagtgagccgagatggcgccattgcactccagcctgggcaagggagtgagaccctatctccaaaaaaaaaaaaaaaaaaaaagtttcttgggaaatggccacatgtatacatttatcttccacggctgcttttgcacctctgtggcagggttgagacatgctgaatggctcctggagtttgagatacttctttgctggcctcttacaagaagtttgctaacttctgctctgtagtcacctttatccagacagtgaaatctaggacatcccctgtatttaaaatctctagcttttaatatttgctgcattttgttattattattattttaagttcaaggcacagccccagcttcttactctcctctttgcccttggattatttcaggagtttcattttctgtggggtgctacttcccttttgaggacatttaggatcatgggggtgggggtgcttttatgattgaggtgggaggcagagagaggttctaaatcatccccagtgggcaggacagtcctgtcctcaatgtcaggagcccactcacccttggagccacttgccttgtggccgtgatgtaacatggaatgtttttcaggggctctttgtaacatcgtccagtgaggagcgggcccctaatgctctcacttcagctgagttcatgcttttgtatgccttattttagttgccgtcagacacaggaaaccaccaggtaatttatctgcctgccagtgggaggactcacgttgactggattcagactctccctttctgtctctgttggtctctctcttttctctcccctccctctgcctctctctcctccctttctttctctctgtgtctctctcacatacacactcacacacactctcacgccctgtctcgtacatatacatatcagcacacacacttacacatagtcactgacacacactaacactcaattcactctcacacagtctcatacacatatgcacacattcttacacagttgctcacacatgctcacacttatacataaactcagtctcatgcactgtctcacatacacatacacactatcacacacactcttacacagtcgctcacacatgctcacatacgtaacaccctcacacagtctcatacacttacgcactcacatactctcactgtctcatttacgtaccgtcacacacactcttacacacagttgctcacacatacacacacacactcgcagtctcctacatatactcacacacacactgtctcattacacacactatcagacacacagtctgacacacccacacaaatatatacactgtcacacacatgctcacaatcacataatgcagtctcacacacactcacaatcactgtttcacactcacacatacaccctttttcacacacatatatgctctttcacatgtacactcacactctccacactgtcacacacacaacctcacacacacacacacactgctacgccctcagtgctgcctccattgactttaataactgcttcagtcagttcccaggacaggatgttgctgcgtttccctggctgtctcgtgtagtgccagagaaaacttggatctccttttttctctcaaaggaatcaacagccagcctttataaatcctgcttaaaagaaaaccccaagcccccaaataaaaaaaaaaaaggcctccttaaccctttgcccttcacctagctctcattgcttttggggacagggttagaacttttagccaaaaaaagccagctgtcccctgccccccaccagggagggaggcctttgggagagcatggatttttttcctccagcccagagaaggccgcaaggccactggaggagagatggagaggggcagaggtgtatttgcagaacttgggggacaagccatggctgcaagggaagcgggcctgtggtgcggaggtctgaatggggctttgagaggggtggtgatgctggtgtgtggagctgagcatggagtcctgtgtgcttggcatccaaggagcaggaagtcggtgtgcggagtgactgtgggctgtggaacctcaacctagagagatgtggggagcaggaggtggggtggaggggcagtctgtgagaaaactcaactttgagactgtcagatctaagaaaggagaaggtctggctgggtgtggtggctcacgcctgtaatcccgacactttgggaggccgaggcgggtggatcacgaggtcaggagttcaagaccagcctggccaacatagtgaaaccccgtctctactaaaaatacaaaaattagctgggtgtggtggcggatgcctgtaattccagctactggagaggctgaggcaggagaatccttgaacccaggaggtggtggttgcagtgagctgagatggcaccattgcactccagcctgggtgacagtgcgagacttcgtctcaaaaaaaaaaaaaaaagaaaaggagaaggtctgagttgctgccatttaggggagtgaggagcatgagtgtgggagcaatgtgtttacagagacattcttaggacccaccgcactgatgaagcctggaggggggggcatgtgggtgacacaggtgatggtgtttcggtggctgagagcggtggcactcaaagtgtgttgcatcacagccacctggaagctttgtaaaccatagattgccccacttctaggtttccgatttattaggtctcaggtcaggcccgaaaatgtgcatgtctaacagttcctgagtgatgctgacgctcttgtggggaccatacttagagaaccattgtcttcgtgtgagaacagtaaacagagctcatcagtgtcctcaaaatagaactaatctaagacatggggagaagatgaaaaataaaagtgattagatattaagaataggaatttgctccccattcacgttgatgagagtgtcagaattttctaagttgtgggaagggttaagccagtttagccaaaatgttattgagcaatagcatgatagtggagactttcattaaaatctaattcctctgcatttggggaatttattcactataaacaggaagagtgtttcaaaactggagttttggctctttgtaattttgaatccttttagctgactcgggaaagagagtccgtaatttgaacttttctttataaaagaagagaattcaagggcctgagtggttcccatctttcaccatcctggcttgtccccttgatatcaggatgaccacttgatgtcagtgacctaaattttcagttgacagactctcatttcttctctttgtctttctcttttctttacaagtgtaagattttggccacaaatgtaaaaataactaaaatataaacaaaagaaggatagacagacacatagtaaacagtataaccaggtgcttcaagaataccctgaataatgtagaagtaaatcctaggtttttaacagaactgatgtctttgccctaagtttggatttgttttctgcaatgtgagatacagcaaaatttcaaggagccttttcaattgcaagcatgcaaatttccaaagagctcttacttccttctgtgggcacattggacaggtcagccattcactgattccttaaatatccttaaaaggattgatttaggctgggcccggtggctgacgcctgttatcctagcattttgggaggctgaggctggccgatcacctgaggtcaggagttcaaaaccagcctggccaacatggtgaaaccccgtctctactgaaaatacaaaaaaattacccaggcgtggtggcgggcgcctgtaatatcagctactctggaggctgaggcaggagaactgcgtaaaccagggaggtggaggttgcagcaagccaagattgcaccactgcactccagcctgggtgacagagcgagactctgtccaaaaaaaaaaaaaaaaaaaaaaaaattaagagcaaatgactcatttgaaaaggacagtattgaaatccttaaccttagaactggagcctgctcccgatgggtcgagccacggactttcttttggttttaaccagggtatccagtggctcacctcagcaccagtggtagcagtagtgcttgggagaggaggttgagacttctgggtcttttagagctatgtttatttacaagttgttgggatctttgccgaggtgcttgagccgcttcttcgtgtttcggtcccaccatctgtgaactccactgatggtgtgtaaattaataaaatgctccatgagcccaggatgagagactttggaggtgccaagaggaatcgtaataaacaatattaaacaactccagggattttagcagcgtttacaattttggcttcacacacttagaggtttggaatcgttttataaaactgacttgaaaaccatgcattaggctttctttgtgtgattggcaacacttcagaaaccacaaggatccctgcttttgagatgtttcgagagaacctcatcaatatggcacggagctctgcctcctagtgagagctgtcactttcccgggaatccttcccttgctcatgggaatgttggggatgtcattggtgtatgaccttaaaagtgtcctgggaaagaaggacaagaagggaggagaatggttttggccagtagttgcagtgttattggtatgtctggtgttttaatagagtgatctgcagaacttaaaaaactcatctaatggcacaaactttgtgtgaaacagggcagtgtatttgggagtttgttgattttttttaaggtgaaaattgaatgaggaggggtagagtgacacataccactgacatttcatgtctgctttgttggagttttatttgtgactcgtaagttctacctacagggctgagagctctgatgggctggtggcaccagcatggtctgacttttctctgtctgaatatttagtaacatgcagattcttccagaatcatggctgtgccttcttttatcttgcattcgtagagtttgggacccaggtgcttgatgaaagtttattgcattagtaataataatagacaacacatgctgctgtagggcaggccctgttctaaagcttttttgtattaattatttaatcttcccgagaattataatgaagcaggattctaactaatcctatcatcctctccattttatagagaaagtttaagtaacttgcttaagattattcaggtcttaaagggtgggttctatatgcatccagctaaagggatttgacctctttagcatcaaattccttctcttaatcattgctctataggcctagtattaaagttctcaaaagtttaataaattataatgatgtctggattttatcttgggaacctgctcaagagtgacaatgttaggagtgatttttttttttttttaagataacatttaagccatgggactcaatttgtgttgagtggggtgggggtgggtgttgagccatattaatcactgctaagccagtgatcaccagcagggcttgcacgtttgtgtatctttgagaagaatttaggatgacggcaatctctttgagtatgtcttgtgttttgaattccataggagcccagtcttttatacttttaaagcaaatatggttgaggtttattagagttaaggcttaggaaggtggaggtgagttttgtggttggagactctgacttggttttgcttttcttaatatcacttttaaatgtctcccatctgtgttgtgtgtgttgggaggtgatatggtttggctctgtgtcgcctacccaaatctcatcttatggctcccataattcccatgtgttgtgggagggacccagtgggagatgattaaatcatgggggcggggctttcccgtgctgttcttgtgatagtgaatgggtctcatgagatctgatggttttaaaaatgggactttctctgcacaagctcttttttttgcctgctgcaatctatgaaagatgtgacttgctcctccttgtcttccaccatgattgtgaggcctccccagccatgtggaactgttaagtccaataaacctttcttttgtacattgcccagtctcagttatgtctttatcagcagtgtgaaagtggactaatacaggggaagtgggctcgggaagggggattagtggcagagcaaagcaaaggaaccggtccagggtggggataggctgaggacattgactttcttggactcttgaagagagtgaactgtgctggaaatgccctttctggctgcccctcccaggagcagggtcatgtgtttgctgaattgtacctgcaagttttttgttattgtgatttattcatttatttatttttgagacacggtcttgccctgtcacccaggttggagtgcagtggcatgatcatggctcactgtaaccttgacctcctaggatcaagtgatcctcctgcctttagccttccgagtacttgggaccacagtttgtgcaccaccatatctggctaatttttttatttctgtgtagagatgagggggtctcactctctcgcccaggttggtctcaaactcctgggctcaagcattcctcctgcctcggcctcccaaagtgctgagattacaggcatgcccactatgcctggcctgtatctgcaagttttaagggccaatatcaaaatattaggatctaggaggaacagggagctgttggatattggtagagctctgcaaaatgataaatgtcatgagtgtttttttaaactttatttttaaataattgtggacttacttacaagaagttgaaagataatagagaggtcctgggtacccaccacccagctttccccagtggtgacatcttacttagctatactgcattatcaaaaccaggaaattgaaattggcacaatgcaagtcacagaattgcagacaataaataggtggaagtggtagctcaagtctgtaatcccagctactcaggaggctgaggtaggaggaccacttgagttaggaattccagaccagactgggcaatataaagagacccatctcttaaaaaaaaaaaaaaagaccatactggaatttcattagcttggcatacacttttttttttcctctttaaaataggacttagtgtaggatttgaccagtgttttttgatgagggacagaacctctgtctaagactgtaataaatgttgtatagacacatggctttttagcatagctctgtttgcttaagtatttttaacacggcaaacagttgagtggactgtgaagtccagcagctcagttatgggatagagaccaagcaatttggttattttcatttatggtcttgaactccttggggttattatcttcacttttttgttgccttttcagagggaggatattttctaaagataaaaggataattcaaggtcattgtgtcatcttaagagctcttggagggaatgataaacaaatgttgtttttcctggaaaagggtgggatttcgattaatcagataaaaggtatggactgataagactcaaagatcatggatgcaatttcatgataactgttagagtggatttccttttacaatgacagccctgtgtgagttgcggctaagtgtcgcctgcttggcttgcctgtgattaattgctcctgcctccgtgatcccatcacgctttgctgagacttccaattagcctctgtcactatctgccctggatttgagctatttgtgagggtgactgtcttctcagctagactaggaagtctttgagggcagggactgtctaattcattttttgacttttctcctcgttctttcttccagtatcaagcaagatgcatcaagcagaagggatctctctattctccagcccccagcaatttttagactattccttattctagcttcacttctttatgtatttatctgggcatctgtttgtatgttatgtgtatttgaaaccagtaaggctgaatccatggtagattattttataattttgagctatcatgagtcagactggccttgttctgtagcgctacctgaatagctgaaaaacagcctgagagcttggtagattttcttcaaaaaaagcagcggggagttgtttttgttttctctgtactatggaattttttcttaaaaaagtatgtcatcggccgggagcagtggctcacgcctgtaatcccagcactttgggaggcctaggcgggcggatcacgaggtcaagagatcgagaccatcctggctaacatggtgaaaccccgtctctactaaaaatacaaaaaattagccgggtgtggtggcacgcgtctgtagtcccagctacttaggagtctgaggcaggagaatcacttgaaccggagaggcggaggttgcagtgagccaagactgtgccactgcactccagcctggatgacagagcaagactctgtcttaaaaaaataaaaaagtatatcatctttatacttaactgttaaccttgggataattcaaattcttctgagtcatgctgccttttgggattcggcatttcagggatgttggcagtggtctgtgattatgagccctgcacattagccgtggtgctgtgagcccctgtcttcttggagacgtacaggaagatacattgtttagtcactttttctttttgagacggagtctcactctgtcgcccaggctggagtgcagtggcatgatcttggcttactgcaagctctgcctcccaggttcacgccattctcctgcctcagccttccgagtagctgggactacaggtgcctgctaccacgcccggctaatttttttgtgtgtttttagtagagacggggtttcaccatggtagccaggatggtctcgctctcctgacctcatgatacccccgcctcggcctctcaaaagtgctgctgggattacaggcgtgagccaccacgcccggcctttagtcagtttttctaacggggagaaactgaggggggaaatactatgttcttgggatcttttggttatgatgaaatgtgaagaagctctctcaagtgaactcatgcaaaaatggtgttactgaagggatatgggaaatgtcgtggacggccagggttgtgcgggccttgtaaagcaggaaaatcaggaagagacgttggtcctgcatctctcagaggcccccatagtgtcaatttttgcttttctctgcaaggttttgccattttcttgttcctacttgcagactgactttcttggttggtctctgacgacatctcagatttactgcttaccaaatggctttgatttggtgcaatgttgctctagtccaatactacctgacctttcctctaggtaactgtcttagtctcacagtgtctcaattccaattttttgttgttgttgttttttttgagacagagtctcactctgtcgccaggctgcagtgcagtggctcaatctcggctcactgcaatctccgcctcctgggttcaagcgattctcctgcctcagcctcccaagtagctggaattgcaggtgcgcaccaccacgcccggctaattttttgtattttagtagagacggggtttcaccatgttggccaggatgatgtcgatctcctgacttcctgatccacccgcatcggcctcccaaagtgctgggattacaggtgtgagccaccatgcccgggctccaatttttttttttttttaagagatagagtcttgccttgtttcccaggctggagggcagtagtgcggttctagctaactgcaacctcgaacttctgggttcaagcaatcctcttgcctcagccccctgagtagctagggttccaggcgtgcataccaccatgaccagctaatttttatattttttgtagagatggggtctcgctggtctcgaactcctgggctcaagcgatcctttagcctcagcctttcaaagtgctgggattacaggcatgagcccaatcttaattccaaatttttaagtgagagtctgtttggccaatactgagtcatgtattcacttagcttctgctgggatgcaagggtgtatgtatgatgggtggtctcagacttgcccaggcaggctctccaaaaggtgggattgttgggaagcaatgattgacatggctgccatatcccaatagaggaacagtttaccattgtttatattcggctctaggctacaataggagggcagggcccattttttcttgcctagtgttagcttccagcttttcccagttaaaatttcaggtctagacagtagaatgaggaagaggtacagaagtgctggagtctatctgtagctgatgaagagctggttactaacactgactaggggcagaggtcattggatacatgacatcaccaatgaatatttagtttaaaaaatactttcattcatgcttttgaattaacttagtgcatatgaattcatcttttcatatgcacttgtttactttttgagttcctaacttcgacttaaaaaatgcagactcaccctgcagtgattccactttatttatttatttattcatttatttatttattttgagatgaagtttgctcttgttgcccaggctggagtagcccaggcaagagtagttttgctcttgttgcccagcctcctgagtagctgggattacaggagcctgccaccatgcccagctaatttttgtatttttagtagagccggggtttctccatgttggtcaggctggtctcgaactgccgacctcaggtgatccacccacctcggcctcccaaagtgctgggattacaggcatgagccactgtgcccggccgggattccactttaatagtcaaggacttctgatgtgtgttgaagtcactggatgacaggaatacagtaaccaaatggtaaagacagagaagaggactgggcaagacctaaaggcttctatgccccactaaccagctgtgtcactttggtaacgaagttctttgaatttcagttccttatctgtaaaatggggtaggaatagtacctgtctcatcatgtcgttgagaggattccatgagctaaaatccattcaaaggcactttactaggcagttgggatataggagtgcagaaaatccacaaagatcttgctctcctggagtgtatatttcagcatgtgctgccactgctctaatttataaatcagaaagtgtggtgtctggccgggtgcggtggctcatgcctgcaatcccagcactttgagaggctgaggtgggcagatcacctgaggtcaggagtttgagaccagcttggctaacatggtgaaatcctgtctctactaaaaatacaaaaataatttgccgggtgtggtggtgggtgcctgtagtcccagctactcgggagctgaggtaggagaattgcttgaacccagggggtggaggttgcagtgagccaagatcacgccactgcactctagcctgggtggcagagctagactccgtctcaaaaaaagaaaaggaaaaaaaaaaagagtgttgtccttatatttccccttatatttccttccaattctttaaaattctggtttagcttttgtttttttgtttgttttttttggtagataggatcatatacagctgacagtcaggcttctctgacttatatgtgtgagtgagtgtatgtgtgtgcccatacgctatcaggagcccttagaaatcaatgaaagtgtcaacattctctgaaaaaggtctgttttccaaggcaaccatgaagttagctttatttgagttaggggaataaagaaaacttgtgagagacatttatgagctggtatattggctttgatgatccagggaaaggcatgtctatttgtgcagggggccactcatttcgcttgtatcaactcaaagtcaaaaatcttaatgggttttaataatgctaaatgtcatattgaatttaagcttggaaaatttcagataacacctctttgtaacagctatggtttactcatctcttgggctataacatatatctcaagacacaaaatcctccattttagaaatgttcacattttgcaacctttgctgtgagcaatagaaacttttggggcaagctcttttagatgaagaaggtatttccccccacagtggatgcatacaattcattctgtcagcctgaagaagcaatttcctttctttgccttgggatttaaagcaataatgtattgtatataattatttaatttagttgacctaaacgttaatttattatttttaaaactttaatagattgtaatatatcttaaatcaaaatcggtttgaaatggcacgaagtatttaaggatattctcatataaattttaaagagagaacttatccaagccaatattaaaaaaaaataatttccttgctttatagacaaattttagtatatctcagggggcattgatgttatatctaaaatgtcaaagtaagatttataataatagaaatttattactctttattatacatagtataaatgagtaaagcaaccaattccgccttgtggaattaattttggctttgctgtttctttttagtttctggcaaaggctatttttattttattttatttatctatttattttatgtttttagtggagatggggtttctccatgttggctaagctggtctcgaactcctggcctcaggtgagctgccagcctcagcctcccaaagtgctgggattataggcgtgagccaccgggcccatcccaaaggctatttttaatagtttgagaagagtcagagcctgggtgataagagatgctgacgtttacatttctctttcttcttcagtttcacaagataagtgatcaactctgtattctcatatcacactaaatcgttctccatatctgcccaggcacagacggaagcctgcttagatatttatcaaagtggctaatgcccttgttattgtaattggtcataatttttctcctttactgagggagcacaaagaattttcctgtctgggaactgtgtactgtgctatgaggatggcaaacttctgcctacagttggaattttgcagtgatagcacatccaccatttctttatgtgcttggtcaggtgtttagatatttgaagtgtgatggagaatacaaaagatgtgggctacttcccatggctatgttatttctcatttttagtggagtaaaattatgtggtggtttatttaagaaaaaatttttgacattttcttcagtaacacaaaccattaccactgtgtgggaaaactgaccaggtctcccccaggcccagcttatccacagttcttcattcagaaggatggcataaaaagtaagattgttttacaattttacacgcctttctgaaaacaggtgcttcctttgtgaattcaagttagtgaattgatgtggtcatttcaacctagtttcaactctggttctaaagaacaaagcttttttttttttttttttttttgccctgaagattgacatttgcttgcagagattaggcacttcctgtgcccctgggtcccattctgctggtgcagaggggaggttgggggaggttgtaggggggaggtcaaagggaagccaacacattggtccatgtacatcccatggcagtgggaggtacttggagtctgtgcagatctgcacaggggcaggctgaagcttgcttagaagtttatcaggtattccatggttcatccattctacaaggtagcagggaagaattctgaagttcctttgttatctgtaaatggttagtgtgagacctgttgcctctgtcccttctcatttccctgttttccatgtctttcgttttgccctggcagaaagcagcccagcatcttcacattctgacttctggaatggaatgaaagcgtttctttctgtatagagaggtttgttttacacagagctgcctttgactgggaagactccccctaacagatttggatcataacgtgttggcaccaagccaggaaggatggccataaattgtaatttgaatgaggtttcaccagctctttgtcctgttatctcatttctggcgcggggatattgggcaacttaaaccaggagctgatttggtcaatgtgattttcatgatttaaattagaaatgttcattttgggtggcaggtatcaagatttttgtatattggtttctacttctgaatttttttcaaaggaattaaaatgggaggaaaagaggagagaaaggaaaagaggaaggaagcggtttgaaacatggacccttagagcttttggatgcaaaaagatctgtataggaatttggcacttgctgtatatgtgactttgaacaacttctctgcctcagttttttgctgtttataaaatgacacttacaaacgggcatgatagttctttgttaagagatcatatctcttcagagccaaacatagtgcttagaatataaaagatacctaaaaaatcctaattccctttcattacctctttgatgttacatctaaagatctgctgctaagttgaacacagactttatcacttccaggctggtctgaatataggtcttgctagaatgttgttcgcttaaatacaatcatatcacagcgatcgaaggatccctttgctttggtttctttccactattagaaaagtggaagggcataaaatattatttaaattttttttgtgtgtgtgacggagtctcactctgtcgcccaggctggagtgcagtggcgcgatctcggttcactgcaacctccaccccaggttcaagtgattctcctgtctcagcctcctgagtagctcggattacaggcatctgctaccaggcccggctaatttttgtatttttagtaaaggtggggtttcaccatgtgaagccaggctggtcttgagctcctgacctcaagtgatccgcccaccttggcctcccaaagtgctggcattacaggcatgagccaccgcgcctggcccaatattttgttttatattaatattattaaatataatattgttataattgataatataattgatattatataatatttcatattattatattaattttaaacattttacatttattattattattttttatatttattgaggaccaactcagagccagacagtgtttcgggagctacagtggggcaggtaggagaataaacatggagggggtgataggtatctattttagacagggtggtcagtggatacttctcccaggaggtgtgatcctgaggtctgcgtggagggagagaccccgtggaaatctagagaaagagcattccaggcagagggacccgcgaatgtattgaagattggcaggaggcatgcgtgggaaaggcaggaatggggcaggcgccgaggtcacagcccaagtcacctgcaggagcgaggttcttgtttggattttgggcagtaggaatcggcataagttgaaccacaaacaagcccctctactcctcttaagagactttgttagatgtgttttgcagagaagatggaaaataatagtgtatctgttactttgattacaattcccatcatataataattaactgctagctgtaattataagacttcctctaatttagtttagcactctggggacctctgttagcctatatcccaatcaatttcacagccattacggaggaaaaaagccatgttcctgttgaattttaaatctagaggaagaatgatgccctcatttgctagacagccttattttgttttcgctccttgttttctttctgttcaggccctccctactggcctgctgtttcaggcatgtacatgttgtttcctaattaggatagattttcacagatagttgttcattaattccatgcatctcacgtccttttaataacctccccaatttataaagcaaaaattttcacgcgacagccaggggaacgcatgcgccccctccccaagatagatgttttagtcaatatttattctctcgtccagcaccttttactacccccatgccctctgtgtaagttcatttatgtggagaaatgtaacgcaatctgctttctcagttggagagaacaatacattctcctgtggcagaaaatgcagggttggcccttctcttcgcctctgtggcgtatctggtgattggctgtgtttagatgacctcggtctccgagggcccctcttgtccaattttccctgctgctctggtgtgaaagccatccttattgtcacatggctgcagcggcaccgtgtccccagtggactgcttctctctggaggcaagcagtgatctgtgtgtggggccatttgtcacttctctagaagtagccccctgagacgtagtgacatctccagagagctccaattactagttttgttctccccccacctcctcttttttttttttgagacagagtctcactctgttgcccaggctggagtgtggtggcgcgatctcagcttactgcaacctctgcctcccaggctcaagcaattctggtgccgcagcctcccaagtagctgggactacaggcacgcgccaccatgcctggctaatgtttgtatttttggtagatacggggtttcactgtgttggccaggctggtcttgaacttctgacctcaagtgatccacccaccttggcctcccaaagtgctggggttacaggtatgagccatcatgcctggccccacttactagttttataataatgcctgtagctcatgggtagcaactagaatcactttatactatggaaggaagaagaaaccaaggctgtgggcaaggaggtggagggaatgattgcccactgcttcaggcaagtggccataaacaggagccctgtgtgtttgccctggctcctctggcagtgtgtgtgtgtgtgtgtgtgtgtgtgtgtgtgtgtgtgtgtgtgtgagagagagagagagagagagagagagagcgagagagagagagagagagaatgagtagattttcatttttagaggagttttaggttgccagccaaattgggtggaaagcgcagagttcctgtacgccccttcctctctcactcctggcccacctctcccaccaccaacatcctgccccagactggtgcatttcttacaaacagaaaaccaacattcaactgtcatcaccacccagagttcatagtttacaccaggcttcactctcagtgttgtaccttctgtgcgtttggaccaatgtataatgacgtgtgttcaccacatagtatcccacagaattagtttcactgccctaaaaatcttttgtgctctgcctgttcatccctcctttcccccatctcctggcagccactgctcttgttactgtctctatagcttcaccttttccaggatgtcgtgtagttggagtcatacagtgtgtagctttttcagatgggcttctttcacttagtaatatgtcttcaaggttcttccatatttttctgtggcttgctagctcatttcttctcagtgccggataatattcctttgtgtgatataccattgattatttatcccttcacctgctgaaggacattgtggctgcttcctagttttagcaattatgaataaaattgctataagcattcacatgcgggtttttgtatgcacagaatataaatataaatgtatattcacataatatataaatgaaatttatttgtttctgattatgaaaaaacgtgctttattgtataacatttggaaaatattaaaaaaagaaaatctttaagaatcagtataagcctatttattaatttaatgtaataagatacatgaaattggaactctcctggaaatgcaggccatatggttattatatagtataacagtcagtggtaaagacaggaaagatttagggcattctgagtgctggttctgtttccattaaaaccactccttaagtgactttttatgatactccacattcaaacagacactctcagctttagaaaatggctatttagcagtcctcacaaacaactgaagtccaaggaggtactgaaattcttctcttaaaaaattcagatatactttagccatggttctcagtggtggtggagaggattcccgacattcatgtggaatccagcagtttggacacacacaggttttataaggctcgatgtgactgcattcagctctgggagcctccatgtctcttgggcgtgttctgggtgcagaggcagaggatgctgctggggaggacagggtggtgttgagctcatggaatagtaatgcctcaaaagcagcctcagaagtggacgtcagtggacagcctgttgcattcgtttttcatttttaataattctggcaaagtactgtgttaatcggtttttcattgctgtaaagcaatacctgaggcttggtaatttttaaagcgagggctgggcacagtaactcatgcctgtaatcccagaactttgggaggccaaagtgggcggatcacttgaggtcaggagttcgagaccagcctggccagcatggtgaaaccctgtcctaactaaaaatacaaaaattagccggacatggtggtgggcacctgtagtcccagctacttgggaggctgaggcatgagaattgcttgcgcccaggagggggaagttgctgtgagctgacatcgcaccactgcactctagcccgggcaacagagtgagactcagtctcaaaaaaaaaaaaaaagaagacaggtttatttggctcacggttctgtataagcaaggcaccagcatctgcttggcttctgtgaggctgcaagaagcttttactcatggcagaagatgaaggggcaagcatgtcacatggcgaaagggaacaagagagagagtaggcggtgccagtctctcttaacccactctcacttgaactaacagagcaagaactcactcatgactgcaaggatggcaccaagccaagggatctgcccttgccttgaccagaacacctcctacctggccccacctccaatattggaggtcacatttcagtatgggatttggaggggacaaatgacaacactatatcaggtattgaagatcattttcgactttttttttttttttttttttttgagacagagttttgctcttgttgcccaggctggagtgcgatggcgcgatctcagctcaccacaacctttgcctcccgggttcaagcgattctcctgcctcagcctcttgagtagctgagattacaggcgcctgccaccatgcccggctaattttgaatttttagtagagacggggtttcatcacgttggtcaggctggtcttgaactcctgacctcaggtgatctacccgcctctgcctcccaaagtgctgggattacaggcgtgagccaccgcgcccagcctcattttcgactttttaacaaggcagacaataccaagttaaccttaaaataccgtgttttcatggcttctgagaatgggagtacagatgctcatcaacttacaatgagaatatgactcagtaaacccatcgtaagttgaaaataccttaagttgaaaatacatttaatacacctaatctaccgaacatcctagcttagcctagcctaccttaaatgtgctcaaaacacttacattagcctacagttaggcagaattatctaacacaaagcctattttataataaagtgttgaatatctcatgtaatgtattaagtactgtactgaaagtgaaaaacagcatgggcgtatgggtacttaaagtatgatttctactgaatgcttattgcttttgtgccattgtcaagtcaaaaactgtaagtctaaccgtcctaaatcagggactctctttatatgtctagcagcttttaattttaaaaaaagttaggtattcatggtctctttttggtggaaggaagcaggcctgcgggcaagaatacaaatggaggcacatataacctttgtctggatatgtaaaagttgtaagtccaggtaacaaattgtaaaataaaatatattctcccaccttgacaaatagactttccgttgttttgttttgttttttttaagacagagtcttgctctgtcacccaggctggagtgcaatggtgcgatcttagctcactgcaacctccacgtcctgggttcaagcgattctcctgcctcagcctcccgagtagctgggattataggcgcctgccaccacgcccagctaatttttgtatttttagtagagccggggttttgccgtgttggccaggctggtctcgaactcctgacctcaggtgatctgcctgtctcggcctcccaaagtgctaggattacaggggtgagccattgcgcccggcctagactttcataacgacttggaaagctggattcagagttacaattgtcagactccttggaataccatgtgggaacgtaaggtagggaaaagccagccccagccatgacctttccttatcctcccacccctggctccatcttggacaatgaaaggttttatggacacaacagcgtacacaaagaagccccctttaaaatccccaccaagagctgccctcgggcctatgagtgcacacgtagcatcgtcctctaccttgccaggtcagaactaagaaagagcccctagaaggcctggacgtgggcattgggtccagggtgccctggtatcatctagaaaggtatctgcctgtctgcctttaagaagaggcgtggctggtagaaggccagagaagtccctttgatgtgcgtgcccaggtcctactacgaatctttgaatactggtctggttttgatcctggaaaagctagtcgtcactttctgcatgaagaaaggagaatgaggagcctccatttggaatgtattagaattcagcagcatgcaattaaaaagttgtttttaatgggtgaacatcagtgtttcctggcataggttcatttaaaaagctctgggctcgatcaaacagcaaaatatacatttatacaaggtggtttgttgttgtttttagactttacttttcaagaaccataatgaagttttgcttaaaaatttcagtctttggttgcacggatcatggttctcttctgagctgatacaatgtttcacctcctggaatcttgtctgatgaccttcttcctgctcataacatctgtgattgtataggtgctcctgcattcttaattcttactttcggggggatgctgatgagaagagctaatgtaatttcaatacataggaaaaggcaaagccaagatcaagtttaaattggaagatattatcttaaagggtacaatagtgaagtgaacgtgtatactggtaaatcacttgtcatttttgataacagtaatacaaaagttttacaacttgtccattagtgagattctcaaattgctttagagaatatagaaaaacaagaaagttggagtcctgaggttctgttctcctggtgattggagagaatctaaataataccttgtttttacatcattaattatttaatcaaaactgaaaacattatgtccataatactgcatccacaaagtgggtactgaggaatgagtaagtataaattctccaaaaatctctcacgttccctcattcttgcttaagaaagtctttgtgctttctaaaaaattcctcttaatagattttttaaaaatatatctttaaaatgaggaagccatactgaaaagtgatatgttccaaggctttttcccaccactggaaatattcctgattactgaatgtaatgaaataaatttgtcatgttggacataatgtgtggtggagtgcagaatgaagagcccaaaactcagagtggaggcttgacatttatagttataaatatgtgctttaggaattgatttatatagaaaaataccagggctaagatagataaattgaagcttgttctcactaagtaggttagacagttcatcaaatattggttaaaatctttctctctctagaggttgaaaataagagattaaatggtagtatccaacgcatgggactttgattgtctagccgaccagtctgttcaaatgaatataaatgtagttgggcagcctgtgtatgcctagtgtgttgtagcatgtggctcagcaacctagccggccactgccttgttttgttgcttaggctaagaatagactttatggttttaaatggttgggaagcctgggggcggtggctctcgcctgtaatcctagcactttgggaggccgaggcaggcagatcacctggggtcaggagttccagaccagcctggccaacatggcgaaaccctgtctctactaaaaatactaaaattagctgggtgtggtggaaggcacctgtaatcacagctactcgggaggctgagaattgcttggacccgggaggcggaggttgcagtaagctgagatcgtgccactgcactccagcctgggtgacacagagagcctccatctcaataaaataaaataaaataaaataaaaataataaaataaatggttgggaaaaacatcataagaagaatactttgtgatatgggaaagttatatgaaattcaaatgtcagcatccacgaataaaattttattggaatgtagccacacccattcacgtatgtattacccgtggctcgtttcatgtgccagtggtggagttgagtgcgtgtgacacagaccttatggccaggaaggcctgaaatatttaccatccggccctttgcagagaaagttttctgaaccctggcttagcagagccagtgcttcttgctgctggcagcccgtggttgccccttctttccccttgtcttcttgcttttaccttaaatttgtgttaaattatagtgataggtaatgcttttgctgagtgcttactattttaatttcttcaattctcatatgaactctgtgatgtagattcaattattatccccattttacagatgaagaaattgaggcataaaaacataagcagcagggcttaacatccagcctcctggctccctccactttctctgtttttttttttattttttaagagacaaggttttgctcagtcacccaggctggaatgcagtggcatgatcatggcttactgtagcctccaagtcctaggctcaaatgatcctcctgcctcagcctcttgaggagctgggactataggtgtgcatcaccatgcttggctttattttattttattttatttcatttattttttgtagagatggggtgttgctttattgcccaggctggtcttgaactcctggtcttaagtgatcctcctgcctcagcctcccaaagtgttgggcttataggtgtgagccaccatgcccggctctgcactttctcttgaccaccctgtcccctgcatcttggagatcaacttctggcatttgtacccttctttatcagattcaccgtattcacgtaagaggttgtgtgtgtgtgtgtgtgtgtgtgtgtgtgtgtgtgtgtgtgtgtgttagggtcttcttgcgttggataaagaaatacctaagactgggtaatttattaagaaaagggctttaattggctcgttgttttgcagacagcacaagaagctttttgcggcgtctgctaggcttctagggaggcctcaggaaacctataattgtgacggagagtgaagcgggaacaggcatgtcacatggtgaaagcctgagcaacagagtgagagaaggtgccacacacttttaaacaaccagatctcatgagaactcaccattgtgtcacagaagtcgtgctcgggcagcctgcgtgcttgcagcaggaaccaggctctaggcctcctcatcagggccactgggaggaggcgacttcactccatgcacctgcccctggggaaggtgcgcctgggagagacccacacactgctgctgccggcttccctccaggcccacctcctccccaagtgacgctcaccacgggccactatgcacggccacctggcaccaacttacagagccgcccaccactggggctggcaccctgtgccttggaccagcgtccgcagccgtagagagaagtccttggtcttccccttcatccttgctggctacctccgtgggacaaggactgattcctcttttccccttcccaacatcgtcagaagacagtgtccctgcacaccatccatatacagcctctccttgaaaaaagacaggccaggctcggtggctcatgcctgtaatcccagcactttgggaggccaaggtgggcagatcatttcaggtcaggagttcgagaccagcctggtcaacatggcgaaaccccatgatataaaaattagccgggtgtggtagtgggtgcctataatcccagctactcgggaggctgagtcaggagaattggttgaacctgggaggcagaggttgcagtgaattgagatggcaccactgcactccagcctggacgacacgagcgagaccctgtctcaactgtgccccccacctccaaaaaaaaaaaaaaaaaaaaaaaaagagaataagcttctacaaacaaaagccctgtattgagcttcagtctgctctcggggtgggacgggggctccccacatctctgggaaaagagaaggctgtagccacctggggggcccagggtggtgggtctggcaggtggtgccacagctaagagagcagataccagaagttctaagaggtgcttagacaagggctggtgccaggccatgggtgcccagcccagcggggccatgccggagcagataaagctcaggacgtcaaaaacaccctggacaccaaggcagaaaccaaggaccttccgcaggcaaataagctcccagcatccattccggctgtcagtgcccctgtatcctgtagttattcttttaacaatagcaaaagccatttatggattccctcttgaagcaaaaccttgtttcagtcacctctctctggctgttactttccttccacccgtgccctccctaagatgtatgtacctggcctgtcctccctgggccatacctgtggcacatgttgcacacttgcacaggcacaaggatgtctttgggtcccttgccctgcagtttgcaggggtctctgctccgagttcccaagtagtcccctcagggagaaatagcctcacatgcaatatgggtgtcttagcggcccatctggaagggctgcggcagttcctccatgtctccaggtagccacttacctcttgggcttagacacctttgcacgtggttgcatttctttaatcttctatgggtcttttggtgtgggtttgattttgcttttgcttttctaggtgagatttcccaagtgcatcctcagaagctctgggcatgccaggggacccccagaaccaagaagggagggtgagtgggtctccattccctgagaagccaggggcagggcaggataggggagaccaggagcagagttgagcctcacagaagccaacacaagtctctgctcagcacccgtgccagggctgcgggcccagggaaacagccccatttcatcacagcccctctcagagcctcgagatagctggcgcaggctgctggcaggagagggatgccctgtccctggcagcccctccacatagcataccccagcatctgccaccaccttcgtccttgctttgaccttgaagttaattctcttagagtttaattttggttcatttctgcataggcacaatacagttatttgtttaaaatgtttattatatatattatatataatatattaataccagtataaataacattaatatattatcaattaatatattaattatattaactaatataattatattaactaatataattaatatataatcaatatgtattatatataaatatataatatattaaacattttaattttaaattaaatattattaaaatttattatatatacatatttgttcataagatttacgttttaaacagctggtgtagggtacatttttttttttttttaaatcttccagtgcagtatattttttaaagcacaaattgatgccaagactgggtgaggaatatacattacccccttattattttgtagttttgggaccttacctgtgaaactcttaaagattttcctccctcctatttcagggtgggtcacattctgatgaatgtttcacttgtacagatcctagcttattgccttgacccaaccgtccctacagacactgggtgactctcaggctctccctgcatctcgcaccccaaaatgccttgggacccttgaccccacccttctttcgtagcagcccacagccttgtggcttgtatgattttgaaagtcccattctattttatgatggttgataatagtcattaacctcataaagtctgttttttaaaaatctatatctatctatctataaagaacacactattgaaaggacagcattgcctggtcaaatggtgaaaccccgtctctactaaaaatactaaaaattagccaggcatggtggcaggtgcctgtaatcccagctgcttgtgaggctgaggcagaagaatcgcttgaacctgggaggcggaggttgcagtgaacctggatcgcgccattgcactccagcctgaacaataagagcgaaaccatgtttcacacacacaaaaaaagacagcatgaagccatgtggcatctcctatgacccaaacacctcccactagcccccacctccaacagtggggattccatttcaacaaaggatttagaggggacagcattcaaatcatatcagtgtgtgtgtgtgcttgtgtgggtgtgaggttactttacctagtcctgatgtcatgggcttaatgtgctactaatacattttttaatacacattgaaaaatagttataactgtaaagatgaaacatggttttccatgtaccactaaaaatggtttcctgttccattagtggtatgtgtagcccttctgtgcaaccctcttgggtctccactgacagctcttgacctatttgtgggacttaaggtaagatattttgtagattctggtttttaaatttaaagcaaactcaagctgtatgatcctgaagtacaagagacgatacagaataattcaaggaggttgggaaagctttctttcttttgttttttagagacagggtcttgctttgtcacccgggctggagtgcagtggtgtgatcatagctcactgcagcctcaagctgctgtgctcaaacaatcctcccacctcagcctactgagtagctgggactactaatgcgtgccaccatgccagctaattaaattttttttttttttttttttgtagagatggggtcttgccatgttgctcaggctggtcttgaactcttggctgcaagcagttcttctgctttggcctcccagggaaaacatttttaatttgggtatcttcccccttgatctttgacattttttttttcatttgatgatgtgtttgcttgattacttctatttccatcctcttcagatgttatatatttccttgagtatcttaattgccttatttgttcattaaacttacgaggtgcccagtcccctgcttgagactggaagtgcatctatgaacaccacaggatatgtggccccagagtgcgttacaagaatatggtcgtcagccagcaaatgtcttcacctgctctacttagattttagcaatttgcattgctcctgaggtgctcgattgcatatgataatttggaaacagcaggtcccagcagatagaggagcagctgtcagatctagaaacctgtccattggcccagattgttctgatgatttgcagcataaccttggaaacatcgtttcattttccgttccaggttttcactctggaaagtggaaaatcacagcaaatgaagctggtcttaaagaaatcgagtgccccacatactgtaatgagctcgcttttcatttctcatgcctaccttgtttacatggacacgtcctgttggtgtgtaaccttatgtagtagatagatacaaggtatggagatacatatatacgatgtgatacctgtagtcccatgtagatacaggaggttttctttcccaaggcatgtcaggaattgtccgtggaaatgacagcctgaaagagataggtgtacagtgttggtggacaagccagtatcagtttggcgaatctctgaaagcccattttgagcctgtttgtaaggttgagtgaaagaactgttgaagtgtgaagaggtgcctgggaaaggactcatcctaccaacttttgagttcctggggagtgggatatagcctagggtcgggtacataataggtattcaatgaacatcattttgcacaatccttgtaatgcttagtggcccctggcactcagagaatcactgtatgtttagatcatgacagggctgggattaaaagctttactcttttaagtattctgaatttatggaactattatgttttacacttttttttttgagagggagtcttgctctgttgcccagggtagactgcaatggcacgatctctgctcactgcaacctctgcctgttgggttcaagtgattctcctgcctcagtctcccgagtagctgggattacaggtgcccaccaccacgccaggctaattttcatagttttagtagagacggggtttcaccatgttggccaggttggtcttgaactcctgacctcaggtgatcttcccgccttggcctcccaaagtgctggggttacaggtgtgagccaccacgcctggcctatgttttacacttctaaaagatattgataatattgagacatctagtttaaacctaagtgcataatggtaattcgccaaggtgaaattgattacttttccatattgaaggcataaaagcatacttcttgaaccaataatgacacatgggtcgttgtttcacactagaatcacatgctttcattaatttttttagtttgtttgccgtgttttttgtagcaaagaccttgacttttgtgatctcatttaaaatatcaccaattgactgacatgttaaaaaaatctgttttataaactgtcaaaagaaaaagcataggtacttcaatcctctcattcagtgtgctacatccgtctcattaattgccttttcagagagcagtgtcattggaggtaatcagtctttcggaaaaaaacagatcaaagagttgtcaggaggttgtttggctctgagataattcatttcttgctttctttcatgagatacataggagtgtggtagctaatgatcagaaatgtggaaattggaaattgaaatgtatctatttgatccttgtaccttggtcaaaatacacaattaatctgtctgctttttattttcttctgcccttatgttctagacacggcgtaaatctcaagtcatgccttttgtcacctatgattttagccaatggtttctagttaccttgtggtttttcatacggatatacagtgcgctgataagcgttcaaacatctagccccagaggtctctggtgtttggataagagttagcaaaagcatattgcatgggagatgtgcttatcattttgttcctttccttccctcttttcattctctaattcaagaatttctgcttgacccagtttaaatgtcttctgcacaagtctctcctcataatgctttattggtctttgtcttaggcagtttgaactgctatagtgaaataccacaaactgggcagcttaatcaacaaacatttatttctcacagttctgaaggtgaggaagtccaagaccaaggtccctgatgattgggttcctggtttgaagacagcctctctctatatatatcctgacatggcagagagagaggatgtctctagtgtctgttctttttgttttttatttttgagacagggtcttactctgtcacccagactggagtgcaatggtgtgatcatggctcactgcagcctcgacctcccagcctcaggtgatgctcccaccacagcctcccaaatagctgggactacaggtgtacaccaccatgtctggctatttttttgttttctttgagacagagtctcactctgttgcccaggctggagtgcagtggcgtgatctcagctcactgcaacctccgcctcccatgttcaagtgattcctgttcctcagcctctcgagtagctgggagtacaggcgtgtaccatcatgcccagctaatttttgtatttttagtagagacagggattcaccatgttggccaggctggtcccgaactcctggcctcaagtgatccacctgccacggcctcccaaagtgccaggattacaggtgtgagccactgtgcccggctgcctggctaattttgtctattttttgtagaggtggggtttcagcatgttgtctaggctggtagtgtctcttcttataagagcactaataccattcatgagggctccactcatgtctaatcaccccgcaaaggccccacctccaaataccatcaccttagggattagaatttcaacatacggattttgcggggacacagatgttcagtccatagcattcttattattgcagcactaaacagtcagcttggtgtcataatctaatagaagaaagggactgtattatctgtgtcttctagcaaggtttagtatattgcacacaagtacttggttttgttgttgttatttatttacttataaagttactgtttgagtgctgcactgtgtcaggtactcactcatcggtgaaagaagcactattattttcctcattttacctatagagaagctggggcttgggggaggatcccaggtcattcaacatgtgagtgaaggggttgggacttaaacctagttttattctaaagcccctgtccctaaccgatccggtacaatgcaaattatatggaattaactatataaactgctttatgaacattgtggatatgttaaatttaggattttgacccacattttaatgaactaaaaaaagtagggtattgagtctattccttttctttatactgtggtaatagattaattatcctctgatggattttttaaaaaacagctttattgaactataattcatacccctttcgaatcatccatttaaaatgtacacttccataatttttttatttttatatttactttactttatattatattactttatttttttgagatggaatttcgctcttgttgcccaggctggagtgcaatggtgtgatctcagctcactgcatcctccgcctcctggattcaagtgattctcctgcctcagcctcccaagtaactgagattaccggcatgtgccaccacacccagctaactttgtatttttagtagagacagggtttcaccatgttggacaggctggtctcgaactcctgacctcaagtgatccacccacctcggcctcccaaagtgctgggattacagcgtgagccacttaacatttattgtttgagacaaagtctcactatttcgctcaggctagagtgcggtggcgtgctccaactgcaacctccacctctcaggttcaagcgattctcatgcccagcctcccgagtagctgagattacaggtgtgcaccaccatgcctggccaattttttgtatttttagtagagacagggtttcaccatgttggtcatgctgatcttgaactcctgagtcaaatgatccgcctgccttagcctcccaaaagtgctgggattacaggcatgaaccaacataccctgccagttccataattttagtacatttataaagttttgccaccatcctcaaaattgttcttaggacagaagaaactctgtacccattaccagccatccgtatttccctccagctcttctcacccaatccccaaccccaaccatttaatttgtctccatagatttcctgttctggacattttatatgaaaggaattatgcagtatggagtcttttttgactggcttctttcacttggcatgtttttgaggttgatctttgttgtattgtgtctcagtacttcatttctttttattgctgtgtaatactctattgtatggctgtaccatattttatttatccactcattaattgatggacatttgggttatttttctttttggccataacagctaatgctgctacgaaacttgtgtacaagcttttgtgtggacatacgttttcacatttttttttttttcttaaggactgggtcttctattatccatttggagtctagagttacttataacttgcctagagtccaaccttgggtgattctttggctagggcacagtgcagtgtttttggaagcagaaattattcattgatgttatttcattaatgtcactgtatagtcatcccttggtattcgtggggaattggatccagacctctgctcccccacagatactaaaatccatggctgctcaagttccttatataaaatagtgtaggccaggcgaggtggctcatgcctgtaatatcagcactttgggaggctgaggtgggcagatcacctgaggtcaggagttcaagaccagcctagccaacatggcaaagccttgtctttactgaaaatacaaaaattagccgggtgtggtggcgggtgcctgtaatcttagctacttgggaggctgaggcaggagaatcgcttgaacccgggcaatggaggttgcagtgagccgagattgcgccattgcattgtcaactgggcgacagagcgagactccatctcaattgaaaaaacaaaataaaacaaataaaatagtttagtatttgcacaaaacctatgcacattctccaatatattataagcaatctctagattacttataatacctaatgcaatgtaaatgctatgtaaattgttgttatactgcattatttagggaatagtgacaagcaaaacaagcctgtacatatgcagtacggatgcagtgcaaccatctatttttccttttttaaaatattttggatctgcagttggtggaacccaggggtgcagaacctacggataccgaagaccaactctcttggccaaattgtgtggcagcgagtatgagtgggaaaaagattgtcttcagggaatcagggaagccaagtagaaatgggagtaaaatggttaaaagccttgagggttaagatactaaaatgccctttggagagcagggatccttgcggatttgaagcaggctggaacgtaccaaagaaagttaattagtgaatcacactggtaggacagactgcccaataccttaatagaaattggcaaggtactttatgtgggacactgactttttctaccagaatagtttctatgttagataggactcctgtttgcaaataacatacatcaagccaagatcatgtgaattttttttaaaggaggttggtgttaattttttttgaagacataaggtgcctcctggctaacatgaacagtaatgttacctatctagggattgtgctggatggtgaggcccccaggattctgggctctgtggctcttttggcttatcttgtttcttcttatttatgtcattctctctcctgcagcttttaatgactttttttttttttttttttttgagacagagtttcgctcttgttacccaggctggagtgcaatggcatgacctcagctcactgcaacctccacctcccaggttcaagtgattctcctgcctcagcctcctgaatagctgggattacaggcatgtaccaccatgctcgactaattttgtatttttagtagagacggggtttcttcatgttggtcaggcaggtcttgaactcccatcttcaagtgatctgcccacctcggcctcccaaagtgctgggattacaggtgtgagccaccgcacctggcccacttttttttttttttcttattcctcaatggacacagtgaaaaatgtagctgctgactgtttctgaactggatatcgcatctggatgggagatgtggtatccaagaagacccctgcgggatcttcagtacaaagtctaaatacccttagtagcctaggatggcagacagaaacctgctagataacctttaaaaagcaggaatgtgatgtcctgtacagtttgaggacaatgagacaaaaagaataaattgttgtacatatacagaagggtttggcttggcatcagtgtctgtcagaggcgtgatgtagtcactgcagatgaatgagcccactcttgggctaaggggagcatagtgtcctgatcccactgaattttcaggagggcactccagcccttgaggactagagccagctccatggtcagtgttttaaggaagaccttgagtgagttgagtagtcagacgagcagaaccaaaatggtgacaggaaaccctgccaagggtagcagcttacccggaggaagaagcagtaagggaagacaggaccactttcttctgttatttgaaggcttaccatacagaaatgatagagaattggtctgagtttctccagcaggtgggagttgcagaaaggcatctcttaaatctatcttaaaaaaaaaaaaaaaaaaagtttcagccaggtgcagtggctcacacctgtaatcgtagcactttgggaagctgaggtgggcagatcacttgaggtcaggagttcaagaccagcttgcccaacatggtaaaaccctgtgtctactaaaaaaaaaaaaaaaaaaaaaaaaagacaaaaatgagccaggcatggtggcgtccgcctgttatcccagctgctcgtgaggctaaggcaggagaattgcttgaacccgggaggcagaggttgcagtgagctgagatcgtgccactgcaccccagcccgggtgacagagtgagactctgattcaaaaaataaaataaaataaagtaaaaattcctatctcagaagcagagcaaggagttgcctaaaattttgtgctttctagattggagctccatcacttaccattcatccaggatattacagaaggcattctagatttcctctgcactttaaagaccagttgaacatgacattagtcagcatgtaggcactgagtatggaaaaggttcttttatttgaggccgatgtcacagtttagccatccctccatcacccacaagtcctttcagtgggcatctcctcctccctctgctgtgcgtgtgtttgggggagcactaactaattttgatggtagcctaagcaaaatgcaattagggaaatctcgtgccaaacacgcatctgtgccaatgtttgccttcattagcacgcataatcaggagtttgctttaaacactgtatgtctttccctgtggaaacatgaaatggagagggtgcagacggaaacctgggtgccctgcataccgtggagtgcgagacagtgagcccaggagcctgagatagcacctatggtttggggagaatcatgttcttggtgattggtgttatggtcagagactgagatgcatttatcagggatggtgtgtgagtgtgcacatgtgtacatgcgtgtgtgaatgtatacatctgttcatgctactcattttagctctatgtggggaagcacaattaaggaaatagagaaccagagatctcaaaaaacaaagggtaggatgtggcagtatcgtttacgaaatgcttgcccttaagcatatacatagcaatttgacacaaaggactctatttttttctactcttttttttttaaattttttttgaggtggagtctcactgtgtcacctaggccggagtgcagtggcacaatctcagctcactgcaacctctgcctcctggattccagtgattctcctgcctcagcctcccgagtagctgggattacaggcgcccaccatcatgcccggctaatttttgtatttttagtagagatggtgtttcaccatgttggtcaggctggtctcgaactcctgaccttgtgatcctcctgcctcagcctcccaaagtgctgggattacaggcgtgagccaccacacctggccttttttctactcttaataaacaggtttgcatatagtaaaaaaaagagaaactcagcttcactttgcaatttatgggtttttttggtggcacaggatgtataggtttctatttagtgcctggcttttttgatataagaagatgagcataccttataagaacatacatcttcatatgtgtgataaaaataaagttgttgatttttccttttctatatatgaatgaacatggtgggaagtttgaaaaaacagaaaaggtggacgaaggggaaaataattgttatttacttaccactgaaagtgattctgataattctggtattttgcccattgtttagtctttattacttgaacatacacatgtatatgtgtatactacacggagatatatacatattcatgcacaaatgcatgtacatttttgtacccaaacaccacatttgcctggaggtagatggctttgctctgtttgtgtttgttagaatgttggtggtaattggaaatcacttttttttctattaaacagtgactttctgatgttttatttatctgaaatgtttgtgaaagccaaccgcatactggatgtttcttagaatattatttagtagtaaagaataaagagccaaaattaagagttcaaaagtgggtatatttctctgctgtgtgtaaaaaacatacagagaattctagtacaaggtgaaaaactaaagaatctgagtcactgtgtctaatgtaaagaccagaaatttcaccctttctctgccatttcttgctaaatttctctctgcttcccctcatcactgaatctatgccaaacttcatttttagtggttgaaaatagaaatttaatctttttttaaaggagggtattatctgtttaaaataatttaatggcccagaggaataacgaatatttgtttttcttttataaatatattccaaaattatcagttggctagttgtcgctttggtcctagaagctgaataaataaattctgggaaccaagtcttatcccatattgccttggaacaatctgtccccctgctgggaacctgatgttttccttcagtttgatgggatgaacttctttgcaggagcagcgtgatgggtgggaacccagagcaagtgtcagcttgtcccagggagtcttgagtttcacagcccctcctgttcctgtccatctcttccttccaccttgagattcaggtcaatttgaggagtcagggagggaggatatccgatcctttagtcctgagtgctggattccagtagatgtgtgaagttgctgagagttccaatgggcatttggagggacagatgcagaatattccgtatatgtaggtatatgaggtgggagaaggaaagggagccggaggaagtttgggaagaaattgtcaaagctacaggaaggaaacttggatgctgtagtggatagtttttgatcgtttgcccagtggttgcttcccatcctcttcttaccagcacccagtatctgttttatgggatcgccccctgcccgctgcacaccagctgtgccatttgggaggaatgggttccatactcggtgttggcattcttcacagcgccaagcactgagcgagttgggtctggaacttacatggaattttctgtaattggtacagaatttaaatgagaggcttccccaacaagggcatggctggtggtttcaggggctacccagataccaaggaggggaaaggccatttagagtgacagatgtggtgggggtggggcttctggtgaccttggttggggctgtgcttgagtgagaagagaggatgctgctgcttccagagggagctgttgtaggtgatggcagctttgaggatatgggaggagtggggagaggaagagggaacgaccaggtaagagggattttgatttaaacgatgggggaaaaggaagtatatttatgtagacgcatggctagatttgatcatttcttgaattagttttctctagtttcttctgctcatcagctttctctttaactcagcatctctctgaatgggcttattactcttctctcatctctagtactcccctgaaagaaaaaaattccagacaccctcctgcctctctttctgtttcttccctgttcttttctgctgtctcttgtatcttagtgctttgcacagtacctgccatatgttaggtgctcaaggcatatttgttatatgagcatgatatggtttggcttataaataagtctcacgagatccgatgggtttatcaggggtttctgcttttgcttgtctctcatttttctcttgccaccaccacgaaagaagtgcctttcgcttcctgccatgattctgaggcctccccagccatgtggaactgtaagtgcaattaaacctctctttgttcccagtttcgggtatgtctttatcagcagtgtgaaaagagactaatgcagagcaaaagaaaggaattttatgacagggtctcatcctgtatcccaagctggagtgcagtggtatagtctcaccttactgcaacctctgcctctcgggctcaaatgatcctcctgcttcagcctcctgagtagctgggggaccacaggcacgtgccaccatgcccagctaatttttgtgtttgtttttgtttttggtagagaaggaatttcttttctttctttttcttttcttttcttttctttttttttttttgagacagagttttgctcttgttgcccaggctggagtgcaatggtgcaatctcggctcaccgaaacctctgcctcccgggttcaagtgattctcctgcctcaccctcccgagtagctgctattacaggcatgcgccaccacgcctggctaattttgtatttttagtagagatggggtttcttcatgttggtcaagctggtctcgaactcccaacctcaggaaatctgcctgccttggcctcccaaagtgccgggattacaggtgtgagccaccgcaccactgagttgcccaggctggtctcaagtgatcctcctgccttggccttccaatgtgctgggggattacaggtgtaagccacctacccagccagttttgtatcttttatgtcatgttggtacatagcctctctagctacctagtttttcaaaccctgcccccacccctaccctcgcctgccccttcctgtccacatcttctcttcacctctttggccactgtctcagtttcaactttggccctctcttgccagactgatttctgtggctcctctcccactgctctcgtggttcttaggttccggctgagcaggggttggtcacagatgcccccctaaggctccaaagcctccatatttcctactgggcactcagttcaaaccttttcagcttaacagtggtggtgagcaattatgagtcagactaattaatgtgatataacctgtgaccactggcccagaaggagctcctcaagcccagtttttgatgcccagaaagccggggaaccccagctaagtgattgctatggtgcctatagaccttggatgacaaaatctgatgatgttttcctacatttttaatgggagaaaagagttgctaacttaaagcccatcagaagtgataagaaagctgatgggatgtgccagcccatgaggtggaactagaggaaaatgagccttccgcgttggggagctgggagtattacatgtactccactgtgcaaactcatattgcctcagggttgctttaatttctcttcttttggcttgtctgccattgaattaattaaatttcaagaatagtctattgttaactgggtgagttcactttgggaagaacccaagttcaccgagggtgggctctgcaaatatggtggccactgcatgaccttgagaatttcctttgactcagccgggctgaaggggtgaatgagtctgagagccgttatgaagagtctaggatctaaaagagtcttcagagaacctgaggagttagaaggactttcctgtccttcctcttatttgtcttcttgcctgatgacaagtaattgtacaagtgaggaacatcagttaggtgccaggagacctcatcaacggtcattcctcttagagtggtccattaaacaggaatatcatgacccaagtggttcaacccttagttctttttaaggttgaaaatctatctttttctagagaaacgttgctcttgttccataatcatactggaaaagtactttgcagggagtaaaaacatgcaggaacaaattgtcatccagtaactctggcatgtgtataggagctgtcagcactccatcttacattacattttctttcccatcccttcctccagagaccccttggaaagtgattggatgaattactcaacctcccttggcttgagtctcatcgtaaaatgaggaggaaggtactaaatgagctcttagcccccttcctgcctttgcattctgggagtctgtggagcaagacaggagccagtcctgttgcctgaatgataaggagagtcggcagaaccggccagaggtcctcaagccaaataaacttcagaaactctggggttttcttttccagtctgttgactacccatatgttttgaatcaccgctttgtgtaatataaactaaaactcttcaagtgcttgaattgaagttgttgtcaggaacttttgatgactggtcagaaaacaaagctctaggagtctgggctgagagaagaacacagtcattctggaaagtttgtccctggaggttggcactgagttgctgctctgaaaagcctgggacactgggggccaaactcaaatggccacagaccagggaggccccagaaatgtgtgggtgctgggtctgagagagggcggcacaggctgcataccggggcttgttgctatagcctactgctgccagatctttctattttttcaagattagttggaaatcctaatttttatgtgaagtcttcttatttttaaatattggatcaaaaaggaaacaacatttttttaaacagtccactgtccaaacaaaatatgtctgcaggccacacacaccctcaggccacccagaggtatagtctgggcatatagaccgcagtatgtcttgtacatattgttttttgaaaacctttttattgtgggtaatttcaaacatttacacattgagaggatagtatataaacccccacagaaactctcacatactcatcacccaccttcagggaatatcaacctgtggccaatctactttggcctgcagtcactacacacacatgcgcgtgcacacacaaaaacacacccacatacccatactgggttgtctgtatatgaatcacagatatgctctcatttcatctgtatatactgctaaagataagaacataaaaaagccatattgttccagcctctgtctgggttcaaaaaataaaaagaaaagccatattgcctgtgtatctcaatattatcaggcatatggtcacttttcaaacttaacctctgtctcataattttttaacagctcatctttttgaatcgtgatccaaataacacccatacattgtgtctcagtccattcggctcctataacaaagcaccctaatctgggtaacttagatagaacagaaatttatttctcatggttcttgggtattggaagtccaaaaccaaggcagattcagtgcctggtgagggcctgcttcctggttcatagactactgtcttttcactgtgtcctcatgtggtggaagggaaaggggtctctcttaggccccctttataaggacaccaattatttcccaaaagtcctaccccaggctggagtgcagtggcgcgatcttggctcattgcaacctctgcctcccgggttcaagcgagtctcctgcctcagcctcctgagtagatgggattacaggcacgtgccaccacgcccagctaatttttgtattagtagagacggggtttcaccatgttgatcaggctggtctcgaactcctgaccttgtgatccacccgcctcagcctcctaacccttcttcttcttttaaatgtatttttccttttatttttagttgacatgtaataattgtacatatttatgggacacagagtgatattttgatacaagtatacaatgtgtgatgatcaaatcaaagtaattaccatatccatcatttcaaacatttattatttttttacgttgggaacattcagaatcctttcttctagctttttgaaaatgtacaataaattattgttaactgtagtcaccctatagtggtatagatctctagaacttattcctgccatttagctgtaatttggtatctgttaagcaacctttccttatcctcccttccctcctacccttcccaccatctaatatttcaccttctaataccattgccttggaggttgggatttcagcatatgaatctgaagggcacacagacattgagaccaaagcaccttgcaactgatgcatgtgtaccttcagtctcatgtagcttcctcattatcatccctttctttctttcttttttttttttttttttgagatggattctcgctctgtcacccaggctggagtgcagtggcacaatctcggctcactgcaagctccgcctcccgggttcacgctgttctcctgcctcagcctcccaagaagctgagactacaggctcccgccaccacggccggctaattttctgtgtttttagtagagatggggtttcaccatgttagctaggatggtctctatctcccgacctcgtgatccgcccgcctcggcctcccaaagtgctgggattacaggcgtgagccaccacgcccgacctatcatccctttctttcttctcttttctctttacttaagagtccaagtcctttgctttgtaaagtatcttacattctgaagtttgctgattgcattattatagatttgttcaaaattgacatgctaatttaatatctttagttttatactaaagagagtctagacgcttgtattttaccagttttgccatatttccccctgctgctactctatgtagcttatcattatgagctgctgttttactgagtttttctcccgtccttttcttcttacaaatataagtatactggggacggtcaaatctgaagtcttgtcagcctatgcctgccttttgggatctgttcacgcatctatttgaagcctgtacgctttcttgaaatgcttttttctgccttgtgatgtgaaagtttggtcgctatttttagctttttagactcctggcagcaaatccgaagcctacagaataattttggattgggatattttggatttgaagtcaactgtggcactctaattaaaaatgttatgcgtgtggctcagccagctcaaatgaataatttgttgagctacaaacagtaacaaattgcagaaatgattcacctggagtttgagaaaaggttattaagaaagcgtaaaataaattattatggaatattaaagcccttttaatattatggaatattaaagccctgaggagccttttaagaatggggcctatggaacaaaataggaagttgttaatatgtcttaaatagtttcccttaaaacctttgatgaagttaaaataattggtagacatcttttgttaggtttgccatcaagttggttaaagtctctttaatatcatataaataactgagtttaaaatcagagaacatgttttaaaatgaattctttgaaagtgaaacttggtatgaagtttccagttatactgagaggcctctcatgaatattctagagtggctatttttgggttcagctcattgatccattgaaactgagcatcagatgttgttttttaggtcttcttttgtggtccatgaagcagtttagggaagataaacactcagtaaagtaatattgattacgtgattccaagttagacgtcatttgaagttaaaatattataatttagtggcccatgaggatgtggaaaatataataccaacacacaagaacaaataggtaacgaataggaatgagtctgtcaaggactgtaattgataaaggacagagttacccaaatggcgaagaaacggaatgttgctgcttttgctgataaacaggtctcttggttgtctgctctttggtctcagatagaatgcatgaggcctgtcagaatttctggatcctcttaaatgtggcctttggtaagaaaagaataaaaacattcttgccaaacttattaggtaggtaagtttgggttgaataccaaggtattcaagttcagttgctatggagacttcttcacaaagaaaaaaagaatccaaatgccatttaaaatggataactagtgaatttcaaaaatgtacagaatgaggttatttcggcctgttggtctgggtacttctagtcccattctgttgactgggaaactaagtcttggtgcaaatcaagcaaagagttactgacagacctacctagagaaaggcaatagtggcgttcttccagctctgtgtcccctttgctgttcatagggcttgcaactgaaagactgctggggcaggtgggggttgaggatgaaccaggtgagttgctctgtttgtgcccttcttctcttcttcacttcctcctttcctctctccctccctccctccctccttccttctctccttacttcttgcctgcttacctgcctgcctggcttcctgcctgggattgcaattatgtttctggagctattttctgggacccatccaaatctgaatactcatgagtcatttccttacagattctcctgtggttctttgtattccctttgtatacagatttgaccctggcatacttctagtcaagatttccagtaaagtgttaaaaagaggctgggcatggtgactcacgcctataatcccagcactttggtaggctgaggcgggtggatcacatgaggttaagagttcaagaccagcctggccaacatggcgaaaccccgtctccgttaaaaatagaaaaattggccaggcatgatggcacatgcctgtaattcccagctactcgggaggttgaggcaggagaatcgcttgaacctgggatgtggaggttgcagtgagccaagatggcaccactgcactccagcctgggtgacagagcaagactctgtctgaaaaaagaaagcccctgagcatcctctttttaatagtctctgccttccttggaaacttaagtattgcaaagaaagcctgtaggatatggctacatagtgctcaccatgaagatgacattgagctttctcctgatggatggcctggagggagagatggatgggaaagaaaaggaaccaggagtgtgttcattgcccatcaattcccaaactgaggagccaaagggtgacatgtttttcattctctgctaacggatggatatgtttctttccatttgggacatgcgtaagttaagtaacatctgtgtggtcatggcaagaataaggtaactggtttcctgccttttacaatgtgacaaactaagagttgcttttggcaaagggtgaaatccagcttcaaggttatgagtacggtttacttcctatgacctctgtcaaccatcccaagggccaagggcatagtattcatggctgtgacatcagataggggatgcctggtatcaaggtggattgcctttcaagtcacacttttttttttttttttttttttttgagacagagtcttgctctgtctccaggctggagtgcagtggagctacctcggctcactgcaacctccacctcccgggttaagtgattctcctgcctcagcctcctgagtagctgggactataggtgcagctaatttttgtatattttagtacagacggggtttcaccatgttggccaggatggtctcaatctcttgacttcgtgatccacctgcctgagccttccaaagtgccgggattacaggcataagcctccgtgcccggccttatgtcatactttgacagtgaaatcttgcagttgttggggaatatggtttgattcagggaatatctctcaagcacctgttatgttccaggtactatgccaagtgctgaagatttagaaatatgtgacacaggctgggcacagtggctcacgcctgtaatcccgcactttgggaggccgaggcaggtggatcacgaggtcaggagatcgagaccatcctggctaacatggtgtgaaaccccatctctactaaaaaatacaaaaaattagccaggcgtggtggcgggtgcctgtagtcccagctacttgggaggctgaggcaggagaatggcgtgaacccgggaggcagagcttgcagtgagccgagatcatgcccctgcactccagcctgggcgacagagcgagactccctctcaaaaaaaaaaaaaaaaaaagaaagaaataagtgagacacagaccctgccagcaggtgcttcctatatcccattggacaagacggaaacatcagcacatccatggagaattatgcaataaagacagaaggagaagtatatacagagcacagaatagaaaatgtgcgttgtgttagatctcttcccaggatctgctggggagatcttctttcctgatcactatcctgagtgactggcgtgtttggagactagatctggggtcgttgaattctggcctgagggccaaattccactgattcttgtaagatccttgaactaaaaatgtcttttacatttttaagcggctggggggaaaagaagaataattggtgtcatgtaaaaatcatgaaattcagatttcagcattcatgaataaagttttattggaacaaagtcattttcatttacttactgtctttggttgcttttacataacaagggcagagctcaatagagagtatatggctcgcaaagattgaaatatttatctgattctttaaagaaaaactttgcccactctggactgtgccattactcaacaattatggtgtggttggcctgtcctctgtccttcctcccccatcaacacacacccactcagctgtaactgccaccattctttactcagtctgtccattcgtccatccatccatcaatcaatccatgcagccatccatccatccatccacccatccatccgtccatccatggtccctggccatcatggtgtcagctgttccaagatttgttaatagagagtacagaactcttattaacaattcctataggtagagctgctctttcctctccatctgtggctgatgtctcagtgctttctcaattctaccatcacatgctcaaatataaccttctccactcccccacacccacttcagttgctgggggctcattcattggctccctctgcggaggcttgagtgtaagtgaggtattcagcagaggtctttggagggtttctcatttgatcacaatcttagtttgagaaatggtgcctcattcattaagctgtaagagagctctctacaagcaattttatttttaagtagccctttggttaacaagtttactccacctgggatgctttttatttttggtggcccacagaaatctgaaacagtgcagtgctggggcctctaatctgtctttaggaacgggggatactatgaagctcaccatgcagttacttaagaaagctatcggctagtgctattgtgaatgtgtttttaccttcctgtaaaatgctgaaatcacagactttattactaggataatgaagaaatgtataagttcaatgcaagtgacaccagcaggcctgtgtgttgggtagagatgtcctggggctgttttgctctgcacttttcctcatgggtgtttctttcttgaaattgaacaccactgatctctcttaaagcaaaatacttcagcaaatacacaggaagaaccccctccccctttttttcctgtggtttcattgcatgttgtgtggtttcagagatacttccttgggttgccccccaaccaaccagagtttcctcagaaacagagagctttcttctggaagaactctaagattgtaatctggatgctagcaaagcgtctgcagctgctccatttttaattcttaatttgggagtgatcagcagtttcacagaagagagaaaaatctaagacattcatcgtgtgatcattcagcatttggaaaagggaaaaggaggattgaatgaggtaataaacaagggtgttaatcaaggagaagacatgtaaggtgcagttttaaaagacatcattagaggaagcttagggactaacaagatgtttttgcacaaatatgtggtatggaggagtgttgtggatcacaggagcagatcttctctgcttcttacccctgcaaaacaacatcagcagtaaaaccatttaaaaaacccagaaaaaaaaacaaaatcccggtcctgttagaatgttgggttgtaaggatcagaaacctaagttgatttagggccaaagtgggaatacgtttgtctgtgtaccagtcagggtaaggctggggttaggggacagctggacccagggaagttaacacgatcaaatgctctctgtctttcatccctgttttccctggatcagattagttcttctcaggccagcttgaaccaaacagaagcatggctgccagcagttttaggctgacgtccgcagttttaaaataaaaaaattcccaaggaatttctctgattagctaatatcgatcgtgaacccacccctggaccaatcactgtgtacagggcttgaggttcaacaatgatcccagctggatcctgtgcccatcttgtggttaaggatggtggaagaagtatggaggtgcagtacagaggaaaacattacaaataaagggggaaaggaatagtctcttccaccaatcctatgcaaaaaaaatacccatcagagaactcgatgtcctgttctgtagggcatcctaatcagaaaatacaatgataaacccccttacagtgtaagtaagaatgagagtgagcgctccctgccctaaggggtgatggactagcattgctttaaaaataattgttggctgagcacagtggctcatgcctgtaatacaagcactttgggaggctgaggtaggtggatcacttgaggtcaagagttcgtgaccagcctggccaacatggtgaaaccccatctctactaaaaatacaaaaattagccgggtgtggtagtgggcgcctgtagtcacagctgctcgggaggctgaggcaggagaatcgcttgaacccgggagctagatgttgcagtgagccaagattgcaccactgccctccagcctgggtgacaaagcgagaccttttctcaaatataataataataataataataataataataataattgtcactgtattaatgggtaatggatctatgactcgtcatgaagagaaaggcgaaccttgggtggctggtttgaatctctgggctcagtgtgggataagtcagctcttcccttctcacttactttctagtgcccttgggctggaattgtcatgtccataactcatccagtccagtgacaccagagagagagtgaaggaagagggtggatgcactgaactcactcttatgctgccttcattttcaaataaagtcacagtaaagagtatatctttttttttttaaaagggatagggtgacagctccgtcacccaagctgtagtacagtggcacaatcatacctcactgtaaccttggattcctgggctcaagcaatctctctgtctagcctccctggtagctgggactataagcatgagccactgtgcccagccaaggaacatgtttttatgtcagtcatatatgtatacttgcatgcacatatatgtgtatgtgtatatacacttacatgcatgtatatgtatatatgtgtatatgtatacataccaaatgtatacacatgtctgtctatctatctatctatctatctatctatctatctatctatctaatctttcttcctcaaaggaatctatgataatatcatctgctattagtttaatagttggaagaggagaatgtcttaatgaactaagtatcacctttagttgtcttatctgtcattaaatgtgttactcattgggcttttgagtggtttaatgaagcagtgatatttatacaagattttatatctatagccaaaatctaaaaggctttcttatttgggaaggggttactattcagtgggaaatattcgtctacaggatagtttatgtggattttataactcttcttaaattgtgaaacatgccacacattcagaacagtgcacaacacgtgactgtacagcctactgggtaatgtggccatcaccagctcgagaaatgcaacattggcagcccccaagaaagcctcccctcccatcctcaatcacaattttctccctgcctcctaaagataacaaccaggcttgatttttatggaatcatatttttgcttcttgtctcacatttagtgcttgagtgtagattcttaagcactgtagtttaattttgcttgtttttgaactgtatatcagtggaatcatactttattaagtattctgggtctggctttatttcctcaacttttctcttgggtgtagctctagtttgtacactttaattattatacaatttcatggtataaataggctataacttcataatccattctactgctggtgatcatttggattagttccaatgtttgactattgtgaatagtgctacaatggactttttttggagataccttccccagcactcatgtccatgtgtttcttggggtgtatttctagaattgaaattgctgatttttcatctttactaaagtgcctgacccaattacactctccctagtaggataagggagttcctcttgcattatgccctcagaaaaccttggtgttattagtcatttcaattctagctcttctggtaataagtggatttcctggtttgaatttacattttgtaaattgaaaaaccagcatggccaagctcctattcataggtttattggtcattggaatattttcttttgtgaactgcctgacaaatgtcacttgtcattttttatttggtagttgatgtttttcttattgatttgtacagttgtgtgcatgtgtgtgttttaaattattctgcataatatctccttgtcagttgcatgagtcgcaaacattgtctcaccgtgtggcttgcattttattgtcttgtttattttttaagtaaacaactaagtttttacctggaatgtagtcagaatgatcagttactggctttttaatgtctatcctattaaaaaaacctcaggattacccatagctaccttggattgcaaagtctaatataaattagtactttgaagccttcctagataatacaaggacattagccttcctagataatacaaggacattagagtatattaactccttttattctctactggattataatatatagtaaatttttttctttcatactattctaaacatctaagacattattgttaattattattattattattatacttctgtccgtcttaaattatctttatttctgctgcatatagaattctcagttggcggtgattttcttcaaacacttagaagataccagttcattatcttctggcatctgttcttgctgagaagtcggctctctgcctaattgttgcttcttagtacaatagctcatcagtctccttcttgttgcttttatggtttttctctctgcctttggctttccagttccactatgacatgtctaggtgtaaatatatttttatttattctgttcagggtttgtaggacttcttgaatctatgggttggtatcttttttgcattttgggaaatttccaacctgtatctcttcagtccagttctcttttttcttcatattacatcctttcattgtctttcctccctccctcccttccttccttccttccttccttccttccttccttccttccttccttcctttttctttctttttctcttttgacagagttgtggactgtctcccaggtggtgtgcaatggtgtgatctcgacttgttgcaacctctgcctcccgggttcaagcaattctcctgcctcagcctcctgaatagctaggattacaggcacccgccaccatgccctgctaaatttttgtatttttagtagagacaggatttcactatgttggctggtctcaaactcttgactttgtgatcctcctgcctcggcctcccaaagtgctgggattacaagcgtgagccaccatgcccggccctttcactgtattttctatgtctcctaccttctctttctttctttgttttatttttgtccctttatgcttcattctgccaacctaatcttgtgaagagcaaatactatttgttcactcaacaaatgtatttatttttaggtcctactgtgtgctaggcagtgtcctaggtacttgggatactttggtgatcaaaagaggcaaagacccttgtctttgtgaattactattaaaaaataaataattgtttattaattgtaatgagttacgtcttcattttaaatgaattaattaagtttaacttaatgattcagtgtgttggaagtgggaaatgatattttaaaaaagcaaagtagacctgctttgggtgggtgggcagttctgggaggtaagcggggtagattagggtatagtgatgagatggtaccatttgaatgaagactaaaagaatataaagaaattagcagcctacctggaatgttccagaaagagggagtgtgtctggaaagttcagggaacatcgaggaggccaagtgtggcttcagtggcatgaacaaggggagaagcagcaggagatgaggacagagaagtaataacgaggccagaggggtgatatgctttgtgggtccctctagggagtttggcttttaccccttgagcggaggaatgctgtgatctaatttatactttaaaaggatccccatggtcctggatgaggatggattgtagaaggacaagagtggaaacagggagacttgttcagaggttttgtcgtaatctagtagagaatggtggctcggattatagtggcagcagcaggaaggggtgagaagagatttggattggcacatatttggagagtggatgcaacagaattttccgactgattcgatgtgggatgtgaaaggaaagggaaggcaagtatggcaccaagtattttggtctgaatagttgggagggttcaattgcccttagctcagctgggaaaggcacctggaagatacccagagggtgtacgtgcacagtgcggtattcgattgtggagtctaggggaaaaagcactggctagagacatgcattgggagttgttagcatgtggaaagtattcgcagtcatgagaccggaggggatctccaagagttgtaggttgatttctccagaaacaggcaagaagacggcatttagatgaactgcaaaagaaagaggaagcaagcaggaccgcgtggagaagtcaaacagtggtgtagaacaacctggctggaagctctggaattaatactgcccatcatccttgtcctgcagaggctgatatgaccagtcctttatccctgcctcattcagtcaccagatatggcctaccctgggatgccgccctctgccctgagacaggtcctgcaggaactgaaggctcgaggctgccttctgaccacagcccccgtagctggacagcaagtctttctttgggttaagatcgggacagtggatctacctatctccctcactgaggaccacagtgtaaagaaaagagagaagaggaccaaggactaagccctgtggttctccaacattaagaggtcagggagaagaggaggaaccagcaaaggcagccagcaaggcagaagaatttatggtgtcttggaagcaattgaagaaagtacaccagagcagaatgagtaatcagtggtgtcaaatgctgctgatagaataggtcaagtacaatgaagacaagagagaaacattggctttataaaccgggagatcattagtgcccttgagaacagcacgtggttggatggaagatgcactggagtgggtttaagagagaatggggaaaataagggaacatggcaaatacagatgcctcttttaatatttctgcaaaggagagggagaaagcagcaaattttcatagttataatttgatgatgtggaggagagagaggaaaattgctaaaacattgcccttgagtgagcaaggggtggagattggacctcatcacaagtggaggggttggctttagagaggagtatggatagttgtctacatcaacaggcagaaaggtagagtgtatatacctgcatgcagatagatcaccagagaatatatatagtcttagaagtttgtggtagtcctctctgattgcttcatttttctcagagaagtagaacaaaaggtcatcagatgggaagaaattgttgggaatctggaaggaaagcagaagacataaacttcgtgagtgtgggtgagggaatagacagagaattttggtgtgattgccagtggcatttaaggggacacttgacattaggggtcaggaatttaaagtgagaccagccaacatgtttgcatgctttcttctgttttctctagccacagtcagctgtctgggtacaggtgtgaactgggcagtctgatggatttaaccagatgtttttgccaaaaggatatgaccaagtaaaagatgggccagggagttgagggagggaaattaatgacagatgatggaatctacacttctcttttaaaaattttaaaaatgtttattcattcatttattttttaaagatgggctcttgctgtgttgcccagcctggtctcgaacccatgggctcaagccccatcctcctgtctcagtgtcccaaagtgctaagattacaggcctgagccactgcgcccagatggaatctacatttcttaaggaggagcatgaaatatcgaagctatgaagggattcttggagtgtgtcttattccattggtgctgctataacagaataccacagactggataatttataaacaacagaaatgtatttcacagtctggaggctgagaagtctaagatctaggcaacagcagattgagtgtttagtgaggggctgcttcctctggacagcgccttgtggctatgtccttacacagtgaaagagatgaatgaactccgagacctctttttaaaagagcactaatcccaatcctgggggctccgatctcatgatctaatcctctcccaaaggcccccaccttagaataccatcactttgggggttaggatttcaacatatgaattttgaggggacacaaacattcagaccctaacagagtatgagattgagtggtctgaaaagatgggaggtgtgagctgtgggggggatgcatgacaatgatggcatacgggcaattggtatctttaccctttattattaataatctgtgtatttcagagatttggcatgcagtgtcttgaacatccttagtgaatgtataagttgaaaactccaagtgtttgtgtattattgacataaatgtctatttctcctattgttccttatttctttctttgctgttaaggattcagaaggaattggttaaaaggactttttttctatggttaaagaagagacctcagacctgggtggttttgatcatgcttcttgtcttgaattatcatctcggggtaatgaatgaccgttattcaaatcatgcaatatttgttgagagtctaccacgtatgaagccctcttctaggcacttgcaatagaactgtgagcaaaatggataaaagtgcctgctcttgtggggcttatgttctagtggaggagagaaacaagaaaaagagtaaaataagaaaatattcagcatgtgtacaaaggagagaaaaatagccgggcgcgcagtgctcacgcctgaatcccagcactttgggaagccgaggcgggcagatcacttgagtccagcagtttgagaccagcctggccaacatgacaaaaccctgtctctactaaaaatacaaaaattagcccagtgtggtggcacgcgcctgtagtcccagctactcaggaggcggaggcaagagcattgcttgaacctgggatgtggaggttgcagtgagccgagatcacatcactgcactccagcctgagcaacagggcgagactctttctcaataaataaataaataaataaataaataaataaataaataataaaggagagaaaaataaatcagggaagtaagaaaggaaatgtgccagggatgaggggtggaggtggtggggtggggccactggccaggaggacaccttcattgagaaggtgatgttgaacaaagacctcaagtctaaggttaccttcataagcggaagatgaacaagtttgcacgggagcaaatagaccaaggtggccactatccttaagaaaacaaaaacccatattcatgccaaaggccaagaatattgtttttggttattgaaatggaatgagtcagtagtatctgtgtgtgtgtttctaccagacggttaatgggcagttcattagccgctaccttttttttttttttttggtggtgggggaacagtgtctggtgggtgtttctgcaggagactgctgacctcagacccagccgacctgactaatttttgccaatggaaagttatatgtgtaagggattacagctcttctttaatgggctgagttcatctgtggccagaaaaagaacaaaggctcccagggtacagggctttgggaggggtgagaagtctgaatcataagcctgagcctaagcaaggtgtgtgaagttgttgaggctgagaaaaataaaagtcagagatgacttatcttggcgtctgccagcccacagcaaggattgtcagctgggcaggttgtcagcgttgtggtcccattctgagaaattccctttctcagaaaccaggcatctgagagcatagggttgaactttggtgttttaggtgatgtggtgaagtgtttgtcaacttgctggctgagcctcctccacaccggtagtaactcttggtgcctgtgccaggaactgtgtcatccttgtgagtcacctgtcatgcatgttttaccgggaagttgggtggttcagctgcgagcaagattctgttcagtatgtatttcttttgattgtgaaccaacattagtacttcagggaggtattataaataggtcagtgtaaaatatccaccagccgttaattatctcagtccagagtttgaacttgcctcttcgtgtggtgggggtgtggagggggggtccttggttctgtgaaagggccccaggaatacatttaggaatctcccacacatgcattatgcatattatttgcctcttgtgcaattgagctggctcacgttagataccttgttcactcacctttctcagacggagtgacaattaacttccaggagcttcatgacaaaccctaaaatatgttgcttgcctgccacatttgtccttaagagggcatgaggttctccatgagtaagtgtaggctttgggaatcacactcagccctctgactttgtgaacccagaaactgagattcatgatacaaagggtaatattagtaataataaggccgggcatggtggctcacacctataatccagcactttgggaggccgaggtgggcagattgtgtgaggtcgggtgttcgagaccagcctggccaacatggtgaaatcccatctctactaaaaatacacaaattagctgggcttgttggcgggcacctgtaattccagctacttgggagtctgagacacagaatcgcttgaacccaggaggcagaggttgcagtgagctgaaatcactccactgcactccagcctgggcaacagagtgagactctgtctcaaaaaaaaaaaaaaaaaaaaagataaataaataaataaataaaaacaaataaatcaaatgtaaggatgtcaaggttgttaatgacaagattgtagcccaaatgcagtagtgaggttggagagagctggggtcccagcctcacagagactaggttagaattttagacctgcctcttacttgttgagtggctttgggcagttcatttaacctctccgtgcctcagttttctttatctgttaaatgggtctagtaataagtagtaccttgctgagctgtcatgaggaccaggtagaaaattgaatgagcagcccctagcctagtggctttcacagagaaagtgctcaggaaatgtcagcaactcattgtcatcaaagttgtcttcacatagttttatgagggaaatgctcttattcccattttacagatgagggactgaggctttatgaagattaagggataggcctgtgactggaagaggaattcctggctgacccgcaattctcacttagactgcctggcacccctgcttacgtcttaactgctgaaattactgcgagttgagggtacacctgaatgtggtcagttaacatgtgtaacatttaatatttacaattaagaatttgggtttgattcatttcccccactgttagggttttggactcatatctgaccctttttggtttcttgatatgcgttgaaatttggggttgggatgggttggtggaagcagctgttccctactgctgtgcctccagcatactgtgcaagggtgtgccttgttttatcttcataattgtgaaagatttaccttgataggtgaggcaatgtcattttatctcttacaatcagagaaaatcacttatctgggcgtgtgaagatcatggtgatatgacaggaagagttggcttattggaaggcttggttaatgtgtgtaaagttttgattacttttgtttttagcagcaacttttttttttttttttgagacagagtcttaatcttttgcccaggctacagtgcagtggcatgattacagctcactgcaaccttcgcctcccaggttcaagctattcttgtgcctcagccacccaaatagctgagattacaggtgtgcgttaccatccctggctaatatttatttatttatttatttatctatttatttttaagtagagatgaggtttcattgtgttggccaggctggtcttgaactcctgacctcaagtgatccgcccacctcggcttcccaaagtgctgggattttaggcatgagccactgtaccaggccagcagcttttttttttttttttttaaagctacatatatgtgagccaaaacgttgaaaatgatatttttggaatcttttttaaaagttgtggtaagatatatataacataaaagttggcattttaactatttttaagtacacacttcattggcattaattacattcacaatgttgtacaaccatcaccactatctatgtccaaaacttgggtgtaagtggaattatgcaatatttgtccttttgtgtctgacttctttcacttagcataatattttgaaggttcatccatgtagcagcacagatcagaacttcaatatttaaatggctgagtaatattccattgcagagatataccacattttgtttattcattcatctgatgggcacatagattgttttcacctcttggctattgtgagtaatgctgcaatgaatattcacagacaagtgaaaatgacggtattttgtggcgttagcaaagatgcactttttttttttttttgagacagactcttgctctgttgcctaggttggagtacagtggtgtgatcctggcttactgcaacctctgcctcctgggttcaagcgattctcctgcctcagcctcctaagtagctgggagtacaggcacacaccaccacacccggctaatttttgtgtttttagtagagatggggtttcgccgtgttggccaggctggccttgaactcctgacctcaggtgatctgccctcctcggcctcccaaagtgctaggattataggcatgagccaccacgccctgccagagatgaactttaatttcttggtattccaggggtagagctttcctaactgaggaagtctgtatctttgaccaggttgctatcttaaccccttgggcacatgtggatctttcccctgcattcttgctgagcctgcctctgtaatttgtttgggaggacgctggctgctggtgagtcagactgcctccagccatccgggtttgactgcgtcctccctcccaggtctctgggccccttgcttgcttgtctggagcttagccaagaatttctcatgtacccactttttatggtttgcttattaattctagatgggctcaatttatattgttttttatttgtatgtgccttttgtactaggttggagcccccaaattatatgtgcatacactgcattgaatgttcattttatggacatattttttaaaggaggtaataattgagtggaacatacagcaagtttatttctgttgacctgggtactgggctgaagctgtcatggttttattatgtgagcttgaacaagtcacttactccttctgacttcagatgaatgagtgatttataagacctcctttcttctcttacatatagaggtctatgaccctaaatgtgtcacccctatgttagaccctttaatattttgagatacaggtttgtcgtattctctgattgaaagtaacttgtacatgtttggttttcatttacattagggaagatggcagcaagtattcctagagtgaaatcaaatgcctatgttagtggaagggaacacaagacaagtggattctcatcaacacgtttccctagccattattcattacaagtcacctaattttaattgattttgtgcctgtggttagtacaaaactctgtaaggtgtcatgtgttacaagcaggtctataggtggggtccttttcacttcaccatcctacccctgtgctagatgtctcatcgtgtattgggccattcttgcattgctataaagaaatacctgacactgggtaatttataaagaaaagaggtttaattggctcatggttctgcaggctgtacaggaagcatgatgctggcatctgcttggcttctggggagacctcagaaaacttacagttatggcagaaagagaagcaggagcagacatgtcacgtgccagagcaggagcaaaagagagatgcggggagatgccacaaacttttatacaaccagatcttgcgagaactgactcactatcacgagaacagcaccaaggggatggtgctcaactctacatgagaaatccacccccatgatctaatcacctcccaccaggccccatctgcaacaccaaaaattacaattcagcatgagatttgggtgggtacagatatccaaactatatcaccttcttagccagcgtcattctccactccctgccccagtatgttttggccccccaaaattttaaagtgacagttactgtatcttagtataaaataaaaatcaaaatgattcccacccatgaataccattaaataccattaaattggttggacctggttagtgtcgggcctttgtggctcactgcgtccaccctcacaagggtggcctgctacttccccacagtagggactctctggggaaggcttagggctcaagagggtgagccctctgtgaccccattgggaaggacctccattctgttatctgacacgtaactagtgccagaactgtactttttgccaaaatagcaccgtcaatgtgaaaacattgagaacattataaatgctaagatcgtttaagaaacagggttggcttatttcctgattgaaaattgtcttgacatgtttagtgcccattcgcccatttagagacagtgttgggcatgtgcccagtccaaagcctgttaacccatgcattccattgccaataggcatctattattttaagttcccactttaccgaagggtaggcagagggacttgctctgagttactcttctggttgtcgctggaccctggacttgaaccggctcttctcattttgtatccttgcttctctcatgacccaatgaggcctccccgatgggatactccctgacccagctttttcaagaggctatactggggattataaagctatcctggcattctttgaagaaatggcaggactgaaattagaacttgactttttgtcttcttagttattctatattatcttacttctagtgccaataacaattattattgtttattgctgccgagcagggaggtatctgaaaggtcccaaactaggaaaaacttcgatgcttttaccccccgtgaacacatgcaccatttgtgcaaggcacccagggcccttgaaatcaaaagccttactgtgtgtgtgggtgggacagcatctggccccatatggtttattgctggtgggagctaagagctcacggatgtttccttggccttctttgttatctttatctaactctggttgcacttcctcccttttcccttcaccctttcagttacaaacctggcttcacttagaagaatgtgggctaccaaggagtcctgaccctgttgactttgacttgttagatgaaagttgttcttctgtaaggaaatctaatttggggtaatgaaaacaatgggggctttaaaatcatggaaacttataattggaagatagagctcagaaggcagagaaaattaaatcgaacattcatcattttatagtaaaggaaattgaagcccttggattttagggaatttgccacacagtccctgcaatgcattctggaggtggtgtttaaaagctattagagtttcctggcctctttttggctggccctgtattttttaagaatatctctatgtatttgttaggtattctgttttcagatagagaaaactatgtaaagagtctctaagtttggttggcataaggtttactttgaagttgtaaaacattcttgtatcaaatcaaatttaatgaagactgtgttttaaaactttgcctagaaaggtgaaccttgtttgtctctcagagaatagaaagaccccatccagggctgaaacaagtgtttgcagtgttttcaaacatgtccgtattcccaagcagaccctcagattacctagcatgggagtgtgtgggatggatccatatttagacctttcatcagtttcaaatataaaaaattgattttggcaatccgttggtagtcaaccacaaaatgtagttatgaaaaaccttctgcatttccatagcagtccaaatatggattccattaacaggatgcatatttggaactgcagttatgctgggaaatcgtgtttggattcaggtaatttgacggtgttgacacccctgttgcgtatcacctaacacgaggaggaggaggagactcttccctggccttgctgctgataacattgttgctaggtgacataggtgaggacgcgttggtgccagcacttcttaccttgtttttgttctatgaaggcttgaaaaggtggaggtaagctccattgtggctgatggcttcaaattcgcagatcttgaagacaccttgattcctgaccaagttggttctggagacccctgaagagcaatccagaaaatgcttgcttttggaagtcatctctgtcactgagaatgcaatttgaaaggaattttaaagcccagctattgtagatctaatatatagagagagagagtgagcaagctaaacacttgagttaaaatttttggagagaatatgcttaaataaactctccatacgttttcatttctgagtgtaaatccacttgacaaagggaaaaagaagtttaaccctttgtgaccttttctccacatgccacatattgttttccaacatgaatttattttttatgtagtcctcttctgtctgtttagccagctcttgtgcaaatatccactaacaattcacatacctcctaagggtgtcagggtttgcagtttctctgaacgttcgtgcataaaggtgtcagggtttgcagtttctctgaacgttcgtgcataagggtgtcagggtttgcagtttctctgaacgtccgtgcatgcatcttttcttttgcggtgatgtgtgttatttttgtatcatttagcgtcattcccaggttcatcccgatcttgagaaattaacaacaaaagtcagctgtgctccctctactggttgcatttctttggagcagaaatactgtacatttgtgtataagttcattgctgctgatggggctcggacctgcgttcacattttcttttccgaaattcgcatgacttaaaaagcaaaacgagtggctttcagaactgcaggttaagaaactggtacctttagagggataggcgtcttccttactgcccacttgtctactagtgttgtgggggaatcttcctgggcaggaggacacagcccttctgctatagcagtaaattcttggatgctaagtcctgcttccctccgaggcccaaggccaatgcctggggcctctccagttctgatattgctgtattttcatcactatcaggtaagccgttctgttcagatctgtgaaaacctgcccgccactgtatggagccagcagggtttatgtaacgtgttcacatgttgctcagactcttgatctcaagttattcttctctagaagcatctacaggggaccctttatttttaggcctgagagatagggaagaaggtggggactatttggtttaatccaacatgtatgtattgcgtccccaccatatatgtggctttaagaaaattcaagatgagcaaacctactgttcccccacgtcccctttagagaaacactaagtaacaacaaaaagctcttctccccctccatgcaaaattaaataataatatcagaaagaaggtgaaaaaaaagtatatgccccccacccacccagagctaaaagaaaccttcttaggtaatcatgagaccagaaaacctgtaggcaagatgtgctccccgtgtaagcccactgctctgatgctctgaccactgacttcatggtgcttgccttcctcttcccacgagtgatttgtaacattcttttctatatgctgtaatgagatgaagcgccttcctgttgtgtgtggagtagttccagcggagactcataattgtcaatggagaaatgactgatgggcctcgatggggctgctttgtctcagtatctgtcacatctctcgctgcacaccatgtcggcttccccgaagtacgcgatctctgattctcaagacagtcccgcctggctttacatcatccttctcccatccccttcatgattgttttcatccagattcagcgtaagtcagtagcttggtgagtgcatggatgccaaggctgcacccaaaaccacgggatgctttcctgcctctgatctcagtgtctgctttcttctgagcccatatgtatggttctcagcgattgaatgctgcacagtggaaaaggagaagtgttgtttcatgtttttctaagtccctggagagtctcttcaaattgatgatgctatatggaatagatggaatacattaattaaatgacaggtgatagtgaaacttctaaatcagggtttctcagcagcagcagcactattggcatttgtggctggataattctttgtcgtgggggcctgttatatgcatgataggatgtagagcagcatctctggactctacctactagatatcagtagcaacccccagctgtgacaaccaaaaatgcctccagatattgccaaatgttccccggaggcaaattcacctccaactaaggaccattgctgtatccaaacattcttctctttcttcattctgtttatttatttattttcaagacagagtctcactccgtcacccaggctggaagtgcagtggtgtgatcttggctcactgcaacctccacctcccaggttcaagcaattctcatgcctcagcctcctgagtagctggaattacaggcacacaccaccgtgcctggctaatttttgtatttttagtagagacggggtttcaccgtgtttccagcctggtctcaaacttctgacctcaggtgatccacctgcctcagccttccgaagtgctgggattataggcgtgagccaccgtgcccattctgttcctttagatgtgtttgtgggtactcttttgtttatttgcttaattcatttatcaggtggttattaaattttctgctataccagcctttataccagcctatattctttaccaagaatgtaaagatgaaccagccatctctttcttcatgttcatatacatatgaatatatatatgtgtgaatccgtgtggatatatatgaatatatataaaatatatatatggatatatatacatatatatttgagtcaagtttaaatgtttctgaaagttccctttttagagtactgtttccaggctgcatccctggctggcatttgagtcattatgacttctttaatgaatgttgggtttttatttttgtagcctgtgtctttgaggaaagtcccttgcagtatggatgagtatccttagtttttggcacagcttttaaccttataaaatgataatactctattaatctatcaatttcatccatgaatgcttcaaccctttcagatatagcctctcacttgtcacttcagatttaccgttttcttcttttgtgatttctttcattctctttaaccagccacctgaggcatcatttaacctgaggtcatttaaagttttatttaaagaaacttctgtttggaaaccaaggtcaagcacagcagagggatgttcattgcatggctttctggtaaactttaagttagcatgttccctttcacatttttagaaactgatataaaaattgctcatgggaaatcaaatttggggcagttttctttccagggggaaggaaagagggatgtatttcagcgaggaagaggttgacagatagtttccactatgtgagtaattttaatttttttatgctacatggtgggcacgtgggtgttcattatattcttttcaaatatatgttgtatattggaaatactttctagtacatatgaaagaaaaggcagccaactgaaagtttggtttctgtttttctgcccttcactccttttcaatagatgtttgggagttaggtctccactgaatgaactacccacgtttctgtccttgaagggctggtggggggcgcttatgtaacattgctggccttttatatcttttaagaggcgctgcttttttgccacgtgctgtagaaaattatttgacaagcactcacgctttgtgcagggtgaccaggttcatccgtaaaatggttaagaccttttcgaaatacattgcccccaaggatgtggtggggagggtgctgggattctgagtgacagccggcgaatgccagagggaagaattaaattggagagggaggcggagaggagggaggtgatggtgggaggaggaagggaggagcgaccaaccctctccaacacacccaagtgaccagattcatcatagcacgaaacttcacaagttacacccactgcctccgccagcagccggggaaggctgctgcttcctcatttctgttactggaagtttgggacatgtgaagccagacggggagaaacgtgcgcgccttgttgagcaggggtgagcttgaattttgaaatcgattctttccaccggcgaatctctttgtgtcgggtggtcaggggaggcagccgaatgtggctctgaacgaggataggtgagagccccgagctgagctgtgcagctggggccggggaaccgtgcgtcccgtgccccttcccagaacgagcaagcgcgtctccaagctgcgccccgaggctcggcgcgcgttgccggctgagctgcaggggacggcggcgacgctggttctggctccagggtaaagagattcgggctttgaaagcgtcatctttcccccttgacttctgtaagcgaggatcattgtatgggatatggggtcggggaggagactgcgggatcacgtcacccacccaggatgcgtcctgcccggggctgtcccgctgctcgttgggtaattgcaggtcagtgccattgaaaaagaaccccatgacaggcttgggaatcaagtgagaaaaaagttccgaaggaatattcagaagctgtggctcccgaccgcacctggatgggagttctggagtgggacgtcggaagtctcggggttctcattaattttacatctgattaaattagttcgactctaggttcctggctgtggaggtgtgatttgtttatctggatcatttttttaaatgtctgtctttctgtgaaagctagcttacctttggatcgattgcctaagtcaattttgtgagaggaagtttgggtggaaggtggtgctgggggctgggatcattgcaagtggcagtatgtcccagcaaaggataaacttagctcaaatgaggcttctcacagacaggatttaggttttatttcaagtctggagctggtcactgggcttccatttggcctgtgtagcttttgctcagtgtgtaggggtcagagggaggctattgggttaactgttacctgttgcacttgtttcatacctgatcaacaacttaatagtacaccagcagctggagctggtttttgtttttttgtaagcgaatccttcatgagaatgtttacagaatcatcttactttgaggggaagaaatgaaggtgaaaaatgtgtggctcctgttgtatttatagcaagccaaatgttctttcccaggtctggggtgggtacaatcaggaaaatgtcagtagctgattttatcatttttcttatatcgaagcggaattggcagactctctcagcataccttcccttgaactttgggggtcgggaggcaggttgctggggccgcagtttgcttagcttgctctgactctcccacttccttgaagttaaagatacagatggagaggaaattacttttaaaccaaatcagacatggcttagggaagaacaacaggttgcatgatccagggctagagccctgagttctagctcattttgagctcaagaaaggacccagcagcaggtagatgtgaaattgatgctgacatgaggtctgtgatctactccctcacgcccctccaccccacaaggaacctttagtaactcactcaacaggaaagacaaccaaattggatctcatgataatgctggtgaaactgactaatagacggagttttatggaacaataattcttagctacaaaaaggggaactgcattgttcatagagcaaaggtttttagatattgtcacatgtgactgttggaagataccatcatgaggacatttgaaattggggttaatgctagtatatgaccgtgtagatgtgagagaaagtggcaatttctgtatcattatcttttcatattgtctccccacctctcccagtaaataagctggtttgtctctggttggttatatttttaaattttattcacttatttcttctttttagagatggagtcttgctctgttgcccaggctggactggagctcctgggctcaagtgatcctcccgccccaacctcctgtatagctaggactataggcatgtgccaccttatctgactgtttttaaattgtaaatttgtttaatagatactagatcattaaaattgtttgttttaatacctaatttttacagaaattttcccattttatgtacaatttaaaattggtataatattgaacatgctgtcctcataatatttttaaagactgtagtatctgtagatatgtttcctttttcattcatggcgttatttgtaccttttccccatcagtcttgctaatgtattatcaattttattggtcttttggaagaaccaacttcgatttttgatggtatcttaattggaacacaaacaaaggccacctcctttcttgagtttatattcatttttaaaattctgcccagtggaactctgtcgaaaaaggccttaaacagcctttgaaaattagcaactgagttcgttagctgcaagtaggaggacaccatgtatttgtctttgtatgtttgacatagattatgttttttcagttttattaaaatatactttctgtttgtgaacaccacacacagtggaccaaattgttccaaggtgggttttgtgtattaattgaggcacaccctgtgatattgttctggaaaaatgtaactagaatttacataagacttactggtaatttaaagtgaattgtaggtactttcaacccacttgacaatacagatttaccttgtacgacagcagaacaaatttgctgtaatgactggagaagacacttcattttggttcatatttaatgcatgagtctgagcattttaaagttttctcagaacagattctttctaagtatatcagaaaggatgctggagtcagaaagacctggctttgaattcttgctctgccccttttgactgtgtggcctcaggaaaattgcctaacctctctgaacttgtatttccccaaatgtgatctggaaactgattgtgaaattgcactgtgaattcagcgtataatgagatttcattatgaatattcgtgtaaggtttctatcctttgtttggcacaaagtaggcatttaatagtgacacttagtgttttcagtgtaacgattagtattttctgcctcctaccctttcttgtcctacctccaacctttccacttctctcaatggaaggtgaaggaaggtgaagttactgccgtagaataaaacaaaaaccacttcccccatttgttctctcttcattatgggcaagttccatattttcagtatttttatcttgttttcctagttgattatcttaccatttcttccctccaatttttatcttactttcccagtgttggtttttttttttcctctcagtttgtctcatctcctaaggatcttacccactgctctgctctgttgtttttttctttcctttttttttgcctgcctttagtgtaaaaatgaaatgagtacaaagcccgaaacttggcagcgactgagatgtaagttagtgggttgcttctatgaaggcaaagtgtgttaaatttagttactcaagaatttaacttggaagctggtcatggcggtgtgtgcctgtagtcccggctactcaggaggctgagacgggagggttgcttgagcccaggagtttgaggctgtcctgggcaacatagtgagaccccctctctaaaaattaaattaaaacaggaaaagaattaaacgtgaagatagacgatgctggtgactgccatagcagtttcgtgccacagaccttggagtactttttcagaccttggagtttctaagcacttttgggggaagtgttgattgtttgatattatggttgatgctgtaaccaaaaagggacaataagagcataggacagaggagcttggctggttaatattccccgacaagggaatgtagcgttattgagtttgcccaaccctgagccattggttcttcttagggtctctcagttgacaaggtcctagggtataaggaccttgtcctatgtaatggcataattacttagcatttatttatgcatctagtattgcaagggactggactggggatggaaagggattgtgagctgggaaaaggcttcatttgctttatggtgctatgctaaagttctgctttgctcaaggagtgagtcttggtttacattttgggtagtgaatcagcttcaagtgtggagttattttcaatgaagacagattgactagctgcacctggtctggcctgcccactatgacccagtggtgctattttgttctagccaatgctttcatgagaatggagaacaaggaggcgtcgttttcatgagtattttgcaacacccacttctccagtttattttgatgccgttgcttgaaaacaagtgttagcatggctttcattggtaacacttttagggaagagatcatcacttttggaaagttttgtttcttgaatgattcagggtggattgatttgtgagctcttgtactgaatcgtagagcttcctctagtaccttgcagccacatgcttcagtgtttccattaactatgagattttggtgggcaagaatctctacagtcaaggtgctttctacaaagctatagataactaagcctggtaaatgcttctttattaaaatacgaactgcttatcaaaatatccatactctaatgtattgagtgtctacaacatgtaaggtacttttcctgtgttatcacgttaatgtttctgaggataatcttgcaatctctagaggtatgtaaaaacgaagcacaaaacccattattttcttatgttgctcttataggtagaatcactgtggactgagacccacctttctagacctgaagcccaggaggaggaagaggaggctggttggtaccatgggcataatgctctgaatcctagtctctcacctagtatgtgagcagtccctgcagatggcccatttggagatcttgacaaagcctcttctgtttccaatggggtaagtgtggcgtttgcaaaaggctggggaatgaggattgaagcttttaaagtctttattatcttgatcctgcccaaatccaccttttttgggacaatagaaagttcattgtttgtgacgattgttttggtggttaaagggttgctgagtctccccacttgcaatctgaggctttgaaatgggtttcctgggaacctttcccattcttcctgggtggttcccatggttattttattttggagttggctgcgggtaatcctctgtctttctgacttctcttttgtctgcccccatgatactaggaaaggggaagaaggaattgatttggatgcagctggggaaacttggtatcaacgtgctggtttgggggctcttgggtgtgggttcacatcactttcaatgcgacagggtaagcattgatgtaaactgctaagtggttttgttcaagtggaatatttcatgcggcctccctgctgcggtgaaactggacgtctttattgcatgacaggcttggggctttcacagaatggatcaagaggtcgccgtgcaacgttcgcagttaactccaagagaagaaatatgctgcaaagacaccctccctacttcctgtatgtggcacagaccccttctagggaattccagcagaaagggctgtgggtacttcagtttcccttctaagtgggaacggtcacgttagcccatgcagtccccgtttacttcctaggaggagaatgacgtagaccaaaaggggctttctagctatgtgaagttgctcttgttcttttcaactttgccttcctctcgtggacaaacgcacctcgaccttgttagcaggtgacatcgggatgcattatttaacctttaccaggttgggctcctatgttggttggtccagaaattgaacacaataggagactgtggacttgagagagggcaagaatcacaggtgcttcctgaggaatgcatgattcctgtaacttttagagtttcccaccctgcattccgggtcctgctttgcagatcttgccgtgacttgttcctccagtcttacctgctgctccgctctgcctgcatccagacgcacagcagcgtagccactcctttctccgcatgtacacagtggcttggagaaacctttctttcaagggctgtctggacacggagcagataaaacctccgggttgacctggaatatgtgcaccctcctcagggttagcccttgctagggatgccctgggggtacagggactcccaggtagttggttaaagggaatccagtccctaagggcaccctccaacagagagcggagccaaagcactcactttccctgtgataatacagacacattgtattatcataattaggctacatgcctttttcaaggggtaaaaataatcatataaataataataggccgggtgtggtggctcacacccgtaatcccagcagttagggaggccgaggtgggcggattacttgaggtcaagagtccgagccagtctggccaacatggtgaaaccctgtctctactaaaatacaaaaattagcccggtgtggtggcacatacctgtaatctcagctacgcgggaggctgaggcgggagaattgcttgaacccaggaggtggaggttgcagtgaactgagatcacactaccgcactccagcctgggcaatagagcaagactctgtctcaaaataataataataataataataataataacaacaataataataataaaaacaacaattattaaccctttggagcaccggctgtccatgttcagcccctatccctttgggtccccttcacctgtctagtaaattccctctccctgagtgctttcgctcctgctgtctttggtggagggtgcctttaggggctggattccctttggccaactacctggtagtctctatacccccagggcatccctagcaagggctaaccctgagaagggtgcacatattccaggccaaggctgaggtcttatcttgccctgggtctagagtgcccccagggcttccttcccttcaagatctcccctacctactttctggttttctctgaaaacacttcctaatcaaaaacgtatacatgacttctcacctctggcctaagtaacctattcaaagcaatagcattggaaagtgaggtaccaggatttgaaccaggcagcctggcctatggagtctagtctcttgatcaccgtgctattgtgtgttcctccagggtgggttgcttggattctctttatacttgccccagcatggctatagtgactgccatggcgtgcctagtaaatgttagctgaacgagtggccacacagcccgccagagtcagctttcctgagtcctgtctcagggcacctgtccttgttggttacccccattggcctcctgcctgctctctgccgattcagattttacctctccttcagagtcagttcaagtccacctcctcccggctgtctttctggactgccccagccactgtgatttttgcccctcggaaccagtgttccttctcagatgatgttacccttctgagctctccctgaagtaggatcatgagtccctgagacctgtgactgtgccctgtgcctcatgtgccacagtgttaagggattctttttgggattaaaacccggtcagagctgtccaaagaaatgtcaacgttgcttccaggttctgtgagcaaaggaaagtaatgaggttaaagagcaaaactaaaaaaaaaaaaaaaaaaaaagcaaggggcaattctaaaaattgttagcccatttctgtgtgagcctgtgtgtgtattttcacactgcagctgctcaagttgagtcatagaatggatgtgtcatctcttggcttcaggcacagtggctagcccatcttccccccggagggagtttaagcacatttatgtgatgaataatgtggattctcccccagtacttcagatgtagttcaacagatttcatgcaaatggtaggtgaaacatgtcaagcatcttttgtccccattcgaaagataacagaaatatgtcccagcagagtcagtgcgctgagtcttagctgatggccggccgaacgctccccagtggcgtctgtcttcacttattctgtcttggacatcttctgcctcctgggtgcgcccccgacattgtaaggctatggaaggagggctagggctggaaaggaagatgcaaacattgagcacctactgtgtgcctggcatacttctgctttgtgatctctaacagaatacatgattgcacctcacagcccctctgagcctgtgcgtattctcatctccaagtctacttggtggaacctaggtagcttgactaaaatcactctattgtggcagtgaccctggagttgaactgtgtgttatctgatttctaaactcgtgactgttcccacacatcttgacctccggttgtgaatataaacagagacatttagatgagcatgtctaatggtcatattaactctagaatttggagactcttgagtttctttcttttttctttttttttggagacagagtctcgctctgtcacccaggctggagtgcagtggtgtgatctcggctcactgcaacctccgcctcccaggttcaagcaattctcccacctcagcctcccaagtagctgggattacaggtgtgcaccaccatgcccagctaatttttgtatttttaatagagacagggtttcaccgtgttggccaggatggtcttgaactcctgacctcaggtgatccacctgccttggcctcccgggattacaagcatgagccaccgcacctggcttgagtttatttctgatctaaatcttttctacattagccaattcctcctagcatttcactgttcatgagcttgttgaagtcattattgtctgaaataccatgtttaggtttcactttgtggagggtggggagggtgaggtaatattttaaaaactgcaaaattagggatctcattttatttttagatgttggtccacaggtgaaacgtatcaggctggttctttgaacaccctcaggaaagttaaagagatggatgcttctctttaggaaccgggaacctctctggttagacagaggactcttctttcactgtttttgttttgtggcacaaacggcctgggatgtggatgccttgggtctgatgcaagataccctggaggcttccctggcctgtccttctcctgcccatgtcgcgtaaacattggcatggcagggacagatggccactccgggaactccttggatgtcacatttggttgcctgggttgggggtcgggtggttgcagccagtctccactgtggggaggagaggctgactgggaaatactcccatggcagtgggtaaacacaagctcacctccggaaaggctgggcgccctggtacatgtgcaggctggggcggtaatggagtcagatgcacataagtgtgtttagcttgggaaggagccagtctgctcaaagcacacagccttttctctctgctccgaactgatgctcagcagagttcggtttgcttatggggatgggaatgaaccatgtgggggctgtgaagggagggatgggctgcagataactactttcagagctagaaaaaaattctttccagaggcctgggttagctttactggaggcgcaggtgagggtatctgaaatccccggagagtcaagatagcgcagttaggtgcccttatcagtgggatttttttgctgatcaaacagcatcaatatgtgtaatgaggactgaagcattgatgaagaacagccgagtgcagtgtttcctgcataaaatcccatcgattccggaggctgagcagggggagaatcccttgagccaaggactttgaggctgcagtgagtcagaaccacgccattgcactcaagcctgggcaacagagtgagatcccaagtcaaaaaaaaaaaaaggcggggaggtggggataataaagaaacagcacccaggtggggagggctggaggcagcagaatccctcttcaaagaaagcacaagagttgacattaagtgaaaataaaatggatttttcgtggtttcagctttagaatggaacactaggggctgttgcaattgcctgcatgcaaaccaagcgtggggttgaatcgaagtggaaaagcctatagccataagcgttgattggaagcgtttccgattttcacctctacgtagtaactgttgctatttatctttctaatgtatttgcagaagtctcaacaagccaaggtaaggtaatgtattcaggttaggagagtgacatctagttactatgcttcatattaattttttgggggggagggtggtatggttagctcatttattcattctttcaacaaatcatttgttgggtagctatgaatatcatctttgggatacagtgtagaatatcatctttggggtacagcgtagcttacagtgtagaagggaagaaaagatataccatcaagaattcataagtgttcaggccaggcgtgatggcccatgcccatagtcccagcactttgggaggctgaagtgggaagatcacttgagcctagagattcgagaccagcctgggcaataaagtgagggctcatctttacaagaaaataaaaaacttagccagggtgtggtggtgcatgtctgtggtcccagctacgcaggaagctgaggcgggaggattgcttgagcccagaaggttgaggctgcagtgagccatgtttgcgccactgcactccggcctgggagacggagccagaccctgtcgcaaaagaaaaaacaaaaagagagttcatagaagggttcaaatgagaggtataaactagaagtttagaagggttcaaatgagaggtataaactagaagtttgataaatttgaagagtcaggacatttaatcttcaaagtaatccaatgagctgttaatattccagttttactgctgaaaaaaacggagttggagagaagtaaagtgcctggactaggctcagcagcccccaggcggacaaaccacacctacccagatcctcagccctcggggcagctgagaaaccctagcctctgtggtcctgatttccctgtgttggtagctcaagtagtgaacagtgcatctacaatctttaattcatttatttatttaaaataaaaattgcttttgagagatggggtcttgccatgttgcccaggctggccttgaaatcctgacctcaagcaatcctcctgcctcagcctcctgagtggctgggactgcagtcatacatcaccatgcctggtttatttagttctttttaagagttgggacagaaaaccaatgtggactcttagtgtttctgcttcacctttctcaatatttagaggaatctagtttgggcagatgtctgatgagccatttagtcatgaagagctctaaccaacagactttttttttttttgtagatcattggagggtgattttaatgatcacatacatagtgtgaatgtgagtgtgggtgttttatcgcgagttccctggtggtggtttgagcattttctctgggtggttccagtggcagtgttgatactgctagaaatggttcctgctcagggcacagtggtttttctcttttggtgaaaaaaaaaaaagtttttttgagtgaggtgagtgagggtatttctggtaagctcagtcatgtatgtttaaacaaaatgattatcattatttgctagttagtatttcattaatatgaaatatgagaaggtgagcactgggctagaaagaggtcaggagaccaaagttcttatcctgggctcttcctgactcttcaaccttagttgagcctgttgctcagggctgtgagttgcatccttaggttccttgagtgtatagaaatttctctctgtatagttggcaaagcctgtaatatggatattatgtaccaagactcaacttttagcttgatagtgctgcattatttatttacacattatttatttgtttctttcagtctcagatgccgtggctggattttatatttttggtgttgtattttaaaataccgtgttaacttgtggttgtttccttttctttctttcctttttactccaggagtagggggtttcatgtaggatgaaaatgaaaactaaagaaaaaataggatctggaagtaattttgagagcagaaaaattaaataaaatgggaaaatataccattttgttactagccaggtgaagagaacacaggagcatgtacgtgctttttctcagtaattggatatgttagacacggattatgttttcgctgggaccttgtagttaaaagaaagcaaaaagctgatctgaatgttcaatatttcccttttctcaagagcacatgaagttggtattgaaatgtgagttgcctgcctcttatttccatcgtttgaaatcagactgaaatcctgcatgtgggaccctcattctgtgacctctgtctgtgtatccaccaggcttccttgccagccctctttctgactcacaaatggcagtgggtgtgagtgcccaggaatacttagagtggtaaatacaggatttgggaaatttatctgcagaatgtcagccctcagtaggaaagtagtgctgtccaatggaaggcctggtcaaatgccttttggttggatgtttcaagctggtgtggcatagccggagattcccagtcctcaggagtgtggtagggtaggctctgtcctaccaggaatgcatttggattttagagatagttgagaagtagtttcttttggaataacatttaagacacgtttgggttctgggacatcctccttcctcatttttcccctgggagtcattgtggctggttgggcctatgggcctgcaggctgtgtttgatgtggtgagctccccttttccaaaggatgaacctatctgccttgagatgcctacagttttgcaacttcagtttaataattatatatggattttgagacataattggtgggatggatgcttactttcataattcatttctactcctgtgtccagaaatttgtaggcatctttgttttacagtttgtcatcatcttcgttgactacttggttgaatctttgaaatgcattcaacccagcatttttgttttttttagcactggctctgtatgtcacaacagtggatccctcagagaacacgtgggctggtagtaccagttgggaaaacatagcctaagtataatggaatctacagcgaagttccacggacatgtttatttaatagggacaaaagaaaatgttcaaatcacattttacctttccgagtttataaatccatctgaagtgcttgaaaaaaaatcatagtattagaaatggatgcatgtgtatataaaactaacactagaattctttgccaaatttaacttctcaaaagtgttcttagaaagagggactttcttggagagtatgaagtctattttgtctctaactcactaaggtcattctttgcatttctctttcggtgtgtctccccacaccaaactgctattaaaaacatacagagaaccttgggaggctgaggcaggtagatcacttgaggtcaggagttcgagaccagcctggccaacatggtgaaaccccaactccacaaaaatacaaaaattagccaggcgtggtggcgcatgcctgtaatcccagctacttgggaggctaaggcatgagaatcacttgagcctgggatggggaggttgcagtgagctgagattgcaccactgtactccagcctgggctacagagggaaactctgtcccccaaaaaagaaaaacaaaaacaaacaaaaaatacaaagaaccatgcaaaaaaccaaaaacaactctgcacacggatgtttatggcaggtttattggaaacttggaaacgaccaagatgcccttcagtaagtgaatgtataaactgtggtacatccagataatggaatattattcagcactgaaaagaaatgagctagtcatgaaagaacatggaagaaccatcaaggtggttgccaggggctagggaggagagagggatgaacaggcagggcacacaggactggtgctcccagggtggtgaaactactctgtatgagactgtgatggtagatacatgtcattatacattcatccaaagccatggaatctacagctccaagactgaaccctaatgtgaactatggactttgggtaataatgatgtgtcaatatatgtttattgattgcaacaaacagaccattctgttgaaagatcttggtagtcgggaggctgtgcgtgtggggcaggaggtatatgggaaatctctgtgctttctgcgtaattttgctgtgaaccttaaactgctctataaaatggtattatgaaacagcaacaacattcaaaccaaattgaggagacacagcactgcattctactcatgacatctagtaaagtgtcttttgacctatagtacttcttgaagttctttgcagcctgtcggcttgggcagcagtcactgggcagcaggggagaatccctcatcaagcaggaggctctgatactctaagaatgggattttccctggcggcttcatagctgtgaaagcactgacttcatgttcctgttttcttccttctggccatgtgctgcgctgtggacactaaggatgcattttctggtgagctgattcatatggtagatgccgtgttagccacactttcctgcatcaagggtggttacggacagcagggatttggtcgtatttgaatgtactgtgacctggggaccagaaatgctcaaatcctgcctcagtcttatcacccttcccacaaggagtcgtcaggactgtgtgcacaggcaccttagcacgaaagtgagcagttacgaggatttttctgggagccgacctcagcgtttcttcttgcgggttgtctttgacttttgaagtcagcatctgtgtgttcactgcgttcacgtgctcagttgcaggtagtaaggagacaatagggcagaaggctgggaagcatccttaccctcagggaactgacattctggatacagacaatatcaagagatgttgtccctgcgtatttgtggggggttcgttccaggacatcccctccctgccctgaggacaccaaaatccatagatgcttaatctcttttggaaaatggcatagcatttgcatataatttaggcacatccttccacacatttgaaatcatctccggatacctaaaacaaaataaatgctaggtaatagttgttatactgtattgtttagggaatgatgacaagaaaaaatgtctgggctgggtatggtagctcacacctgtaattccagcactttgggaggccaaggcaggaatatcacttgagcctgggagttcgagaccagtctgagcaacatagcgagaccccatctctacaaaaaatagaaaaattcaccacaggttatcactcataagtgggagctgatcaatgagaacacatggacacagggaggggagcatcacacacctgggcctgtcggggggtgggggtcaaggggagggagagcattaggacaaatacctaatgcatgcgggccttaaaacctagatgacgggttgatcggtgcagcaaaccaccatggcacatgtatacctgtgtaaccaacctgcacgttctgcacatgtatcccagaacttagagcaaaataaaaaaaaaaaataataataagccagtcgtggtgccgtgtgcctgtgttcccagctactcaggaggctgaggtgggaggatcatgtgagcctaggaagctgaggctgcagtgagccgtgattgtgctgctgctttccagcctgggcgacagagtgacaccttgtctcaaaaaataaaataaaatatgtacgtgttaagtacaggcacaatcatttcttgatttattttgaatatttttgatctacggttggttgagtccacagatatggaagccatggatactgaacccgtggatagggaatggcgactgtagttacaacatgtaccatgtgggaaggtgattgttacagtggaggcccttgaagcaaggaagtgttgggtgtttgagcttttgaacataggggagttaggaaggccccactgcatgggtgacattggagccaagatggcaaggggttgaggaagcgagccctgtgctgacagagggagcatcgaggcagagggcagagggctgggctgggcatgttggaagtttgggtggaaagagcaaagtgggagagccaaggagatgaagacagaggagggtcgtcagggcagggtctgcgggactgctggtgagatgggaagcctttgagggttgtggataggactagggagacacgatctggtttaggtccataggttctccctgacagctgcgttgggaggagactacgcaccatttcatgtggaccatggttctcagtaagcctgtgtttgggcatcgattagactttcttattgctcacacagtctggatcctactggtgcagggtgatggtggggtggtctttatttttgcaatttctctaggcacaaatcttttttcttcttttctgttttcttttctttccttttttttttttttttttttgagatggcggcgtttcactctgttgcccaggctggagtgcagtggcacatctcagctcactgcaacctctgcctctcctgggttcaagcgattctcatgcctcagcctcccaagtagctgggatcacaggtgtgcatcaccacaccaggctaattttttctatttttagtagagatgggttttgctatgttggccagattggtctcgaactcctgacctcaaatgatctgcccacctcagcctcccaaagtgttgagattacaggcatgagccactgcgcccagcccacagatctctttctttatagaagatgaagaaagggactttttatcctataagggtacttagctgatgaattctagaatgagttcaagcgtggctaaaaaatgcttgaagataatttcgggttctctgcagcccagtgtttcatttaccttccaaacagaaagctcctcctccctgcacatgctctgtgttgcccccttgccttgcctgtgagcagattcgaccgtcttttccattgatcacttccctttttggctcaggctgctcctctggggttttagttctgaaataagtgaaccatttgtcatatctgcttccttctcactggagccgcatgttaaatcgcggccggaacacatctgtcagatctctgagcttttcaaaaatgcaaacctgaacgttttggcatatgaccctgttagcctgttttaagtggcgtgtggtaaacttgcccacagatgttagtatacccgtctactttgaacaaaataataataactttcacatctggtcctcttttcatctagggatcttaaaaccccaagtgcacattagttaaacctcacatcactggaaggtagggaagggatggagggcaatcgctttaatcaccactgcaagaaacttagggggattgcccctgggtaacaaatgcctttcatctagcatcttaaatacttcccgagtattacctggtgggaagtgtatgatcacgcacatctgcagggcgtggggaataccctgagatactagggacttgccctatctttttgttgttgtcattgcagaagccttctttctttccagttcatgggcttttaccacttaatatggattatttggagtctgatggtgtgcactgaaggatggtattgttaactggtaaagctgtttggttttctttctatctttttagtttgggatacagataggcaggaagttcctttgaaaatttcagctgccttccaagctggtcactggggattctccatgaatgccatagtactccccttccctctaagagtctcttcccagaaagtctctcaggtgagctgggacaacaggaagacaggagaggaccataactttgatcagaggacagagtggcagctgctcaactccattcctagagaatggggcattctataagaaaaatggaacagaacaaaaccaaacaaaatcaggacatgtcattaataggtgaggaattcagtggctcacctgcgggaggggagttggggtctcgctggggtcagggtgttcagatgcacagcagttttgctccagggggactctgcctgacagtggaaaagcagaggcctcagcagggtctggagggtctggagggcgtgagaaacacggttggtttgcaaagggatgctcttcttcaattttaaatgtaatgtctttagctccattttaaacaatttctaaatgccagtgtgtagtatatctactgcttttattcgcagttgcatgtgaaagtaaacagtaaaggggaaaaatattgaaaagtgtgggttcttcaatgccccctccgtgtgacacctcttaactcactgatggctggtttctttccagctttttgacttaaaaggtagaaatgtatctatatttccccagatacatgatgaatatttatgttattttagatgaaccttcttctgtatacattctttttttttttttttgagtcagagtcttgctctgtcgcccaggctggagtgcagtggtgccatcttggctcactgcaacctctgcatcccgggttcaagtgtttctcatgcctcagcttcccgagtagctgggattacaggtgagcgccactacacctggctaattattttatttttagtaaagacagggttttgccgtgttggccaggctggtctcgaactcctgacctcaagtgatccacctgcctcggcatcccaaagtgctgggattataggcatgagccactgcacctggccccttctgagtaaattctaaaaacatactctatgagaatgtatctttccatgattcttctctagtagtatgaaactaaaaactaatttttttttttttttgagacagggcctccctctgtcacccaggctagagtgcagtggcatgattgatcacagcttaccgcacctccacctcctaggctcaagtggtcttcctacctctgcctcctgagtaggtgggactacagctgcacaccaccattcctggctaatttttgtattttttttttgtagagatggggtcttgccatgttgtccaggctggtctcgaactcctgggctcaagtgatctgcctgcctcggcctcccaaagtgctgggattacaggtgtgagccaccgtgcctggcctgtaaaaaaatacttctgttctttcctttggttattacagtgttggtgtactcattgtttacccttgtggtcctactgagggatgctggtatggagtaggtattcaccatttccctgtactttgggggcagtacagggaaacattaccaaaatatttcttaaacatttttgaaatacttaaagaaatgattttgttgtttggaaaccaaatcaagccaaaatctttgtctccagcctgaatgtcacatattctagttgggcagttaatctctttgcttttggcaatgttaggggccctgtggatggaatcctagaattcagaggtaggctagaggcagctgtctgaaaggttacaggcagaaaagatggctgagagcagcactgtgggaataaaaatcactagctccatcacttacaggctgtgtggccttggataagttgcctgagttctctgtgctttggattcttcatttataaatggggacaagtactttcctgatagaattgtcagaaaattaagaaacttcttcagcgtctgacttacagtaggtcctctacaagtgtcaattactattactgttgttatcaccatcatggacagcatccctctgcccataagcaggcaccaaataaaattttttttttgagacagagtttctctccgtcgcccaggctggagtgcagtggtgccatctaagctcactgcaacctccgcctcccaggttcaagtgattctcctttacagtatccacccacagtctgtccactgaattgagttattgttgaatgttgggtcccaaacgcaatgaattaaacttttccacgcacgcagtcattgttctgtttttaagggggtcaagcggccattactgtacccaccattacagtatcattcagaatagtttcactgccctaaaatcctctgtgctccaccaattcttcccttttcttgctaattccaggaagtcactgatttttttttttttttttgagacagggtcttgctccgttgcccaggctggaatgaagtggtgtgatcatagctcactgtagccttgaactcctgggttccagtgatcctcccacctcagccacctgagtagctgggactacaagcacacaccaccacacccagctaatttttaaatttttgtgtgtttctttttggagacagagtcccactctgtcacccagactggagtgcaatggcgcgatcccggctcactgcaacctctgcctcccgggctctagcgattctcctgccttagcctcccaagtagctgggattacaggcccgcaccaccatacccagctaatttttttatttttagtagagacggggttttgtcatgttggccaggctggtctcaaactcctgacctcaggtgatccacccgcctcggcctcccaaagtgctggggttacaggcatgagccatcacacccagcctaatttttaaattttttatagagatggtgccaggttggtcttgaactccagggctgaagtgattcgcccacgttggcctcccaaagtggctgggattacaggcatgagccactgcgcctggcctaccactgatgtctctaaatagttttgttttttctggaacgtcatatacttggaatcctacaatgtgtagtcttttcagactggtttagcaccactttttttatggcttcatgcactttctttcttttttttttttttgaatcaaagtctcgctctgttgcccaggctggagtacagtggcgtgatcttggctcactgcaagctccgcctcccgggttcaagcaattctcctgcctcagcctcccgagtagctgggactacaggcgggcaccaccatgacctgctaatttttgtatttttagtagagacagggtttcaccatgttggccaggatggtctcgatctcttgacctcatgatccacatgcctcagcctcccaaaatgctgggattacaggcgtgagccactgcgcccggcctctcatctttctttactttggctgtggagccctgaagtgcacctacagcgttctaccatggactccaccaaggaaccgagttccctgaggggcgctttgtctcacctgcgggagttctgtgggaaaaccatgaagtgggccccgcctggctgaagtgaccagtggttgcttgacccccttgtggaaatagaaatacaattgcatgtgtagataggtttaaaatgtcattgcgtttgggacctaatattcagccataactcaattcagtggacagactgtgggttagctgtttcgggtagggccacagcccctgcttcacagtgtggcggaggtgacagaaaagtcaatgcatcgtgacacagagacaggcagtggcaaaagtagaaacacccacaggaggggccaggttgttgaggccaagagactgggttcaggattcagtgtgggtttgaagccagggctgtcacaggcgagcagggtgcccagggggcaagttgctgtcattctccaggcttcagttccttcccctataagatggcagatgatggcacccccccccacccatagaggtatcgtgagtaggacatgaatttacgtgtgtcatgacttagaggagtgctctccacaggtacacctttgtgaatacgagctagaattgtcctccccatcattatgaggcagatgcaacacacagagtgagagggaagactgtggtccaggaggagaagaaggagcaaggagacttgggagaagctggactccaagctagtattttctttcctttttgcatatgatattcttagataatcatgcatattcattataggaacactagaatatatggctaagcaaaaagatggcaatcaaaactatcaaaggtattcactattcctatttagatgatttctttctagatttttatttctttctctgctgagttggtttttttgtttttttgtttgtttgtttgttttgatatggagtctcatgcaggtggcacgatcttggctcactgccacttctgcctcccaagttcaagtgattcttgtgcctcagcctcccgagtagctgggattacaggtgcccaccaccgtacctggctaatttttgtatttttagtagagatggggtttcaccattttggccaggctggtcttgaactcctgacctcaggtgatctgtccacctcccaaagtgctgggattacaggtgtgagccaccgtgcccggcctgagatggtttttgaaggctgtcaagaagggttaaagtttcaatcagtttggcttcttatgttataaggagcaatttttacttgcttttaaaattctgtcctgaactatttttaaaacacagaagaggctgggtgtggtggctcacgcctgtaatcccaacactttgggaggccgaggcaggtggatcacctgaggtcaggagtttgagaccagctggccaacatgacaaaaccccatctctactaaaaatacaatattagctgggtatggtggcacgtgcctataatcccagctaccctggaggctgaggaaggagaatcgcttgagcccaggaggcggaggttgcagtgagccaagatcgcgccattgcactccagcctgggcaacaagagcgaaactccgtctcaaaaacaaacaaacaaacaaacaaacaaacaaacagtagagcatgggaaataacgtactctgagaaggcagtgtggaccggcctcagattatgtggaggagcctgagtccgaggcagaggtgcaggcctgccgatgctgaatggcttcttcggccagtccctgcactgagcacatagggaatttcctctacctgtcctataactctcaggtcatccccccccgcccccttctttctgtggcccaggctggagcgcggtagcacaatcatagctcactgtagcctcaaactcctggactcaggtgatcctcttgcctcagcctcccaagtagctgggacaacaggtgcacaccactgtacccagatctcttttttttttttgagacagagtcactctgtcacccaggctggagtgcaatggtgtgatctcagctcactgcagcctccacctcccaggttcaagcaattttgcagcctcagcctctcaagtagctgggattacaggtgtgtgccaccacgctggctaattattgtgtttttagtggagatgggtttcaccatgttggccaggctggtctcaaacttgtggcatcaagtgatccgcctgcttcggcctcccaaagtgctgggattacaggcgtgagccgccgcgcccagcccaactctcctttttttcaattccacatttagcgaggctctgagaggtagagggagtcacctaccattgctcactggtcagtgtgcagctggggttgacctaagcttctgataccacataccctgaatgccattttctggctcattcctgccttggagacctcagactcaaccatcattgaccaaagccattattttttgtaatgttgtggattttttttgactaatgatattcagaagtgtaaagtgaattttttgcatttgataaaatatctataataaaatttaccactgtagccatttttaagtgaacaattgcacaaccattaccatgatctaattctagaactttttcatcatcccaaacagaaaatgtacccagcaagcaatagctcccatttctcatcctccacctccctgccccggtaacctccattctactttctgtttatgaatttgcctattccaggtacctcgtctaagtggaatcatacatcatacttagcatcgtgtttttaaggttcattcatgttgtagtatgtgtcagaatttcattcctgttttgggttgatgatatatatatgtatcttttatatatatgtttatatacatgtaagcataggtgtatatatacatatgttttgtttattcctctgtaaatgagcatttgggttgtttcagttttttggctattgtgaataatgctgctataaacagtgatgaaacaactcagcaacaacaacaaaacatgtaatttaaaaaataagcataggacttggatagacacttctccaaagaaaatatacacatagccaaattagcacatgaaaagatgctcaatatctgtaggggattgcaaatcaaaaccatggtgaggtaccaccttatgctcactagaaaggttatagtaatttttttttttttttttttttttgagatagagtctcactctgtcacccaggctggagtgtggtggtgcgatctcggctcactgcaagctccgcctcccgggttcatgccattctcctgcctcagcctcccgagtagctgggaccacaggtgcccgccaccatgcccgactacttttttttgtatttttagtacagacggggtttcactgtgttagccagaatggtctcgatctcctgacctcatgatccacccgtcttggcctcccaaagtgctgggattacaggtatgagccaccgtgcccggccaggttatagtaatttttttaatggaaaataataaagtattggaaggaatgtggagaaattcgaacccttgtgcattgttggtgggaacataaaatagcacagctactgtgaaaaagaatttactgcttcctccaaatgttaaacatagaattactatgtgaccccacaattccacttccacgtatatgcccaaaagaattgaaaacggggactcaactatgcacttgtacaccagttgagcagctttggaacatgtatttttttttttatcagttcacccttctcaaggctggttagtcactgtctgggtgtttagcttgttgcacagcagaaagtaaagctccagaaacaaaaggcctggcaacctttatgctgtacttcatgatgggaagccaaatgagtagaaactgaggcccaattgtgatgtgctggagacacaaaaaaatttgattcaaaactcagaggtttagctgggcatggtggtataggcctgtaattgtagccagctgggaggctggagcaggagggtctcaggagtgtaggagttcgaggttgcagtgagctgtgattgcgctactgcactccagcctgagggacagagcgagaccctgtctttgtataaaacaacaaaaacaaaaaccaccaactcgaagggcatcttgtaatgttgtgttatggaggaagcatcctgaatgagaaaccaggctgaatcagattttatctttctagtaacattatcaagataaagacaaaataacatcaggaagatttatatgcagaactctttccattttttcccctcccagactcaaagccaaaaagaactatttccaaagtagtaaattttgttggctttaccatgataaaattgacagattttgctaatcagatgcataaatagaaaatctaagtaggaaccagtaggttttgggttcttggatgctctatatacagagtagagtctcttgactaactaccaaattgttgataattcatcctggattttattaggctgtgggaatgtcttgggacactcacccttgatatttgttattttggaaattcactttgaatgacagaattttatcctgtggctgggcacggtggctcacgcctgtaatcccagcactttgggaggctgaggcaggcagatcacttgagctcaggagttcgaaaccagcgtggccaacatggtgaaaccctttctcctgtctctatgaaaaatacaaaacatagccgggtgtggtggcatgtgcctgtggtcccagctactcaggaaccttgggtgggagaatcacttgagcctgggaggcagaagttgcagtgagctgagatggtgccactgcattcccacctgggtgacagactgagaccgtctcaaaaaataaaaaagaatttgatcctctttctgcaaagacctgggagctgtacccaaattactgtttaactcactctgcaaagctgctgttactctgtgattgtgcagtaacctaaagaaaaatatcttcattttgaaatcctgttgagctgggtcattagttatgttttgatttctaggaacttctctgctgtgttggggctgcctgagaatatgaataagacctatagttgtctcatcaagtaggcacatgtacttttgtcctaaaattggaaagtcacagatgagttaagcagtggtggggtttttcttgtttgtttgttttttggggttttttttgaggcagagtctcactctgttgcccaggttggaatgtagtggtgtgatgtcggctcactacaccctctgcctcctgggttctagggattcttctgcctcagcttcccaagtagctgggactataagtgcgtgctgccatgcctggctgattttcgtgtttatagtagagactgggtttcactgtgttggccagggtagtctcaaactcttgacctcaggtcatccacccacttcggcctcccaaagtgctgggattacaggcgtgagccgccgtgcccgaccaagcagtgttttatgtttgtttggtttttgttttttgtttttttgagatggagtttcactcttgttacccaggctggagtacaatggcgcgatcttggctcaccacaacctccgcctcccgagttcaagcaattctcctcctcagcctcccgcgtagctgggatgacaagcatgtgccaccacgcccggctaattttgtatttttagtagagacggtgtttttccatgttggtcaggctggtctcaaactcctgacctcaggtgatccaccctcttcggcctcccaaagtgctgggagtacaggcttgagccaccatgcccggccaagcagtgttttaagtgtcgtcaatccacttgaaattgagaagatggagaggacagagcttacggggatttgagaagctctttttcctgcttaatttctggaccaactgagacaaacaaagggttcagcaagtggagaccaaaagctcagctttattatcggtaaatataggatttgaggttgtgactcagaggtacagcaacgtaggtttcctggacatccctggccatttgagttaggtagacttacccacctaggcagacctggcactggataacaggcctccctccctggggggcaggatctttccagttacctcacgatccacggtggtccaaccttgacttccccagaggcctggattcctaagcaagtgaaatagaagggttttatctaggcatgtgtgggtcattctcccaaactctctcctctgttgacatcaatgactcaccttcccagagccatcctgagggctcagagaggccaggaagtttgctgtagttgcgaatccttgatgtggaaggaaacaagaggcataggcatgcccatcacacaatcctatcttggctcagaacaccttagatccgataagggtcaaaccacacagtcctgattacttcttagcgacagagcttattgtttcccagccatagggtgaggagaagaatgcactgttagtgttttaatggtctttcaagtgggaatgcagtttttgatttagccctcacaaaatactctcctttatgaaaaatgctcatgccttttcatctgagggtggctacatgtcaccattgtctcaatcggtataaacctttccttgaaatattttggctgttaattgggaacaagcagtgataaaacgatacgatttttggtttaaactcatcctctttcagagcattctggcagcttctctgtgggaggcaggaaacagctaggtgacaatcttcaattttgtggatttcagaattgtagtgtaattatactagaacactgcagaggacatcagggtacctctcatttaacttcctccttttccagtttaacccagaatcttaatacagtggatcacccttggtaggcactcaatatgtagaagaaatgagtgaaggttattgacagtcggccgtatttttgtgacacaatttcagggtcatcatggttgatgatctcctttcatcgcaggtttattttttgagaccgagtctcgctctgtctcccagactggagtgcagtggcgcgatctcggctcactgcaacgtccgcctcccaggttcaagtgattctcctgcctcagcctcctgaatagctgggattacaggcgtgcaccaccacacccgcctttttgtatttttagtagagacggggtttcaccctgttggccaggatggcctcaatctcctgacctcatgatccgcctgcctcggcctcccaaagtgctgggattacagtagtgagccactgcgcctgtccttttttttttttttttttttgagatggagttttgctcttgttgcccaggctggaggagtgcaggggcgctatgttggctcacttacaacctccgcctccctggttcaagtgattctcctgcctcagtctcccaagtagttgggattacaggtatgcgccaccacacccggctactttttttttttgagagggagtcttgctctgttgcccaggctagagtgcggtggcgtgatcttggctcactgcaagctccgcctcccgggttcacgccattctcctgcctcagcctcccgagtagctgggactacaggcgcccgccaccatgcctggataatttttttgtatttttagtagagaaggggtttcaccgtgttagccaggatggtctcgatctcctgacctcgtgatctgcccgcttcggcctcccaaagtgctgggattacaggcgtgagccactgcgcccggccatgcgcagctacttttttgtatttagtagagatggagtttcaccatgttggtcagtctggtctccaactcttgacttcaggtgatccatccgccatggccttccaaagtgctgggattacagtgagccaccacgcccagcctcattgcatgttgattttatttatatttaaccaaaatgtggttttggtgcgaggtttggcgactctcaccaaaaaattaaagtagttaaataaataaatacgtgaaacttggatggaccccacctttataaagctggtagaagccatggaactgctctttatacaaatgcaggtacgtccctgcacataatttttacactcaattccagaaggttcagatacctttgaaagtcctccagggatcgtgtgctaagcatccttgtcctgggtccattcccagggcctatgcagaagcgctgaaattagcaagtctgtgtgacccctaccctttacaagcatgcacgttttaaaaatacaaatagctccgtgtgcaaaattgtaatttccgtctgggtagcgcttttcaactgagggttgaaaccttttgggagtttataaaataattttagtggtttgcagccaatatttctaaaaaaatatattggaataggataaaaagtaaaccaagctattatgtgtgtgtactggggttgagaaataaaaatatgggtccctgtttaagaaaaactgatgtatgtgcagcttgttttactatatatttagggcagtgggagcaatttaaagaaatatttgctttcttttcattaaatgctttgactatgttggccctttttcttcttcataggtagggtcaaagagtttagtgggcttactaacattttatataatatatcctactgccaatcatcatttatccacagttattctcaggatacctctaatatcagtgagcttaaatctgctgaatgttctgattttctgtgatagtaaaacttaaaaaaaatatatccttgccaagggtcagtgtgattggccactagttaaccatttcatgtgggagacttctcctccttggcctcacttttctcatttgtaagtgagaaatggtcctgataataatgatatttttctctctggattgttgggaagactgaatgagcttttatatgtaaaattcatagcgtaattcttccataaacattgttcttcttagtagcagttgtactgtttgtctaccatgcaggaatcacatcttacactcccattaggatttctgagaatctgttaagttgtccattctgactgcattaactaagtgaatgggcactctggccttgtttcaaaagcatctgtttaatcttttttaaaaaagtgtgctgagcacagtggctcatgcctgtaatcccagcactttgggaggccgaggcggacagattacttgaggtcaggagtttgagatcagcctggccaacatggtgaaaccgcgtctctactgaaagtacaaaaaattagctgggtgtggaggtgcatgcttgcaaatcccagttacttgggaggctgaggcaggagaatcggttgaacctgggaggtggaggttgcggtgagccaagattgcgccactggatggcagcctgagcaacagagcaagactgtctcaaaaaaaataaagtgtgctctattgaactcctgaattttttaataaattattttgcccccacatatcatgaatgacattaaaagaacaatctttcttttctctatattgtgaaccaacagtctgttcacctacaaatgttgcaaatggtgattatttggaacccagatgggagcctcccagaagactcagaataacattgaaactcaactgcaaggatttgttattaaagtaaatgtagtggaaaaaaaacacacaaagagctaaacaattttcctggtgtactcctcctcacccccatccccctccggaagtactttttgtaggtatcatgttgatttttaaggaaagaaacatactgaatttccaggattattaagtatactaaaagcaaatgtctgctgcaaataaatgtattcacattcttagaaaagaaaattacgcatgaaaacttggcttctgcaccactctgaacaatttgcaagaagaatgtttgggcttgtcgtatcttattaaataatatattggacacactatgcacagaaacattctttttgcaccaggcaggtgagtagctgccgtaatttaagggttgtgtgtgatgtgggctggagaagattgctgagctatgtctcagagggcttgacctttgttaaaaggatgccccctggcacacatttctgtatcataacctaacctctttcattcgccttttttcctattttcatattcttttttcttttcttcccgtcattctgtctggctataaaaaccttcccttagggagaatgcagttactgtatctagcagaatcctccgggaaaggagcatgaacttaagagcaagtggacctgcgttggaatttctactcagctactttcgagaacttgggccatatagttgacctctccaagcctcagtttgctcattgtaaagtgaccctattattatggatggattcagtgaaaacaccttcatacggataaggctcagatttttttccttttgggtgtatgtatgtttcttaagaagagaaataatttaaaaatcaaacagtgaaatttttggttagggaaagtgttttgtgaacaaggagggtcttttttagaactcctgaaatctcattattcctcatgttcccatgatctgtaagggatctgccactacatgctgcgtatactaatgacgctaactcacctgttatattgtttcccttccaagaccagtattatgtgcttaactctcatggctcacctgggagggggtcattattaggaacctcatatatggatgaaaaactgatgtttaatgtggttaactcccttatattagggttctctagagggacagaaataatagaatagatgtatatatgaaggggagtttattgggagaattgactcacactgtcacaaggtgaagtccctcaacaggctttctgcaagctgaggagccaggaagccagttcgagtccccaagcctcaaaagcagggaagccaacagtgcatccttcagtctgtggccgaaggcccaagagcccctggcaaatcactggtgtaagtccaagagtccaaaagctgaggaacttggagtctgatgttcaagggcaggaagcatccagcatgggagaaagatggaggccagaagacttagccagtctagtcccctccatgttcttctgcctgcttttattctggccgtgctggcagctgattagatgatgcccacccagattgagggtgggtctgcctctcccagtccactgactcaaatgttaatctcctttggcaacaccctcacagacgcacccagaacaatattttgcatccctcaatccaatcaagttgacactcagtattaactatcacacctctcattgtctttctggccgcagaggttaaattctcaatcactgctcagtccatgtgaagaagtgggtactagagacttttgtagaagtaagtaccaggcataaataggctagtgaggagatgtagagaatcctcttctccccctcaattcatggactgctcatcacacacttgatacattccaatgtggcagaaatggagctgttttggcatttttgcttagacccaggtgtcagatggtcttcaggaaattatttggacaagggtgatgataaatcaccttccattctgtttgggccataatccctggaacccatggtgggcatatttgaaatgatttgacttaaatgtttaaagctttagtctttcattgggtaatgtcttagagaagacaatttcttagtaatatgaattgttcccaaactgaagtccatcccctttttaggaaactggcagcccaatccaggccctcctgctcccctttggagggtctttgttcctccttgagttagcaattttgacaatattcctccaaatttgacaaaaaaaaaaacaaaacaaacaaacaaaaaaaccatttcctgatggcagagacatcagggagaggaatcaaatttcttctcctttgttctggaacgagcttattggcagttcattatttacatatcgtgagagagtcctgccaagccaatgcaggtgttgctgacttgctaagacaagtttgcactctattttctcttaagaaaaattggaatgcggccctttgtcagaggattgcattgcacgagtcactgagctaaatgtaaatatccgaaaatgcaaagtatgctttgctgtagaaataaacattttgacatcctgccttacatgattttcctcaatgacggttgttagtgccatccttcttctctcatcctgcattgtgtaacctttcctttagggtttttggctacgctaacaagagcacttttctaacttgtctgctttgtcattttggggtcaccaaattggtagtagaaggaaatgcagtaggtagcgttttccatcagggagtggttaccttctgcgtctgaaaggcagcgagtgacctggatttttaggaatcaggtgtgtcccggttgtaagtctgtgaaattagtttaacctccatgggggtaaatttcccagactttattggagtggttttggtagctttgtgactacctagaagattctcacagaagttcgttaacccaaggccatttttcacccagggtggctgactcttgtaacgcacaacccggaatttcagtggcttcatggatttataggtttacttactgcctatgtcacaggccaaagctggctggctgtgggaggggactgctttctctctcgccatgtggtcatacaaggacccaagcttcctctatctagttggttctaagctctcagaatcctcacctggcttctctgcatttggtgtgcagggaatactagagatagagcttggaggccttccagggacgtgactggggcagggtctggaagtggccatcattccttgcacccacatttcactggcctgaactcaggcgtgtggcccccacatagctgtgatgggcctggaaatgtacatttccttacttcccaggtgaaaaaggaattgatttagcatctctgccactgttgggtatttaaacttaatcttaaggtgaagtgtatctattaggaagacattagctgtgcaatttacttcacttggtagctgggtatttgatttgcatttctggacttatttttgcgttaggtggttatgagcttctcacagatgggaaagaaggggatttgggttttttactttttaaaatgctggagacttttcttctttgcctgatgatgtctttatatccagctcagagagccagaatgaatgtctggtcacgcatgatggattttagttgaaatcagatttgggtttttcatatagtttcttatagggatctatgctgacttcagagatgcccttaagtttgtcctgagtttctcactgatcctagctctccagggcttgtaggccacatcttcatttttttcatttgtgaagcattctcatgacttttcagaaggacgccagccagactctccggtctaggactctagaattctaggcacatgactcttcctgctgaaagatttttttcccaataagtttaaaagcttttcacctttcaaataattttgcaagagtttcgttttatttttttattcatttatttatttagttttgagacggagtctcactctgtcgcccaggatggaatgcagtggtgcaatcttggctccctgcaacctcagccttggaggttcaagtgattctcctgcctcagcctcctgagtggctgagattacaggtgcatgccaccgtgcccggctaatttttgtatttttagtagagacagggttttaccatgttggccacgctggtcttggactcttgaccacaggtgatttgtccacctcagcctcccaaagtgctgggattacaggttgtgccaccgcacccagcttaattttggaagacctttaaacctttcatctgttactagtcgtctttgacagaatatgttaaattactctaaattgatctttagtcagttttttccccctcccacagaattgatcggtatatcgtgcagagatttggtgaggtggaggtcattgagcttgtaaggcccagaatggtgaagttttcaagctaattgcatttgcttcctatagttgcttcatttttcatccctgtttcctcctctgcatcagcactaacccccccaactcccagcctttagtttgctgtaggctgtcaaaccagataaccaaacttgttaaattgagaatcaataggctgtacatagggactacaacagaatgacgctcattattgacagaatcaagttcaaactccttgtcctggcgtctgttggcctctggcagctggctcatctggcattagctggttgcacgagttgctgcaaccctcccacctccatcacacacacattgcatccccttcccgaatcacaccaaattataatggatattatcaatatcatcataacaaattacaacacgcgtttattgcgtgcatacaatgtgccaggtccttttatagagtatactatagtaaacattcctggcgactgaagcatttagaatatagtaaatgtagattaaattatgaaatgtttaaaataattatatgtaattaatatataatataaaccatatattagtgatttaataattacaggttaaatattaaatatataaaatatataggcatatagaatatatgaaaacatttaaccctcctcccaaggatgagttagataatgccattatcttccttatacaaacgaggaaatgagacggaggttacctaccttgcctaaggtcatgcagacgaaccattgtgcagcttttagttttttgttttgagatgacatttcactccatctcccaggctggagtgcagtggcgcgatcttagctcactgcaacttccacctcctaggctcaatcagtcctcctactttagcctcccgaatagctgggtctacaggtgcacaccaccacgcccaactaatttttgtagtttttgtagagatgaggttttgccatgttacccaggctggtcttgaaccctgacagggattccgatttcgtttctcaagtgatctgcctgccttggcctcccaaaatgctaggattacaggtgtgagctgccgcacccagcccattgtatagtattgactctgattgaattaacttggctctcttctccccatccttttatttcacttagggaaacctctattttttatcttgtaaattcaactgagattctccatcttcctgtaaccttccctcctctccagtgtcttcttcctgaacaggatggagcctgtaccgtctaatgagataatggcccctctccccttacccctcacttgtccagaggcatctgtttgcaagcccctccttgctagacttgagctccttgaagacagaaccaggacctggcaaaaggggagacctttattaaatgctggtggggttgatcagaattagatgatcgcacccacctccccaatttccagatagcaaaaccaaggcccagtgtgatactgccacagagttctccggggtagatccgggactagaacccatgtgtttgttcagtctgtgacagcatggcctttgaaagcagaagacctgacaaggattcctatttggttccttagttctggccgtgttctggatggtgtcctgggactcttggatgcaggaggtgtttcttagccctccgtgtactcagagggttggtaatggtcataagagtggcttggcatgaaaagacagagcaaagccctgaatttgcacaacctgctggctgagggtgtggatactctggtgaggacaagaagagcacattaacccatgtggctaaagggccttttgttttttctaatacaaaattagcaaattttatacattgtcattaattctcacattagtagaataagtgatgtggtaatttgtgcctcattccattatatcagttatccatatctgttttcacctgtatacataactaagaataaatcagccgtcgggtttgagattttgtttttgttttgaaattgacacaaacttctagaaaagttggcgatgcaatgcagtatgaagaattttattttctctaaatcattcgagagtaccaaatgtctttggctcttaccaaagacattagtgtttttcaaggcaactgttctatacagccaccatacaggggtcagagtcacagcatgagctgacccattcctgccagtcaatcggggcgctggaaaacggcgaaggtttccagtggaggatcatgccttgcccgtgattgtctcgtgtctttagactccttcagtcaggaacagttgcacagtctttcctggacttacaacgttgatactttggaagagtccaggcaagttgttgtgtagaatgcccctcagtttggtttgcccagatgttttctcacgattcactccacattggatcgttgcatcactggcagacacatcacaggccacgatgtagggtgtcctcctcctgtgtgttctctgagtgctcccgaagttggcctgtcctacttctgatgctgtctactcaccttggccacttggttaagacagcattgccagccttcccagttgtgaagttattattttcctctttgtgaaggaaagaaatgttagtaaatgttttgtggggggatactttgaaattatataagtctcttctttctcatcagatttccaattttatttctctctatatggacttgtagtttcctattttattcagtgggttataatctgctagtagtattatttattgatttttttttttagagacagggtcttgctctttcatccaagccagagtgcagtggtgcaatcagaactcaccacagcctcaaactcctgggctcgagcaatcctcctccttcagcctcttaaatagctgggactacaggtgcatgtcaccatgcctggcttatttttaaattttttgtagagatgaggtcttggtgggttgccaggccattctgttatttattttggtactcaaattgtccctgatttggcctgcaggcaccccttcaagtgtgctcctctgtctcgttgtgtgccaccatcctgtgctctgcctggattgtgaggacactggcggttcctcccctgggggacttgccctttggggcttctgacaccaccatggcagtcacccccgtgagcagacaccttctggctccagtcaccacgtttttaaaaaaagtatatcttgtagttagattgggttaaataagccatagacatttttttttcctggaggttttagggagaattgtttttgtgcctaaattgaaaaaatgaggcctgtttagaattcataaactggcacagaagggtagctctgcgcctccaggcaaattctcatacaaattattaaaagactcaggaggggttcagtcatgttaaaaccccagtttgaaaatgtcgtaatcacttttctctcagcaactggccgttgataaaatttccagggagctaggagggcagctttttaaagagaggtgtgggtgagagagaaggaggtgagcccccgtgaggggcagctatcagtggaacctttggagattgttttaaaattctcatccaaggtcctgtaaagaaggaaaaaggctaagaactgttttttttttttttttatttttatttcagagttaatgcccatcgctccttccctaatctatttgctacccccttgctgctgagtcctgagatccagcctttttggccagttgtagaaccaatcgcttattcggtatcatctaattttctatatggtttattctcatttaccacattgaaagtaatcagtgaaaactgttggctccaaatttaatttaaaacattgtttataggtagattttttaaaagtcagcattttagtggagtgagggcctaatgaacacttctagttgcacatctttgttgagcaaaatattttaaatttttaccatttattttataaatgttgtctgtctgtctcttgtacacatataaagttactacagagcagtgtgatgaaagatatttattggagacaggagttccgtgaatttagaaattcaatgggctgggtgtggtgggctcacgcctataatcccagcactttgggaggccgaggcgggtggatcttttgaggtcaggagtttgagaccagcttggccaacatggtgaaaacccatctctactaaaaatacaaaaactagccgggcatggtggtgggcacctgtactcccagctacttgggaggctgcggcacgagaatcgcttaaacccaggaggcggaggttgcagtgagctgagatcatgccactgggtgtgtcactgcactccagcctgggcgatagagtgagactcggtctcaaaaataaaaaattcaagacataccaatgatacaatattctaatctgttgtcaggatttactaagactgaaaaattctttttgtcttattgaattttcagcaaccacaaccacattttaaaaagaatcttaaccacgttgatattttagcacggtgctcttacctgtggcatacggtacttgtttggctgagtggaattgaactgggcccctaattttgaggctgtaagatggatttcttaaaagcagcttttcctgatagcttccaatgaataaagagcatttcaaaacttcagactgggatttaatctgtgtatcctgattcccttttcacaaaagcttccaagattattttgtcgtttactttttaattttattttcttccttctcttcgttttccttccctctagctacacattatttgcatggttgctatatttaccatttcttatgcctctgatactaacttagataggaaacctttacgttggcctggagtttctgaggaaattggaaaaagaactttttctttgctagaggagtaagtgaagtatatgaacatgtgtgtagctctcacagccaaatgaaggccagagccctcagaagccccaccaagccagcatcttctatttcgttgcttttgaaagtagaaccttgggacagagctatgtcatattcactatctcatttgctttttctttctcttttcttttcttttttttgagatggcgtctcactctgttgcccaggctggagtgcagtagtgcgatctcggctcactgcaacctccgcctccagggttcaagcaattctcctgcctcagcctcctgagtagctgggattacaggtgcatgccgctacgcctggctaatttttgtatttttagtagagacaaggtttcactatgttggctaggctggtctcgaactcctgacctcaggtgatccacccgcctcagcctcccaaagtgctgggattacaagggtaagccaccatgcccgaccactttttgttttcttttggtgatttttttccctgagggtgtttttttaaaggtctagttcttttttgttttgaaaattataaatcattttgatgctaattaaatgaagacaatgctgccctgtaagccagaaggtttaagttcaaaagttatttaaatatgacaacattacaagaaaaaaaaaccaattctttgtattcaatttcctaatggggtgccatcaataagctgagatacagccctggaactcaatcagccacaccttcccgcatcctgttggccttattcatttaaaatgagttaatgaatctgccagatctgtgaatgacagagatcatgctcaattaatgctgattctttgtgtgtgggggaaacctctgtagagcaccttttctttcttagagtaggtaacccagtacagtagttgtgaaactgaataattaaaactttggcttctcttaggaagagttcctagtcataggtgtcctatgggaaaatttactttttttaatgtcctgttccttattgctgcaaattatcagtatttataaagtaactgattttataccacttttttgttactgtgaccatggcagaacaatgtctcctagactatgtctgtgtaaagttgttagaatggtatcttgttcgttttagtgatatgaagatcacagctagcaacttacacatcagagtttgccagttcaaattcagcatggttgcagctgattaggaaattgatatgattattctttgctagtctgccttactaatggaattatatattggccagtaaaatgggcctcccaattgctgtttcaggagattttaaaatcttcaagcaacatcaattaggaaaatagctccagaaaatatagatagattttaattttattaaaatggcagtctacatcataatgatcttttcctgagactgtctttaccagaatctgtgtgaaataattcatctttttctacagaaagcagtgcaagcagtgtagtctccttgaaaagaaaatctcttagatgtttaggaaggcagacttggccgttatgcagcatcctggcttttgtggtgtagtgttgtgcgtttggagttagtgtgaaaacatggattacattaagtggaagaaatgtcttcttgcccagctcattcttagaacttaaacaacacaacagcttctactttggcaattatgttgtagcactagagccttttacgtggaagagaatgaggggttgcggtatgtcaaagacagcattcattaatacagcattaatgtgttgctcttgcgttggaatctgaaggtccttaagactttttgggttttgtttttaaacaaaacaatgtgaaaacattcaaggttgaaatgttgcatttgaagttatgatagttaaatatattcatattaccaagactaatatactggaagtggtttctttttgtgttgtaaaggtttaattttatataagacagttacttaaagtgatttttaacccttaaaaaagtggagatatatacattttttaacaatgccatgaaaacattttctttctcctgaggaaaagtgaatttcttatcagaattcaggctggccctgtaatttaaattaaaatacaattttagagaaacaaaaagtaacttaaaattgactctggatagcattgcaggctatttacatctccattttatatatgttttatatatgcacatatatatatacgcacacatatatacacacacattttatatatgttacatatatattttatttattacacgtatatatacacacacattttatatatattatatatattttatttatttatttatctatttatctatttattttgagatggagtttcactcttgttgcccagactggagtgcaatgacgcaatctcagctcactgcaacctctgcctcctgggttcaagcaattctcctgccttagcctcctgagtagctgggattacagttgtgtgccaccatgcccagctaatttttatatttttagtaaagagggggtttcgccatgttggccaggcttgtctcgaactcctgacctcaggtgatccactctcttctgcctcccaaagtgttgggattacaggcgtgagccactgtgcctggcttccattctatgttgaataatgttttcattctctaagccaaaatcccacctagatagcatggatggataactacctatttattctatgttttgattaatttacctagaatgtaattcctgtctggtcttttgtgctgtagaatcccaatggtgtcttgttttaataccctcatctgtgttccatagttacgggctgttattaagagaatctagagaagaatgagaaattgaacccagggtttttattgtagaattttaaattccactgtattaatctagttcttaggaattaggccttctagaaacaggccactggcttcctggccttgttgtggtctggatccttccaggagaactcgtgaggatagcacatctgcattcgagctgatacaacttccattctcgcccctgtcctaagcactgggaatattcataatagctgttgtgtatggttgttaacaaaaagtgatcacatcttataatctcactcggctccaaaattcacaatgcagtttcatccttactgttactttcatacataactgggggttgtctactataagccatgtttttggtgctgcctttcttgagtcaacttagcagcaaatacattttactactggcacctcctaccatgagatagctggaatttgattatgcctcaaaggtgtgacttttaaaatctaagtattatagaattagcattttaccgtatctctatttggtaactctgatttgctttgtgcctttctgataagttctggagcaataaataatgtttgccattggcaatgttctttccaagatccttacatttttgcttcttttcatctttagtcaacaatagttacttacgtttagaagatgaactgtctgtgactttaatctttagcaacaataatcttttgcaaaaacttgtagtaaagatgtgaagaagctagagaattgatgtattattactttacaagtcagtggtcctttgcattgacacttcttatccttgacgtttatcattgacgaggggttcaggatgcccccatctctgttctatgttgtgccttcctctggccatgaaagagtttgtgtattttcattgtaatcaataaggaatgagattctgtgaattcaggcactaatttcagagagcatttcccatacttgtttattttttttgaaaaattccagttattatggctcatgccattcttgcattgctataaagaaatacctgagactgggtaatttataaagaaaagaggtttaattggctcaccgttctgtacaggaagcatgatgctggcatctgcttctggggagaccttaggaaacttccattcatgccagagtgtggagtcaggggagcaggagcaagataccgagtggggaggtgctacacatttttaaatgaatagatctcacgagaactcacccactgtcgcaaagacagtaccaaggggggctggtactaacccattcatgagaaatcctcccccgtgatccagtcaccttcaccaggccccacctccaacactgggaatgacatttcaatatgagatttgggcaaggacaacatccaagctctgtcagctcaggagactggagattatgatgaccaatcaacatgcagacgtaaggaaagatccgacctttggtttttccaggctgccatttattgatcacttctgtggctcaggcagcggactgtgatttccaacagattgttccatgtactcttattattcccattttaccagtgaggaaaccgaggcttggtgatgtgaaatgactttccactgtcatttgggcctcaagcagcagaggcaaaatccccgccgattctgtctggctctgaagcccattccccaagcatgaatcccttactccctaccacataatgggtaacgtcgtgccttggggcttgagactgctgtcgtctaggaacagtccctattttgactaatgctgttgggtctctttcacagttgctcaagacctgttcattatctgtttcagatttcaagattaataattaacccgtaagggcttttcccattgtgtcaagttcaaacaaaataagctgacaaactccattataaattgaacatacgtaacaaacagtgcaagtcccaacaagaaataacagttgataggtttagtgttttctccactgaagcctgggccagtgtcagcagttaatgccttctcagaaatgtcatggaagggagaaggtggtgacgtggtagcatggccaggtttacaacttaaaaaggagggctgcgaaaggcataggggaggggcatttatttttaattgaatcccagaaggagctattgaagtcttttcaataattaaatatgcctatcatattataaattatttttgaacaaattgttgctttgtcttaaaggtttttggatgcactgtgttcataacaaaacaagacaagaaacccatgattagaaattttggtctgtggttgctgatgtttttgtttccattagtgtgaagaaactgctaatgaggtatattaaactccaaatctaagtattgttgttgaacctgtgttcctgttcgccctacgcctccctcctccgataacatttatttaacacggagtgatatatttgcttctttctctgactcatttgtagcaggcctgtgaaaagggatttgaggtggggaggatatataccattatacttctcatggcccagttctctctccatctgtttttctctctctctctctctctctctctcattgtttttttttctctctctctctgtttctcacacacacacacacacacacacacacacacacacacaccctcaattggatctgatctgatccatgcttggtgagtaagaagtacaggagccaaggatgacgtctgtcacgttagtgattaccttcttcatggtctattatgtgtggtacttttatggttgatggaaagttttagatgagggaagacagacaattagagagggaagaataccagatgagagtagagctggccagccatgacactgatatttggaaatgccaattaagtaaacaccttgatcacttgattattacaagtagatggaatctgtaggagtagaactgagcacatttcattaagattatttcccgcggtagtcaccatgacacactaactctttcacaggttttcaatagacagtttacaaaatcagttttcatgattaagaaagtttagaaaacactaggttaaataaagtgaaatccatttcgttactgttggagttggagtgcccaactttggccatagaatgcatatttcttggagcacctggtaacattcctgtatttctacagaaatatgcatagttattggaaggcagggtggcggagtgaagtgggcactgcaggtttggaaggaagcccacctgggttctcatgacagtcaagccactccatccgctcagctgtggacaggccacttacacagaaatgggtgtaagagtaagtcatgtgccctcccccacccaggtggctgtgatgattagattatctaatgtacatagaaacgtttttcaaattatgaagcaccctgcaaatagcagttattattacaccctctaatgtttttattgccataatatatgtatcgtcatactcgggcaattggtattccttttgagcactaggataacctgttaactgttcatcataaagaatttcattaagttgcacccctccctcttcatagccctctgagttcatcgtatggcacttaactctgagcattatatcatatttttggggtctcaaaaccctaacgtaaaacacaaaattggccattgtaactgttttcaggtgaacagctcagtggcattaagtacattcccattggccgggcacggtggctcatgcctgtaatcccagcactttgggaggccaaggcgggtggatcacctgaggtcgggagttcgaaaccagcctggccaacatggtgatacctaaaatacaaaaattagccgtgcgttgtggcaggtgcctgtaatcccagctactcaggaggctgaggcgggagaatctcctgaacccaagagacggagattgcagtgagccgagatctcgccattgcactccagcctgggtgacagagcgagactccgtctcaaaggaaagtacgttcacactgttatgtggccatcaccaccatccatctccagaactcttttcgtcttgcagaaccaaaactgtgtacccattcaccaacagcttgccatccacctttctatttctgcctcaatgagtttgactgttctaggtaccccgcattagtggaatcatacagtatttgtcctcttttgtctggtttattcaattagcataatgttttcaagtataccctctaattttatataatgtgaaattgtaattgagttttattcattttcttaatttactcaccgctagtgccattcttttacatagcatgaagttggaagggtgcatgtatccctagaacgttcctctagaacagccctgaagagttagtagcatgagtttaggagaagggatgtcaaggatatgcctttgagaaatgcagatcagaaatccagtccaggccagatgcagtggctcatgcccgtaatcccagcattttgggaggccaaggcgggcggattatgaggtcaggaaatcaagaccatcctggctaacacgatgaaaccccatctctactaaaaatacaaaaaattagctgggcgtggtggcacatgcctgtagtcccagctactctggaggctgaggcaggagaattgcttgaacccaggaggcagaggttgcagtaagctgagatcgcaccactgcactccagcctgggtgacagagcgagactctgtctcaagaaaaaaaaaaaattccagtccaatctcaaattgaaactaaaaggaccctggactcccctgataagaagactcattttgtttcttcttcagccagggatttgaaatagaagagacatgagtgtcagcacctaagtattatctttttctcttgtggattatcttgcagatgattcatgcataagcaggagttttaaaaattatgtattttgtcatttctgcctgtcttaaaatggttgtttttgatttggggctccgttggggaagtcctctgtcacttttaggtgaagatcatccacttcacatataaatagtcgaaaatttgaaattatctgtttttgttcatttaaataaagtttaaaccttttgaggtgtgcatatttttttttggaatgagtattctcttctataccaggattttagggtaaaagtatatccaaatactccttattacccccagaaatagaaatgtttcctttcccaaggatttcaatagtattctgattatacattaaatagtataccaaaatgatcatactattttcctgaataatcatcaaatccaggttaaaaattcggagttggccgggtgcggtggctcacgcctgtaatcccaatactttgggaggctgaggcaggcgggtcacctgaggtcaggagttcgagaccagtctgcccaacatggcgaaaacccgtctctagtaaacatacaaaaaattagccaggagcggtgttgtatgcctgtaatcctagctactcaggaggctgaggcaggagaatcgcttgaactcgggaggcggagcttgcagtgagccaacatcgctccactgcactccagcccaatccgtctcaaaaaacaaacaaacaaaaataatcagagtcaagaacctgagaatcctaatgtgcatattctcaaaaggtacgtgtattctttacctttgtcctgttaagggcatctattgaattgtagagactctcagctctattaccatcctgtggcaattggtattccttttgagtactaggataacctgttaactgttcatcataaagaatttcattaagttgcatgcctccctcttcatagcctctgagtttatcgtatggcacctaacttttgagccttagattacatttttggggtccccatctcatgtcttcattgctacccacccaaataatctttaagaccttttttttttttttttttttgtgatggagtctcactctgtcacccaggctggaatgcagtggcgtgatctcggcgcactgcaagctccgcctcctgggttcacgccattctcctgcctcagcctcctgagtagttgggactacaggtgcctgccaccacgcccaactaattttttgtatttttagtagagacggggtttcaccgtgttagccgggatggtctcgatttcctgacttcatgatccgcccgccttggcctcccaaagtgctgggattgcaggcgtaagccaccgcacctggccctttaagaccctttaagaagtcttaaaccttccttgtcctaccatgctgtgtggaatcttgaaccatgccatccacaaggtgggtgctaagcatatggtgacagtgaatggggttgagttgaattgagatggaggtctggaagccataaattgaagggaaatttttagatgaaaactagcgtcaggatcttatttacctttatggaaaaccgagctgtgctgggtggcgcagcgcagatggcaggctgttcctgtgagtgtggggacggagtgagagaaacagaaccaaacaggtggctcaagagctgccaccctggtgccaacatgcgttcaggccgtgtgcggggcccccttccccgtgcttgtgcgagtgaggcagccgcagaaccagaaggctgatgttattttgatcaccaagctctatttagtgaatacacttgattaatttccctccttcttctcatggatgctattttgaatggaaaatcactactggaaaaataaatctctacattaatgatgcccacaatcatgttttttctctttacataccatacccaacggctctcttttctgtgaagcccaacatttttaaagcccttactaggtgctaaattttactgaggaagaacctgaaaccacagagaaattaactgattttcccgaagttaacaggttaccctggtgctcaaaatggaataccaattgcttacccactatgtatgttctttgttttgacccttgaaaattcaaactccctgctctgtggtggagaagcagagttagaaaggactcctaagccaacactctcagcttgctttctctctagatgggtattttcagaaaggggtatagttagggcttggaggggctgagtgcctcctgagccttcttggcattggtttggtttaaatgtgacttgtcagttcttactagctgggaggaaatgctctgccagtatgatgcattagtcatgagcagggagtgggaggctgttgaacaatcattccaacctccctccccactgctggcctttcatgctgaactttaagcccagctgcattggaattgaggacttgctggggacaccccccaccctcaccatgctgtgtgcttgaagtcttggcttagaggtgggagagggtgatgatttcagatccaagactagagcagaaataacaccaacagggtagcttatgtacccaggacctccataatttatgtttgttgggaggggagggagggtggttaaaagtagcggctgtttcaagaatcagaagctgtggtataaactaccacattgttcctggatatgtgtgttttccaatctgtaaatatattttaatgcagttttccatgttgaaataaaaggtagtcaccactcttgatgatgttggctaccaagagacaaaagcttggatggttgcaattgtcttgaaatatatggaaaggaagacattctgcaagacttgccgctcttcgcagcgacctcttcatgccccggagactgtggctacctggaacacctgagctgacctcccttcagagcacaggacaggtggccttgtgggatggaagagagtctgtcaggagcacctgttggatattgcattgtagacattctgtgggaatacattttattctctttcttcctttggctaatattgatggcattactaggcactggagaaaaagtctgttgtgtggggaatgatggttcatttgatctgtcaacttggtaggttgtggtgcctagtcgtttggtcaaataccagtctagatgtctagatgttgctgtcagttatgtttggatgtaattaacatctacatcagtaggggttgagtaaagcaaatgacccttcataacattggtaggcctcatccaatcagtcaaagatcttaagacagaagactgaggtccccgagaaggaagaagttctgcctccagatgcccttggactcaaactgcagcatcattttttccctgggtctccaaccctaccttgcagatttcaaacttggcagcccccgcaaatgcatgagccaattctttaaagtaaatcttggctgggcacggtggctcacacctgtagtcccaacactttgggaggcccagaagggcaaatcacttgaggtcagtagctcaagaccatcctggccaacatggcgaaactccgtctctactacaaatacaaaaatgagctgcgcatggtggcgggcgcctgtaatcccagcactttgggaagctgaggtaggtggatcacctgaggtcagggcagatcatttcaggtcaggagttcgagaccagcctggccaacatggtgaaaccatgtctctactaaaaatacaaaaattagccaggcgtggtggtgcgcacctgtcatcccagctacctggagggctgaggcatgagaatcacttgaacccaggaggtggaggttgcagtgagctgagatcacgtcgttgcactccagcctgggtaacaaagtgagaccttgtcttaaaaaaaaaaaaaaaagtgccaggcacggtggctcatgcctgtaatcccagcactttgggaggctgaggcgggtggatcacttgaggccaggagtttgagaccagcctagccaacatagtgaaactccgtctctactaaaaatacaaaaattgtcctggcctggtggcgcatgcttgtaatcccagctactcgggaggctgaggcatgagaatcacttgaacccgggaggcagaggctgcagtgagccgagatcgcatcactgcactccagcctaggccacagagcaagactctgtctcaaaaaaaaaaaaaaaaggaaattgaaagcaaggtgacctgacctggattagaagggtaggaatagaagagacaagatgtagaagatacttcagggaccttcggggaagaacaaggggaagaaggacacaagaggaaagaaagaaatgaatattcatgaagctccaactaaataccaagaaaaagtgtgtttacatacattgcctcacttaattcccagcacaaacctgcaggcaggtatcctgttttgcagatggagaaagtgattcgtagggatattaagtggctggcttaaggtcacagatgcagtgaatggcaggttaggatcaggtctctcagatcctaagcctatgttacatttaccaatcacgctgccctcataagggtgaaaggttttgaccctaagtggtggatcatcagtaggataatcccaggaggtgagaaagagggatttgtgctgaagaaggagagtctggaaggaactagatggagccatgtagaaggctgtgggcagaacctacagttggggcaagaggaatatctgagggttatacaggcatggaattcggctgggcacggtggctcatgcctgtaattccagcactttgggaggccaaggcgggcagatcacctgaggtcaggagttcaagaccagcctggccaacatggcgaaactctttctcaactaaaaatacaaaaattagccaggtgttgtagcgcatgcctgcagtcccagctactcaggaggctgaggcaggagaatcacttgaacctgggagtggaggttgcagtgagccgagatcacgccattgtgttgtcgcctgggcgacagagcgagactccatctcaataaataaataaataaacaaataaataaataaaggcatggaatttgagggaagggtgtgtattttggagggggtgcagatcagcaggatcagatgcagatgggaggtcatagccatatgagttcctaaggagagctccttccatcatcagcagactttctggattggaagctggccagagacaggtttctggaagattaagcttttttgttgttgttgttgtttctatctatgaggagaaaagttttgtataacttttttaaaaataatttttcattgcctgttgttgttagcctttattcttccagactgtagaactgaaatttcttggcttcttaccctggctgtgtctgaaatcacccacactgagaaatgcagttatggttggaaaggtgtttttttgtttactgcatcttggtgaatcacaatacacagtattgtcttgacttgtggtgggtggagatgagcccttctgtcttataattttcttcttctacatatggtgcggttttattaactactggtgaagggataatttgttattatcgttgttgcaaaagcacagctgaatttagtggtccctagtgagcgctagtgctatcaccagatgatttcagaggagccagaggatatcagcacatgtctccttaatggtgatgtgctaccttcctgaagattctgggagattttggccctcgcacatgatatgacttcgtaataaggctaaaatgtagataatattttgactgtacagatggggaaactgaggaaacacaggtggggtttgctagttgcaaaagcagtcgccatcagcagaaaacagatcctctttggtaaaaagctattccataatctgttgctaattttttttttttttttttttttttttttttttgagatagagtcttgctctgttaccggggccggagtgcagtggggcaaccttggctcactgcaacctctgccttctgggttcaagcgattctcctgcctcagcctccagagtagctgggattacaggcacgcgccgtcattcctggataatttttatatatttttttcttttttttagtagagatgaggtttcaccatgttggccaggctggtcttgaactccggacctcaagtgatctgcctgctgtggcctctcaaagtgatagaattataggcgtgagtcaccatgcccagccaatgtttgttttttgagcctgagttctccacaagttgcctttcctgatttttttttggtaggtcccagatcggccctgtatttccttgagcactggccttcaatatcagatgaatgtgcaagatgaattcatcagggcatgaaaggaaatttcaaaatttatgtttcatcttttgcctttagatttctgttggttcaaataaattatgtgctatataaatacatacagaaaattgaaatgtgcataatgtatttgaacagtacttcaagtatatatacattaaataaatcagcagtggtaggcatactcttcggggtgggcatgcttagaactatttttttgaatggtgatgccaataaaaccatttgcatcatagtgccctggacaggagtatactcattgattcgtagagggcaagcctagtgtctgtttcacttcccttgtgtgtggtcccatagatattacttggcagtgaatgtcaggcttttaaagcctgttgctgtcatactagaaacagatttgctttgtgattttatgtatcggttttctgcatggggactgatgtatcactgtttgagaaacgttcccatgactccccaggaattgcctttatattaaaagaggctgattatcctcttatgatttttagggaggggaatatgggctctgtttgatttttgttttcttctacataacaaatctgattcgcaatgacttcatatgctttttattctctcccaatttgtcatttggctaggatgaacagtaattgttgtacagccaaaatatcttgcaccggcttttaaatgagcttaggtcacttttctggggtccagctcagtggtacttttgccttaattgaatcacctatactgaaaaaagaatacccagtagagaaaaatctcatggtggttaccattgtgatgcccgtgggttttgacttgagaaagttaaagaaatatggacttctttccaggcgtagggagcacaaaaacttccagaccatccacctaactttaaaaagaatgggtgcttaggagagttgggccaagtcacttgtgtcccatagttaacccatgtctttcttgccatccctctgtgcccatcaccatgtgctccactctcatcctttgctggtctggtcactcacataaaccagggcattgcctgagatctgcatggtgttgcaaagctattgacttcttattttatacactcacagaaaagttaaatgattgttcttaaatgctacatgtgtttaagtggcacttgggcatgcttatttatgcattgcagatatattgcactgtgatttgtacagctttgatcattgcctgcattcagtgatcttatttaaataataagagtgagttcaagatgtgagtcaacagcatggtgggtttcctgcagcctgagaatattttggagactgaacccaaatctgatttactttttaactttatgatgccaaggctgaggcatcctatttttatttttgcattaaattattgaagctgttaaatccatttattattacaggtattgatttagtccatacaaagtgtggttgagataatgtttgaaacttctggcctctcatggataattagagggtttggttttgtttttgtgtgtgttttaagttccataaatctgcattggaattggccattatttgtgtctccattccaatatcctccctgatctaagttttttgggagttgctatgctctgaatgttggtataaattcatatgttggaacctaatacctgaatgtgatagtatcatgcggtggggcctttaggacgtgattaggtcatgagtgctctgccctcataaatgggattcgtgcccttatgaaagagacttgaaggagcctgtttgccctttctatcaggagaggatgtatcaggaaggtgccatctgtgaggaacaggccctcatcagatgctgaatctgctggcaacctgaacttggacttcccagcccctagaactgtgagcaagaaatttctgttgtttataaattactcagtctaaggtattttgttatagcagcccaaacatactaaggcaggaaggttgttttttttgtttgtttgtttttgttttttaactgtattgctgttctagtgggttccagtcctttgtttttgaggtcctttgtggaatggacaccaaatttccagtaagatcactgtgagtgaattgtggcccctcagggataacatttgaatctggtgcttgattatacctcagagtggaaggtgttattgtcaccttccatttcagttaccaagccaggaacttcagagaagtctatgcctccttgttcttcctccttctttcctcaaaggatgtatgtggccaccgagtcctggtgatcctacctgtcattctcactactccaaggcactcactgtccccgttgggccatcccaacttattgatggcttgcaataagtctttcccttctcttccaagctacccaggtgggaaaactatgtttgatcatgtaactcccataataaaatctcatcgtgtaatcccatcaaatacaatcatgttcagttcctttgtgtagcatccatagccccagcccatctttttagcttcatcatctccagctttttcccatgcactcgcctcactgcaacattgggctaatgatactttcattcctcagagtctttgcttatacccttctcttttactggaaatttctgtccttctctttgtgtaaactctctcctatccctgttcatttcctctcatcctcctaagctaagccaaatcctattaacctgtcaggaccaggttcaaccgagagcctctcctagcagaattagtctatttcttcacatccttcactattaataatgccagactagctgttacagccctgtctgagtgggtagatgcccactgtcttcccagattatatgcatcataaagaaatggtctatttcctcattccaaacatataacaggtgcccagtaaaatgttggttgagttgaactgaatgtgtgatcatcagtaaaattctacatagatactctgtcttacccaaacaattcataagcagtttttagatagccctaagcgtagctatttagaagcctatttttatatactctttttcataagatgctgtcatttgtaaaatgcaccactattttgcataccactaagaagcagagaaaatggcaccactaaaccccaatacaccattgtgattgtaagatatattcaatttcaaagatgttaagagtcaaaaatagtgtttcttaaaatcaatgaaataaagaattatgtttttacatgttagagcttgtagtcttaattgtataactgtgaaacaacttgaaatgatttgcaaataaaaacttaaggtcattttttttttccattttaaaatgaggagtgactaaaggagaatttgggaccaagtgcccagggagtgacttgggactcaaggccttttgaccatggttacgtcactctgtcttgtggtacctctgacaaagtcctcaagtttcaacctcagttcttctctttcaaaagaatcatctgtattttgaaaatctgtgggaagaatttctttaaataaataaatgcacacacacacacaatttgttgagacaggatctctctctgttgcctagggtggagtaccatggcacagccacagctcattgcagccttgatctcctgggcttaagtgatcctcccgggcaagccatcccagtagctgggactacaggtgcatgccaccacacctgactaatttttttttttaattgcttttacagatgatgtcttactgtgtttcccaggctggtcttgaacttctgagctcaagtgatcttcctgtttcggcttcccaaagtgctaagattgcaggcatgagccaccaagcccagtcctttaaatatttttattttaaagaaatagacatgaggtcttaccatgttgcccagactggtctcgaactcctgggcccaagtcgtcctcctgcctcagcctcccaacatgctaggattacaggcatgagccactcactgtgcctggaccctttaaatatttttttaaatcattaactttaaaatgcaatattctttgctgcactgcgatgtttatttagtctttgattaaaatccttctgttaggttatgctacctaaacacatatcaaggttgatgatattcataatatccccctagcaatggtgcaacacaggatcctattacaatttcactttttacatatggaaactcttatttcccaactatcatacttgcccaataccttttagttattaaattaagttgctgatcaatgatatacacacacttacatacttaatatttctagattctctttcttcctctccacttacaatgtcatagccttaaaagctttctcattatctggaagactgaactctctcttttattttaattaattgattaattaattaatttatttgttgagacggaatctcactctgtgcccaggctggagtgcaatggtgtgatcttcgctcactgcagcctccacctcctgggttcaagcgattctcctgcctcagcctcccgagtagctgagattacaggtgtgggccaccacactcagctaatttttgtatttttagtagagacagggtttcaccatgttggacaggctggactcttaactcctgacctcaagttatccacccaccttggccccccaaagtgctgggattacagatgtgagccaccatgcctggcgtgaaatctctctttaaccatgttctgttaaaagaatttcatgccgtcaacacaagtgcaacagcagcagagacagccccaaggtgaaagcagcaagtccatggggggagtgattctttttggatgggccctttaggctcaaagcatccagggacaacaaggcagattttcacaccccatccccgtgacctttccagcagtgcttgggattatcttctctgttgtctggatgcaggcagtcccagcccttgttgccaacaggcttagttgccaccctggcctcttgagttcatggcctcaccgccccccccacaagctcttccctgattccagagtggccacacccctctgtgtgcgaaggcagctatgggttgggaattggcttgggggggtggcttggggaatgaaatcatagctgatgaccacatcctgttctgcttcctgatgaaggaaggggacctcttgatatcctgactgtatttttggctgaaagactttcctcttggctgcatggtaagggaacaggttaggggaagccaggctgtaggggtcagaggccatcagggaaattgcaggttgcactttcgtgcttttgggtcactggggcaggtctggagaatgtcttggaggtagacagaagctgctgagtctgagagtcccttgcggtgcctttttccctgacttcccatgttgggccatgtcccttggaatggagactcccttgtctccaggctggctcaaggctgaacttcaggcttggaaaacagagaattagaaccaaattcctcactttgggaagccaaagtgggctgatcacttgaggtcaggagttcaagaccagcctggctaacttggtgaaaccccatcactactaaaaaaaatacaaaaaaaaattagccgggtgtggtggcacatgcctgtagtcccagctactcgggaggttgaggcaagagaatcacttgaacttgagaggtggaggttgcggtgagccaagatcgcaccactgcactccagcctgggtgacagagcgagactccatctcaaaaaaataaaaaataaaaaaattcctttcctggaacttcagtctttgacagtgaaagaggagctctgtttaccctccaccccccctgctgtgtgtcctaggaagtgtggcttcctcctgtgcctgttgcagcttctacaacttacatgggagtgggaggcagctctgtccaagggaagagacctaagggtggctcaattttggaaaatgagttgttggataaagtgatttgattttgacatctcttctaaaccaaggtgttgatatgttcttgaggcgattattttggtgtgcggtttaaggattattactctcttatgtttcataggaggtatgaaaacactgagaatgaatactgtcctctcccactgtcttcttgcacgagcttagattacctagttctctcacagggaacaccctgtacgttaagccacagtgtggtgaaatagcaaaggacagatctaagcattagaagttaatgacattcagctccatttctattttctttggggatcaaatgttctaccctgccttacgatgtaagcgtgcttttttgatgtgactgaaacttggaatttaggagccaagagcgagcccaaagctgtgttctagcattccatggaaactactcttggagtgttgggtggaattcccaagtgttcagtagctttgcggctttaagaaatgggaaaaggggatgggcgcggtgactcatgcctgtaatctcagcactttgggaagccaaggagggtggatcacctgaggtcaggagtttgagaccagcctgaccaatatgatgaaactccgtttctactaaaaatacaaaaattaactgggcatgatgtgcgcttgtagtcccaactacttgggaggctgaggcaggagaattgcttgaatcccggaggcagaggttgcagtgagcagagatcatgccactgcactccagcctgggcgacagagcaacacttcatctcaaaaataaataaataaataaataaaaaagggaaagaaaagaaagaaagaaagaaatgggaaaagagatgctgcttggattttggagaaagcacatgattctcatggtgtgtcctgagaaagttattacatccatttcagcgagctggggcctcatttgaaccattcctagagtcaggctgtatgaatatttgggagatttggacactggccatgtaacacagcccttgggggtctggtggcttctaaaccctgttgggaggaagctttgcaggaagtgatgtggtgtcagtgttgcagtatgttggcagctgtcagtcaaaggtgtagttgcaaggtgataaacaccaagaacttaggggaagtctaaagagcactttggcctgatgccatgaacacagtgccagccagatagtaagctttccataaatggtagctcgccctaagttgacatacatagtaacttcactttgaaatgtaccgactttacttctaagaaatatggtaatgtctgtcctggctgaacctgttgattaagtattgtcaaagatttaccgctctaaaattaaagttatgattttagatagttcccaacttgtggttgacttaaacatattgattgtatgaatctgttctcttgcttagtttatttaggatatatttggatacattaggaagtaacattgcccaaaactagggcagtctgtggatatggaaagttctggggactttttaataattttctgatttgggtgtctttttatacctgcctttgaaatatggtggggctaaaactatttcattcatgctttatggagtaggaacttggggcccttatcatggctcattcatctgttcggagggattggtttttcactgggagtcctggccctgccccagggccgtcagtgggaaggtaggaagctttgtgcatgaatccttattgctatctcagctttcacagaagccagacagacacacccttggtgaaaacagtggctttacaccagatggggtgtggtcatctgtcagcatgtcccagctacaatcagctgtgagccagagagtccatctcaaggtcacccccactcagtcatgcttctgcactccgtggagggcaggcagtgctcaagaagaatttcctggaaggaacactgtctgtccactctgcagcagtatcctgcgtcttcaagacggctgcttgctgctgaattgcggtttttaaaaaaataattttcaagacaagaaacattcctatgaaatttgtcactgagcctccgtggaaggatgaggtctagagcattgctcatcatatcacagtggcctcagaggaacaccagtggagatgcctgtttgatccgagtaccaagaaccaagaacttttgtgcttcctttgagccatcgatttggacattgtgaaatttacaactgccatgtttttcctatttgacttggctgttataaagcttactgttaaatggagctagatgtgtagctcaacaggatattcatggttaccctcattcctcctattactttttaaattgtgtatccttagaagtcattcccaagttttttcttaagtaacagtttaaaaagtgatgaaacttctttaatttctgagccacttaaaattttctaatgtgctagatccatccatctacatccatccatctgcccatctaccatccatctatccacctaccacccatcaattatccattcaccatccactatcactctatccatccatccacccatctaccattcatccatatctctatctccatccaccacccatccatccatctaccattcatccatatatctattatccatcaccgtctgtccatctatccatccatccatccatccatccatccacttatctgtccattcatctacccatctaccatccacctatttatctgtcagtactgatttggggtctaagtatgactgttaaaagctaaaggctgttggtgcttattgcatatgaaatacatgtttaggattttgatccaagacttctgcccccactgtttaagctcaatgtaaaggaaaacctcctgattgtcattaaactactggttatggaaaatttggggacactaaatcgtagtaaacacagtaagaatttccatacttacataaattttatagtttatagtgttacatgttgattatctaatttctttcctataagaaaaggtattagaggtaagtattgataagacaaataatatttacgtcctcattttttctgatggttttcagaatgggtaatttactatccaaaagtcactttatttatgaagtaatagcacctgaattgaacctgggtattttgagggcaaatacaatacagtatccttttctctacacactgatgcctggaacttgcaaggacttaaaaatgacagaatttcccttatgagtgtgtttttttgtcgttgtttttttttttttttttttttttgagttagggtctcactttgttgcccaggctataacctcaaactcctgggctcaagggatcctctgacctcagcctcccaagtagctgggagtacacatacgccaccacacccagctaattttttttattttttgtagaggtgggtgtctcactgttttgcccaggctggtcttgaactcctgtcctcaagccatcctcccacctcaacctcccaaagcactatggttacaggcatgagccactgtgtctgtcccctgcccccccacccccaagtgtctttgacactttgaaggtgaaaaagaaagttctggtttggcagacatttttggaaaagccaaggattaaatgctgtggacacagtatttctgacaccgtattttcatcttaaataatattacaggagtggagcagtgggacttctcagccccatcaatttttgcgggtatttgaagcctgagattagttttggtaatacttccagtacacacattttcctgtgaaaactgcttatttgacacatgacacagaaattggccatatgaattgaggattgtattagtccattttcatcctgctgataaacacataccccagactgggcaatttacaaaagaaagaggtttaattggactcacagttccacgtggctggggatgcctcacaatcaaggaggaaggcagggaggagaaagtcacatcttacctggatggccgtaggcaaagagagagctcgtgcagggaaactcctctttttaaaaccatcagctctcatgagacttactcaccaattgggagaacagcacaagaaagacccacctccatgattcaactacgtttcactgggtccctcccatgacacgtgggaatgtgggagttacaattcaagatgagatttgggtgggggcactgccaaaccatatcaaggatgcctcagagtgagactgaaaaacttggtaatttcagcattcgcttccctaggagtcatcttaacataatgtaagcaggcctactggtactgctggatttcatcagtatggctgtgtgtgtgtgtgtgcgcgcacgcgtgtgtgtctgtgtgtgtctgtgtgtctgtgtgagctgtagccgattgagtagaccgcatgcatcttctagctggattagttaactctccttgttccacagcaaatttaaggtgactgatgtcattcaatttataacatatgattcagtttcaatgaattaggtatcattttgctaaggaagcctgcataatactggcccattctgtagcacattctttatggtttaaacattttaaatagtagtggaaataatagctaatgtttattgagaaccgatcctgagatagggtaacatttattgagaaacgataatgggataggcacgaggcaaattctgtaacatagatgatctcatttaatgctcatgacaacccaatgatttaggaatcttatcatccccacctgttagagggataggacatttagagtttgccccaagtcacgctgaaagtaaagatttgacttgcaaagccaagatatgaccggatgcgtgcagcccgactcccagcttggactcccaacactgagcttggtacgtagctgtctcccagtgaaactgagttctttgcagctcttggagaaaacccagagtactgatagttcccaaattgccatggtggcatccattcacaaggccatgagacaattaacctgctgtaagggaaatggatacgtacttgttggcacattgtgaccttagcatatctgctgattgtggagctcttcattagtccatgtcatggatcagttccgcaaccagggtcataggcaaattttttccccacgaaagtcagaaagaagttataccaaatcgactccgttttgctttccttcgtgtttttcaaataatgccctttctctctgtatagtttttttttgtttatttatttatttatatatttttttgttcagggactagaagaatatagatagagaaaaaattttattctatctgaatacgtaatttttttaaagtatagaaaatgcattatcagcctccgttgtgcaggtggaaggacagccgcctgccggcctcctttgccaggaagaatccagccttgcaaattattggcagctggcaccgtaatgagtccatttcagcataaatgggctattgcttattaatttctgccagttcctaagcaattcaggaactgctttggaaattcggaaattcgcagagagccgtttaaggaggatgcccagggaaagggagccaaccgggtagcaatgggggaattgtggaaagggaatatattgtggggtaataatggggtattgctgagaactcgtgctcctttccctgcaagcatgagtcactaacttcatggttaaatagcatattttccaagataaggaagaactgtctttgcttattgttccattctggatagacgtatatatttatttactgcctgtatgtggctcctttccacaaaataggcagttttcttcatattcctgctcaaagtgtttgtcatctcaggttcccacctgctgaaaccaccagcagcgggcagccccaggggaatgtctgggaagaaagtaccaaaatgaagccacccaaagaggcccttcaggcctttcttttgcttgccttagtatttgtaatttcacctctaccagcaggctttaaaaagatgaaggaaataaaacaaccccattaaccccacgtgttcctggagctcttgtccattgattttccatgttaaattgcagtttggatcttttacctaaattttttcctgtgcatattcttcatgcattttctctgaatttgatgtttgccttcgtaagaaaacgtgtatacaatggaaagttctatgtaagtgatttgggcttctgttttactctctttcagcattttcttcaatgtttgttataaatacagcactactttgagaataactgagggttgctggtttcctttcatttctgtttcttgagactctgaagattgagtgggacatgggaatcattctgtagtaacctgtttctgttgtccaacaccttaatatacacagatagattaaaataataagataacttagtctgtagggctatgtattaccctaaatgtaaataggctggtgtgtatttatttatttatctgatttaagcctgtcattttatgcctgtatccaaatgttgcatcatttgatttgggatgtcatattgttacaggaaagaggtcccgatccagactctaagagagggttcttggatctcgcacaagaaagaattcagggagagtctataaagtgaaagcaagtttattaagaaagtgaaggaataaaagaatggctactccatagacagagcagccccgagggttgctggttgcccattttcatggttatttcttgatgatatgctaaacggggtggattattcatgcctcccaggctggagtgcaaaggtgtgatcttggctcactgcaacctccacctcccgggttccagcgattctcccgccacagcctcctgagtatctgggattacaagcacctaccatcatgcctgggtaatttttgtattttagtaaagatggggtttcaccatgttggccaggctggtcttgaactcctgacctcaggtgatccgcctgccttggcctcccaaagtgctgggattacaggcatgagccaccacgcccagcccatgcctcccctttctagaccatataaggtaatttcctgacattgccatggcattgtaaactatcatggtgctggtgggagtgtagcagtgaggatgaccagaggtcactcttgtcacgatcttggttttggtgggttttagcggacttctttactgcaatctgttttatcagcaaagtctttatgacctgtatcttgtgctgacctcctgcctcatcccgtgagttagaatgccttaagcatctgggaatgcagaccagtaggtttcagcctcattgtacccagctcctatttaagatggagttgctgtggttcaaacgtctctgacagtatttcacaaaaagttgacgtcatggaattgacgaaatgggtttgacagaaaatgcccatttccttccttctgcctcatccttttctttctgtttttctatctcctctgacctgctcctctccaggtttttggcgcattctcacagacttagatgaaactgtgatggccaccgcagggggcaggtgctgacatcgtccccagccctgtggctgttcatccggacatcatttccaacctcaatatctaaatgccacagtgctcttggagcaagttgggctggggaccactgttgccttttaaggtaggtttgcatatgtatatttgagcctatatgtttgtatgaattaatggaaatgcttcaaaggtggtgggacagatacgttttactatcattgttgtgtgtagctcgtgggaaaaagaatttggaatcacttccttggattagggttacacctatctgacaattcgaaagcattagcgttaaaacaaaacagaaaagacaaagtaggtgcctatgaaatcctttctccgctgtgaattgccctcaggatctcgtaaatttatccctgggcttcaccatctttatatcggattatgtttgaaaaaggcaaacccgagcttcaaaatctgacttgaaaacaatgatatgttttgtttctgctttggataatctttgaaaagtaaaaataaacacagtcaaaataataatcttttcaaaatcaaagatcatcttatatttgttgcaaaactttcctgcttagtctctggtgttcagggtatttgtgtgtgacttggcaaaactcttttcatgggttgtaacgatttagcgaaaactttcagaacttcgtctcaatttaatcttagctctccctcacccccaccccccaacaccgtcttcaagctcagcctccagtagggaaaaaacaggcttgaaaccaagacctcccactagaatctaattttacatttgcaatctgttgtcttgtgatttcgcttcaaatttaacttagaaataaatacatttcatcctttctcctgcagttttggaggcctgttttcaagtcatagaagggtaatgattacgtttattttaataagtttttaaatacctcaggggagtgaaaatttatattattaatcattataacttacatcattaaatgccttatggtcagatttcacaatgtccttcccaacgacagagaaaccttgctttcacagttaacttgaatatgatatgaattggatgatcatggacccaccagtgagatctaaggttttatgtatttgaagtgcccttgttataaggcaatgtcggtgttgaacattcccactcagaagagctagacgaaaacttccgtatatttaggttaccatcacaagtaagagatggtttctgccattgagattttataataaaatgagaagagggtacttaaaaacaagacaaatgtgccagtgtacaaataacgctgccatagatacaatgagaggaggtcagtgtgccattgaaatatagcgaaaaagtagaataagtccaagctaggtagtattttcttcatcttaggtaatttttccaggccatctgttttagagtttgggtttgatgccgttttgttgtagctgtcagcatagtgcccacatccttactctcttcaactgtaaaaaaaaattcggtgacttaaaaacctgttggcatgttctatttattttactttccttaaagtgaattacgtatttactataaaaacattagaaaataccaaaaaaaggtataattgtgaaaattaaaacgccctacaagcaatccatccggaataattgctttttaaaattcttacgcagatttatcatgtgtatatgcatgtgaaatatttacatattaatattctttttttttttttttaacttgagacagcattttgctctgtcacccaggctggagtgcaatggtgcaatctcggctcactgcagtctccgcctccagggttcaagagattctcgtgcctcagcctcccgagtagctgggattacaggcacccctgccccccgcccccaccacacccagctgatttttgtagtttttagtagagatagggtttcaccatactggccagactagtctcaaactcgtgacctcaagtgatccacctgcctcagcctctcaaagtgctgggattacaggtgtgagccaccgcccccagccacatcttaatattcttggagaaaatttttagctgtctcaaggtctgtatgttgaacgtgcatctcaaatctcagattttaattctggaagatgagaagaattttgcactagagatgtttgaccccagtggtagaatcaccttttggattatttactcccacacggggcaagccctggccagctgacccacagggctgggcattgttcatgtggaagtttcctgttcttcagctagggggtgaggcatcctgtcctgctgtctgctaggagcaccactggaaccgctggtgtaattgagggcattagacatcctaaaccataaaaatattattataacctccttagttctcaaggtgatgaagttgtttccagattcctttgtgtctttttctttcctgttttccctcaacaatctgtggttgtggaaatatttttctatgttctttatgcccaggactttgaacacagggtggctttctattaactggaatattttcttatgcagtacaggtggtttaaaaatgcaaggtacgtgctgtatcttgggtcatatagggttgacctttcttttttatgtgtgttctgtttgtttactcatgtacttttttttttgagaaggagtctcgcactatttcccaggctggagtgcagtggcacgatcttggctcactgcagcctctgcctcctgggttcaagtgattctcctgccccagcctcccaagtagagctgggattacaggtgtgtaccatgcctggctaatttttgtatttttgtagagatgggtttttgccatgttggccaggctggtctcgaactcctgacctcaagtgatccaactacctcggccccccagagtgctgggatcaggcatgagccaccatgcccagcatttactcatgtattaatatcatcattgatgttcataatgatcttgcacaggcattgcaagcagttaagtttctcattaatttcaagggtgtttacatttactcaggaagcacacttgtaatagttgctttaaaagtctttgtgtgataattccaacatctgggcaaccttgggattggcatctattgattgtacttacccctgagagctaattaaattttcctggttctttggaatgcattgtgggcattttgaatattatgttgtgatactccaggtattgttacatcatctggagaatattgatttttccttgttgttattttgcaggcagtcaacctgacttggttcagattgtaagtgctgtctcacctccgtgggtggaggctctaatgtcagttcagttttcaaagcctttggtatactgctttgagtttgtcccgtttttgtgccactcaggggttagtctgagggttgggctgtggtttatgtcatgattcagttctcaaagcttttgctatcttgctttgggtcagtcctaggcatgtgcatctgaggagtgagcctgtcacttgtgcagatttatacacaccattatgggatgttcttttccagttctcttttctctaagatctccacactctctctggcttacagggaccattcttgattcctctgggtggaacaacaaggtctgatccagagtttttgttgcctgtgccatagcttcactggagccgtactcacccttggtataaggctgggtgagaaattaggacaacaaaaacaaaataggaaactcacccttaaatgggtggcatcctcaggttttgatctttttttattttatttttttatttgtttgcttttgtttactttttggtccagagtttttagttgtcattagctggggcaagataggccttagttggtttactccaacttgctggcaccagatattaacaacttatttttttttcactagtttattaagacagaagctttatcctataatcaacatcacctctttatttaacctcattttggaccactgttctgtttgctttgtactttctgatcacattttgccagatgatgctaaatgcttgcttttttgttgttgttgttgcctaattcattgaaattatgttagaatattctagatgcttttcagctaaaaataaaaggggattcaactatatttcttttggaagaacccttactttaaactacagtttcattagaatattcagttagttagttaaggctcgttttgtttgttcaactttttatttcaaaataattatgattcacaggaaattgtatgcaggaaatgtaaccatcacctagttttttctaatggttgcatcttacatgattatagtaaaatactaaagccaggaatttgacattgtttcaatatatgtgtatagttctatatcttttttttttttttttacaaaaggcttagtagcctaataaatctataaaagcagcccctgagaaatgaccacctacctgatatatatatatgaaccaccctaactaataagtatttgtgtatattgataaagtttcttaaaataccttttaattcctttactatgtatagacagtccccaacttagggtggtttgacttgtgtttttttaactttacggtggtacacatacaatcattttgtttttcactttcagcacagtattcagtaagttacatgaaatattcaacacttattataaataaatattcaacaaacattcaatacttaaaatacgctttgtgtcagatgattttgctcagctgtaggctaatgtaagtgttctgagccatttagggtaagctgtgctgagctatgatgtttggtaggttaggtgtattaaatgaatttttgacttaggatattttcaccttacaatgggtttatgaggacatgaccccatcataaatggaggagcatctgcatttaatttggtgggatttaaaggcccttaaggtgattacttattgaaaagtttaacttatcactttaagagagggatcatggtgttggtaagaaaagaaaaatcacactcatcctattgtctttgatccctggccctgagcactcccccaggaactcctgatgctttgaccccataccactttcagatgacactcttgcccatcatgccactaagactcctttgctctcactttctctggatcgtcctaggcctgagcagttctacacttgccctctcaactcttaacctcattcctgaacctctgcactgcagctccaaaaggaagaggaagataggaactggaggcaagaattcagtggaattagacaggtgcaagcccttaattctttccccaggaagaattgggggtggggaggggaacacactggagcacaagctgaacaccctcacccctaagttcatggatcaggatgaccttcaacccagtggtccagagtaagggactgacacagacctgcaggtggaagggacccagagagcagagagctgattgggaagtttcttccaggcatcctgagagaagaggctagcgtatttaagactgatgtgtgctgtgtctcattagcattgtggtcatgttctcacctatgttgcattgtagttgtatgagttttcacatcttagattaaagtgtctttgtcattcattcattccagtatttttttttttcttttgggtttttggtgttttttttaatggaccacctacaacctttcaggctgggttctaggcaatgaggatacagcaggaaacaagacacttccagccctcctgaagcttaggctctagtgggaaaggatagagaataagaaagaccagtaagtgaaatatatgttggttacaattatgatcaatgtgaaggcaaagcaaaagaagaggggtaagaaatgttgagtgctgcagcactggttgtcattttagatggaggaggggtcaggaaaggcctccttgaccaggggacatttgattgaaggtctgaaggaacttggtggagtaggcggaaaggcagagcgttctaggcagagggacaggcacaggccctgaggcaggctaaggaagccagaacttagaacagggatgtccaatcttttggcttccctgggccacattggaagaagaagaattgtcttgggccacacataagatacactaacactaacgataacggatgagccaaaaaaaccaaaattgcaaaaaaatctcatagtgttttaagaaagtgtatgaatttgtgttgggctgcattcaaagccatccatgtggcctgtgggctatgggttggacaagcttgacttagaagattggaaagaaagaaaagcacgagaagccagacttgaggtttgaatatggagagttgttcttaggctaaaagcttgtcctccctccctcctacctagtccctaaacatgagagctatgtgggaccactaacattctatataagtaaatcatagtctgaaattaagagtttaatgaatttaaaactggtagtgtttccaagcttgagatctagtaccagttttctggcatccaccttttcaatgtcaatcccaatttttgcatttcagcctgtcctccttgtcccaaatattctctctcctacctagtgactgtgtgatgatgttagtgaggtgctggtccttcactttttgcttttgttactaaaatgcaccgatatttactgatgctttatcgtgcgtggaatatttctagtcttgtggaagccgtaaaaaaagtaaaagttaatttctgctctgaatttgctttctttgggctacaggaacaacaaaacccacacaaatataaaatgcaaatcaggttttgtttgttgaagataaaaataaaaagggttaagtaagattgaataggaagaaattaagatgatggaagtagctggcattttacatttgtacatggaaagggtaaaacttaaaattcatcggccgggcgtggtggctcacgcctgtaatcccagcactttgggaggcctaggtgggcagatcacaaggtcaggagattgagaccatcctggctaacatagtgaaaccctgtctctaataaaaatacaaaaaattagccaggcgtggtggcgggcgcctgtagtcccagctactcgggaggctgaggcaggagaatggcgtgaacctgggaggtggagcttgcagtgagccaagatcgtgccactgcactccagccggggcgacagagcaagactccgtctcaaaaaaaaaaaaaaaaacaaacaaacttaaagttcaccaactttctgggggttgccagtggggcaggggttgtccctgaagtggagattgtgtctcctgtatgcaatgagcaatttcaacttttcacgctgatgttatttcagagtcctccgctgatcccacatgggctttcatcgttcttattaacctctcaggaacagctttcaaattgaagggtgtttcagcaatccctagaaacttatttttcttaacttcagttgcttcaaacttcctgctcactctccttaggccatcccctgagagtttctcttagtaggatttaggagatttggcattcctctctacattctagttctgaagataaaagtggcttctttcctaccttggccagctgaaaagaatcttgctactaaaaatgctattaatataacagacccatcagcgtgatgcatgtagtgcggtaattcttgaaggttggggccatttccttcaggaaacctctcctgaggcttttaacttgatgagttttctgttggcagaaacaagccttaccagaaagctgttgttgaaaatatatgtgtcaatttatgtttgcaaacttttgatatatgtgctagaggagggtaaatcttagcatatttgaggcgacagttttgccttttactcaatttatttcctcatagttctttcctcttttaaatttaaacctatgtgagtcttaaaatggggctgtgactaacattggttctaagtctttatttattggcaaaacatatagttacataggcacatccaggtatcttaatatgtactttaaaaaaataaagaactccaaggcattggtcaaagcctttagtgttattgaaatgcatatttatttattttacttgtaagaaatgtagcatgtaccattcttaggaatttagataatataaatggttgtgcacagaccgttgatcttttcgtttttatcttttttcttgcttcttaaagataccagagaagcgtgaacatattgctttgaaatctacttgctcctagtaaaaaagagattgtctttattggaaaattccctctgagattcctgtgatgtgtgacctggtggggaatattccagcctgggaacagcttaacatctggtgtctgtatgagttacccctgaactcactggaacattcaatggagggtttccctttgtgttgccacaaattttatttcagtgaagatgtgctggtgagagtttcagcaacgttttagcctgaacagtggaattatagagtaagtctgggatcaatgtgaaggtatattgtgttccaggctctttcgatctctttgcaatgatcacggtaatatcacttcctgcttcaccacgatgcttttactttcttgtctatcacgtgccttccctggctagaaattagcttcatgagagtaggggatgtgtcccttttgttcactgctgtatctctggcttctagaacatggtaggtgctcaatgtgtattttctgaatgaatggctctataggtggttaaaagaaccacctcagagatatgcccagttactctgtttttcttctttcctttccagctattttcatgtgcgttatcttaagtgcatacaatttgaagtgcgctagagagacttcatggaacaagaataggctaagtagagtcacagttgtcgagctttgaagatttttctctttcccactgtgggtaacagaattgtgtcatcgggtcagtgagagagactgtaaaaatattaaggagggacttgaattaacctggggggccccagaaggcggaatcacacttagtggtttcacaatgtgaatttctgtttgcagggcatgctgtaccagattaatgttcacaggttggatttgctcccagaaataaacccattaatctactgctaagcagagagcggagtttctatttttttctattttgttttgcccatccccaccacccctccatagccctccccaaatgccccaaaatccaggttctcagaaggctgtgacattaaaggtcaaagctttttttttttaatttttgactttgatttactaggaaaagttgatcagacttacaccttgaggttttccatttttgattgattttgaagtatcattagagctcaaatagagccaaaaaaaaaaaaaaaatgaaaaaacgaaacgtacccattgtcagggagggaaggaggttaccaaatgcacctctaagttttgttttttgaaatatgtgtatcatttcaaacagaaattactcccttggtgaacattttggtttgtactttcagagttttcaatgtatagataggagcagaacttcaaatgtttagtaaggaagacaaggtcagcagagtttctggctgtccaaaagcagcgctctcagctatggcctgtggccatcttctctctgggcagagacaagtctaactctctgatgctcatatttatgagctcatttcacatctcagggggcagtctcagtagatgatgttactgttcacctgctcccaggtaagagtccgagaacctaccaggtgcatataggaagttgtgctgttacttacctaacaacccctgtgagccaaggtgttctgccctccctgcaggctgagcgctttctctaagatgcctatacctgtactaatagtgactcaattctcccctttccccccgctttgctgcagaccataaaaccatgggaaacgcagaaagtcaacatgtagagcacgagttttatggagaaaagcatgccagcctggggcgcaagcacacttcccgctccctgcgcctctcgcacaagacgcggaggaccaggcacgcttcctcggggaaggtgatccacaggaactccgaagtgagcacccgatccagcagcacccccagcatcccccagtccctggctgaaaatggcctggagcccttctcccaagatggtaccctagaagacttcgggagccccatctgggtggaccgagtggacatgggcttgagacctgtgtcttacactgactcttctgtcactcccagcgtagacagcagcatcgtcctcacagcagcctctgtgcagagcatgccagacactgaggagagcaggctttacggggatgacgctacatatttggctgagggaggcaggaggcagcattcctatacatccaatgggcccactttcatggagacggcgagctttaagaagaaacgctccaaatctgcagacatctggcgggaggacagcctggaattctcactctctgatctgagccaagaacatttaacaagcaacgaagaaatcttgggttccgccgaagagaaggactgcgaggaggctcgggggatggaaacgcgggcgagtccgcggcagctcagcacctgtcagagagccaattccttgggtgacttgtatgctcagaaaaactctggagtgacagcaaacggggggccggggagcaaatttgcaggctactgtcggaatttggtgtctgatattcccaatcttgcaaaccataagatgccaccagctgctgctgaagagactcctccgtacagtaattataacacacttccctgtaggaaatctcactgtctctctgaaggtgccaccaacccacaaattagccatagcaacagcatgcaaggcagaagagctaaaacaactcaggtaaagtgattgaaatttgtttcaatattttgggaatggtgcatgactctttaagtgcatgactttgctcttagaagatttccatcttttaatcgggttttaccctgtttgcctggtagttgctgcagctggtgctgttttgggaggatttctctctcttctgctttgcccctcttagagttctgtggttaaggggtggggattaagggaagtgtgtggggggagtggcgatgtgataggagtgggaaaaaagctagtaagttcatattgggaaactgcttctacatcttagttcttcaacagcatcccacttattcaagcttcctttctaacttggtccttcccgtggaaaaacaggcatggtgggttgcagactcttggaacttatttcttcactgcagcaggtgggaggaggttagtcggcaactcctctgaggaggcattttaaattctgggcgggtttgggtcacttgtcagcttctctcggtggttggcaggctcgctgccttaccgggagccatttcaatttcctgttccgtgcgatgctggccagccctgtctctggagggaggtgtagcggaaggaataacatgggtggcttccaattcttactttgcaaccagctagttgtttgaccttgggcaaaccctgacttctagtcattcctctgaaaaatggggataaagatgctcagcttgcctgcttcggggtctagtgcacgaaaccgtggggaggaaactaagagacttcgctccagcctgggcaacaaaagcgagactccatctcaaaaaaaaaaaaaaaaaaaaaagattttgaaagtgttttcctagtgaatggaggcaccattaccttagctggcaatgataattaagattaggataataaaatgttgggcagttgagccggcttggtggctgacgcagggggatgctttgagcctaggagtttaagtcccacctgggcaacatagtgagactctgtgtcaataaaagaaagaaagaaagaaatgtggagtaatcctgcatgcattgggccttttctggtacttctgttctctgaggcagagttcagggagtcttggcttttgctgaggatgtggaggtggtttgtagatggtgcttcaggttaaaattccagactgggtccgtttgccttgaatggcggagcagcctcaaggttgaccagcagacttccctgcagtcagcactctgattgcccagtaggaggtggtactgcaccttccagccttgctccagtgcaagtcaaatgggcatttcaagggtatgttctgctggaaagggggtctaaatataatgggcataggatggaggatgtaggggaagccgagaaaaagaaaatcggcattagactgtctgtgttcctgcctgaggacaggttttgctgatggtgtccaagccggatattttggctccacgtcttcttacctgagtgactttgggtaagttgttcacattcttgtagccttaatttcttcatctgtcaaatgggggtaataaggttttttgagaaagtagaatgaaataatatgtgaagcatagtgcctggttcttaggaagcagccagtaagggcaactttgttagctgttgtaattttcatcattgttagtggaggcatatgggttgaggactcggggtagttgtttggatcaatatcttgagtacctcataaaggtggaaacagtagacactggggactccaaaagctgggagggaggggagcaagagttgaaaaacgaattattgggtactgtgttcattgtttgggtgatgggttcaatagaagcccaaatctcagtattgcataatatatccatgtaacaaacatgcacgtgtaccccttgactctaaggaaagaaaaaaaaacacttgtgtcctagaaaccaagttgctaccaaggctgcatctgtggtctgagaacgtaagcctgaagcttgcctccagatgcactccctgaattttaaacccatctcttctgaattgagattgtaatgacacaaatgaccagataacccacctgcagcccctctgtctaccctgcgagggctacttctgcactgtcaattggacagatcatggagatatgtgacctattaaagagtcacctgaaagggattgaagggctgtcttgaaggcattatcagattggcactgcaaggctgattcaaagagatgatctatggggccttcggagcttagagaaggatacagtgacgcagactgttaaaaacagaacatcaccttggactttcatttctacctgaacagtgctcagttagtgcatatgctatgtaagatttgagaagggtgccctgttgtattttggctctctgtggttctgacactagggatggctctcccctatactcgatggctgatggggatttgagcctttgagttacggctacccccagaaaatgggcaaagcaaaggacagttctcccctctaggtctggtaccactgaaagctctcatgtgtcattattatacgaaatttctattctttggcttgtcaccttctaaaattgtgaatatatggaagtgagatcatctaaaggtggtgtctcataaaatcactgcttaggcagcttaatgtaatgggaagtgccattggccaggaatcctaagaagtgcatttgcatcctggcatgtgtgcttacccagtggtgaccttgggccagtcactccatcttctgtgccccaggatctgttgctgtccagtctgagtgacaccagcctcccacagggccattgggagaaccaaataggataccatgcatggaaacctcttgtggagcgtataaaatgcacggaagtattatttttgtattgactttatatgttgagtgaggatctttaatgacttgaaacaaaccccggaattatgcacaacactatccacccgcccacatttcctagtctaagtttggcgtgttcatccaacgctatttcttgagagcccactatgttccaaacagtgtattttaagaggcagtgggtgtggaagcttccttgaaaagaatgcttttttaaaaaaaaatttttttctttttttttggtaaaagtttttgacccaggggacctctccagtgagcttgaatcatagatattaaagtctccttggctgccctgatgatgtagttgaatctgtgatcatcctgtcagcaattttactccccagaaaagagttcctggcagacatttgacccaagagcatgacctctaagcctggaagaaaacacattttatctgaaataatgtgaacaacttcatttgatttgaaaatgatcaaaaatgggtttttggccctttttcctgtttttggattttttcagtagttggatggattattgtaatgtgaagtcacaggagttcacatttaagtcttgaatggtggcacatatgtgctacagggtctgctggcaatttttggtttaattcgtgtattttatgagcatgtttgttgtgcatccacatgtgcgctgtgcagaaaagtttgtcttgggagtcagtatgagtaaagcctcatgctatttgaagcagaatttatttctgttggtttctgtaaaagtacttaataggttactccttagatttagttgatggctagttcgtctttgggcctgaactttatgaatttctttggttacagacagaggagggggctgcctagtgtcagacaaggaagttagcagcatatctgagcttgcaactttgaggttgttacctcttggttatttgacttccatggatctcagtgcctcttaaatgaggctggagattctgcaagggaatgaatggaaaactcatggcacagttttacacatacaaatgcttaataaataggagttgttagttgtgatgttgaagattgcctcattgttctagggttctgctctcccgtgtctctgaaactttcagtgggtgagttggagagagagagaaacctgccgtttgatggagccttatagccaggttctgtgttctgtgggaagctttggcgtggagccgttgtgcatgcttgtgaggagagcttcattcatccacttgggagatgaaggaacacggccaggttgtactgagcatgtctctgggaacctcagcctcaggagaccagcaaggagcccggctctcggagcgtccctagccaggtgtggtgctggtgaatagatttgtgggtttcactggccagtttcagacacagcagcatccctagaaaataaagagattaggagatgaggtgtcacaactggatgaaaacccaggtattcttttttttgagacggagtctcactctgttgcccaggatggagtgcagtggcacggtctcagctcactgcaacctctgcctcccaggttcaagcgattctcatgcctcagcctcctgagtagctggaattacaggcatgcaccacggcgcctggctaattttttgtatttttagtagaaacagggtttcaccatgttggccaggctggtcttgaattcctgatctccggtgatcttcccgcctcagcctcccaaaatgctaggattacaggcgtgagccaccgcacccggccaaaaatccaagtcttctttctgacttgctaatcaaggagggccttttcttccaaagcacacacccacactgactacctccccgtgcttgaaaaggtttcagctcaatatcctcagattttaagatcaaaaccctcaattttggtacagatacaaaaaaaaaaaaaaaggacttggctgaaaagaaaattattactgcccacttttgtcacctaaaacactgattacggagagagatggccaggataactgtagcagagccatccctcacggctgctttctttgataagcaagtagtcgcgttgatgatttcattaataacaaggtaaagagtgcagcattgtcagaggaggagcttgagttcctagaaaaattgtcttgatgtttaaagttttgttttattttgcaactgagcttcaatgactcagagataagtttgtttcctgggctgaaaatgcacatcaacaaccatatgattcttgacctttggtcacagactcttgagaatcagatgaaaaatgtggacgttttccttagataaagacagggaccacccttctgcatatcatttcaagggatccataggtcccctaaagtccatctagaggcttctttctggttaagaacctcaggtttttataaaacaaattttttcatgtaaaatcgatttttaaaacacccttttttttttctgttctcctctatcttctgtttgatgcttttttttttttcttttctctttatctttctttttctggcacgtaagttaagcaatgagatatttattttgcaaacaaacccatgcattttcaacaagaatatatatcttctttgccaagatctgtttttgggaagttggaaggtgggtaggtagttgagagatagcttatgttagccattcttagacctttttatactcttaaaaagtaattcaggaggccgaggtgggcaggtcatttcaggtcaggagttcgagaccagccttgcctacatggtgaaacccccgtctctactaaaaatacaaaaattagccaggcgtggtggcgggtgcctgtaatcccaactactcgagaggctgaggcaccagaatcatttgaacccaggaggtggaggttgcagtgagccgagattgcaccactgcattccagcctgggcgacagagtgagactccgtctcaaaaaaaaaaaagtatatatgtgtatatatatattttattaatatatatttatataaaaatatttatttatttatttatattaaaaatatattttttgaccagcctaggaaacatagtgagacctcgcctctaaaaaaaaaaaaaaaggaaaaattagctggccatggtgagtacctgttgtcccagctacttgcaagactgagatgggaagatggcttcaacctaggaatttgaggctttcatgagctagatcacaccactgcactccagcctgggtgacagaatgagaaccctatctctaaagtaatacaatattttattctctaaaataaaagatgtgggacagaggcattgttttccatttttgcagatctctatgatttctagcttaacagaagacactagcgtctcatacctacttttgcattcactctcttgcaatatactgtttggttggaccctatgagcagaacctggacttgcacagggtagttggaaaaggaggagcctcactgactccctggaagtattttagggaaccctagtccatactttgagagctggtcatttatgctaatacaggttgggaacattcaggattattattattattattattattattattattttatttttttagacaggtcttgctgtgtttcccaggctggagtgcagtggctatttacagatattatcatagtgcactgcggccttgaactcctgggctcaagtgatcctcctgcctcagcctcttgggtagctgggactacaggcatggaccactatgcccaccagttcagcttttgaggatcacattcttaggtcgggtgcattggctcatgcctataatcccagcattttgggaggccgaggtgggaggatcgcttgagctcaggagttcaagaccagcccggccaacatagtgagaccttgtctctaccaaatttcaaaaaaattagccaggtgtggtggtgtgtgcctgtagtctcagtttcgtagtgggctgaggtgagaggatgcttcagcctgggaggttgaggctgcagcaagctatgatcatgtcactgtattccaccagcctgcatgacagaatgagaccctgtctcaaaaaagaaaaaaggaaaaaaaaaaagaagatcacattcctagtataagaatagaggaaagttgagccccttgactcaaattgtgtcataacaatgtgtaatcattgtttttttacagcataactgtaaatgtgtgactgttggatgtggccataaagccagcctgccctaaaggcctgacagggtctccatggatcccaatggagaacttaggaaacacctgaccagcctgtcacattgtcatttgggcccagttggctttggaccaccagttgaccgagtatctagcttgggccataagatagttcaatatatctttctggttttttttttttttttgagacggagtctcactctgtcgccaggctggagtgcagtggtgcaatctcagctcactgcaacctccgcctcccgggttcaagtgattctcctgcctcagcctccggagtagctgggactacaggtgcattaatatttgtatttttagtagagacggggtttcactgtgttggccaggatggtctagatctcttgacttcgtgatccacccgccttggcctcccaaagtgctgggattacaggcatgagccactgcgtccagcctaatatatctttcttacttcctcaattttttaaaagagttaaagaacaaaaatttaagtgaactccgattgcatccacacaagacataatccaactaggctgcttaaagcctataaatgtaagctttatagctaggactcatttgtcacctcaactttagttgagcatgagctgagtttagaaatgacaaaacctttaactccagctgcagtgcattccatgagaaactgttttccttgttttgagattgtggtggaaaatgagcagcagtgagttcattcagcaattatttttgaagtgccttccccatgccaggctttattcttggcacttgggatgcgtcaacaaggaaagatccacaagctcgtggagctcgttggggtgaagtgggtgtgtgtgtggcagaaaacagttagcataataaggaagcgatgtgctgtggaagaaagacagggcatgttgaggaagatggggtgtgggggatgtggggggcaatttctgacagggtggtcagggtgagggcagacctggatagggacttggaaggagaggaggggaggagggagctggctcctgagttgcaatgtgggagggtgcccagcacattcgagcaaggaggaggagctcagggtggctggggtggggtggaggtgggagaggagatgctgtggagaggttggcatggtagttggaggaagcacagagaagccttctggttgtagtaaaaggggggacgtgagtattcttgggagtgagaaaggttgggagtatgccctggaatgagttcttcaatttcactagtgggtggggacatcgaagctcaagttttaacgcgggacaccgggggagggtcttgaacagcagtctgaggagtcctccacattgctcctggaacatttacctggcagtggtgtgccggatggattgatggaaggaagatgggttagaagagagagcttattgctcaaccagtgatgtggcactcggaggggaagagaaaaaactgagtctctgatatattatggatagtgaggagggaggggagggatgactgtaaggtataagcacatacatagaaaagcagatgaaaggagaggcaatgattcatttaacttagacataaagcttctccaatcaggagttacctgaaggaacatttcaagcttttgccaacttactttggaatccctttttagtaacagtaggaattttggttccaatgcttgtagctgaaattgtgagtcactcccattggaaatcgttagaagaaaaggaatgggttgttggaaacataaaaagaaaggcatagagattttgccctaagaaaggaaggggagggaaaatagagttgatttcctattctggcaaatcagggatggcaattattagtatttcataatagtgaccagtagttactaatttataatgtagagaacgtcaccattttcctagtttagtgtgctgttttgtgaacgtgagaacaattaacaagcctaattagtattaggctggcaccagccttggtatgcctgtgtttttcccaggtttctcagagacctttcttccatgttggtgcaggaagttagcaactgagttcaggcaatgccttctctccttgggccaagatgtaagtagggctgaaggtagagatgaccgtaattatagttaacatttttgagcaggtactatgtgctgggctcagtttaagacacttttcctgggttaactcaatctcacagtgtcttatacagtgtcttacaaagtagatgtgttgctctccccattatacatatcaagaaattgaggcatggattggttcagagtcatttacctagaattgatacttgctgtactgagattatcaaaggagagtatactgagaataccaaggagataatactgagaaccaaagatgatattcgtgtgtgtgtgtgtgtgtgtgtgtgtgtgtgtgtgtgtgtagtgaggggtacttaatattttggggttaggaagaagatgataaatcagaggaaggacatgttagaatttaacaagccagaaacagttctaattcagggtttctgtaggtccacatttctttaccccctggaattcagtgaattctgcattgtagttagcatcttaacacaggtgtattcaagctggatctatcagggaaattcaagtgacaaaggaaacagtatctaattgcattcgacttataacttaactacaagtggccaattgattctactggtcctggaattgtcccagagcctttgcactttctggctaattgcattttcaaaattgtgttcgcacatcattagcacagaaaacctctccctttggtagtatttgaagtctcctgtcaaaacaactggagccttaccacaatgtgtcattagtctacattcatgctgcgtgaccctccagttttcaaggcagtgaaaacaggctttgaatttgcctcttgcctccctcattttagcctgggagctcatttaagcatttgttgcccagctcaaatgctaagaaaactcttgcccacagctgttgtatgtattaggctacagctggccacttgtgcatacattcattttttggggaagctgccagtggaatggcaactggtgagtgccctgaaaatctggcttcagagaatttgtcctgggagaacaggattgaagagcctctcggccctgtgaatgttgttcatgatcggaaatctcttcaacggagtggttctaacatggagagtttattttgagctgttttctggaagtctcagctagatcatgaaccatgtttagaattatttctctgtctagccaggatcttaccatctcccttgatgtcctctgccttttttgattaaaatttagtatttgactctaagaggtaacctaccttgcagttgctacaaaaactgctgaggctcccctgggactattccgtggtgtcagtcttctgtattcctcactgctgggaagactggggaggtttacaggtgcttctgggatagggggaggatcaggattctcaggtgggtagtagcaggagcccctctgaaagatgaccactaagtaagtttgcaacacaatgaaggaaagaaagagcggtgttgagtagcacctctggctgggtcatcaccctttccagcaatgctggagaatggacttctgggaatttgggacatcccaagtttcatgactgaataagggctggggctgggcaacctgcatccgtttctcaatgggctgggtcacatatcagtgggggcatgtgtaccactgagcctgaataaccacttaaggagacaaggtggagttgtcttggatcacagatgacaagagcattccccgttgatgacacggagctgtttgcttccaaagcatgcaagctcacctggggcccgcaggtcttttacctggagtaatcacttccttgcttggtttagtggttgtcccagagttgaacacacacagtctggtcatggcaaagctacagcatcagttggcatgagcagatgttcaggtcttatacagaggtgagtgtccattgaggccttactcttagtttaaatagagacagatgtgagggccttctgtaaagggatggatggtgttggcaatgtagtgaactcttatgagacacgcccttgagagttggtctttcgggtttctgcctcgcttttccttattctctcttcccatcctccttcccctttcttgcacttgcaggttttagctttttgccaggcaggtcacagtcactcagcttttgctgaaaaaatctggaagagccattgttggtaagaaaagggggaaggcatgggattgatttgtttgtttgttttgttttgagacagggtctctctctctctgttgcccaggctggagtgcagtggtgcagtcttggctcactgcaacctccacttcctggactcaagtgatcctcccacctgcctcaacctcccgagtagctgggactacaggtgtgcaccaccatgtgtggctgatttttttgtagttttaatagagatggggtttcaccttgttgcccaggctggtctcaaactcttgacctcaggtgatccacccgcttcagcctcccaaagtgcagggattataggcatgagccaccatgccctgctgagactgaatatttagacagaatctggtcaggtgctacctgcagctgagtcatgaggtcaccatataatagtggaaagtgtacttggaaggataggtttcaacttcccatctgccaccaaccagacttgtgattttctaagccgcaggctgtcaatcaatgagatagctttgccaagtcccttcctcttctggagctctgggaattacaagatgcctgggatcattttttctcctttgtaccaaagtctctcttatggaatagggatgttacctgtgtagctaaatttccctgtcttgcagagaagcatttcacctctttgcattttagagagagcttaatagctgatgttttcacgcataccaaaccttcttcccagaaggactgagacatgaaaatgaatccaaaagtttggaaaattcacagactcatcttgtgtaactcattggttatcctgaataatcaacaattgtcaaattttcttttgtcttgtatcaagagggaagcatatggtcaatgtccctgccaaggagaaatgtgggttgataacagtgttttcctgtttgtgtagaggatttttaccaattggctctaggtctttcatgaccacccgtggatgttaataagcaggatagcagatagcaaagctgtgggaaccagcagttataggggtctgcatctgagctgcattcgtggtttctttctttcccttaagtccctctaactcccaggggtctaagctccatttataatggagttgatccctagaagctcacccagcaatctcctgctgccattctactcccaccaccctcttttttccatgtcttgctatacatctcttttagttgcttatttagtatttcttcatgatgaaggtgaactttgagcaattcttagaactaagtgaagttcgtggagatatgggcacagtgtctgtctggggccttgtgtaggccagtattagtttgtggcatggctcatactgcccccattgcctctcagcaaagataggagcccagagcattcatttgtatggtaattcagaatatctggttagtttttacgtgtttgaaccagaatgagccatttgtgagactaaaggcccccaaattggtgaaactgccaaactgtgtattactttggcatcttctatattagactcagccttccgttctcttccttggagaacaattaggctcctttcttatgcataagactttgagctgtctgtccaatactgcagtgagtatccttccttgatgactaccattatttaattattgtttatggaaatgcctgtagctctttagagcaattaagatactgatttcagaacagacctgtctgtcccggaaatgttcagcttcagagcagaagcagctttggaagttcccaatgtttttaaactgggaactgataccctcagtatcttggcagttgccccgagctgtcatttggccctggggcagcaagtagcctgcccaaggctcctagcatcccagctttgaaagggcaaggtaattggagagctcaatggagctgtaggccccacagacttatttagcacaatgcagagtgagaggctgcttgttttcaagaagcgaatctgattagaggatgaggattcttgcctgctcctggaacacggagccgtgctgggtgagtgggtgaggcggtgcactagctatcttttcagtcactccattataaaagagactcctaagcatgccttttatttatttatttttaaagatatcagctataaagacctagttattcattgtcaccccctacgtctggaacaattaactcatctgcctgcagaatttcctggagttcaggataagctgatgaggctgaggatgctgggttctcagcatggcagcggtagaatctcaatcgcgaatttgccaattcgttaattatcttagagaaataataagctctttgaagtgctccttatttcttttatatttcttgaacattccaaatcgtgtgctctcacggagggcggctgaaggtttcctgagcagctctgctgggtctgtgcgggtccagggttgagcaggacctggtccaggagccgtcaggagtggctgtgccttatgcgtatcccgctgctacagagccctggctggacccagggctcttctccacgtgaccctgggttccttctccacgtgacgcttgtcttctttgctctctctttctgctcccaaggatgttaatgcaggcgagggcagtgagtttgcagacagtgggattgaaggggccactaccgacacggacctcctgtccaggcgatctaatgccaccaactccagctactcacccaccacaggccgggcctttgtgggcagcgacagcggcagcagctccaccggggatgcggctcgtcagggggtgtacgagaacttccggcgggagctggagatgagcaccaccaacagcgagagcctggaggaggccggctcggcgcacagcgatgagcagagcagcggcaccctgagctctccgggccagtcggacatcctgctgaccgccgcacagggcacggtgcgcaaggccggcgccctggccgtcaagaacttcctggtgcacaagaagaacaagaaggtggagtcagccacccggaggaagtggaagcactactgggtgtccctgaaaggtgagagcgggagggccccggctatgtgccaaatgcaccaatagaggtgccccgttgtgcacatactcacgggatgggtgggtttgttgttgttgttgttatacagaatttgaaaatcatactaatttaaaacatttatcatagtaagagcacttcgcatgaaatctaccctcttacattttaaaatgtgcaatatggcattatcgactacaagtgcaatgttgtaaggcagatttctagaatctagtcatctgggctgggcatagtagctcacacctgtaatcccagcactttgggaggcaggaggttcacttgagcccaggagttcaagaccagcctgggcaacatagcaagacaccagctcataataaacaaacaaacaaataaataagctagaacctattcatgtgacttaagtgaaactttatgccccctaattagtaactctcccatccccacccctgcaaatgatgtttgattttctcttttcacagttaacgctagaggagcatctcatgtctagttttggcatgtatgcaactggtttgatgacagtttcaaaggatgagttccaaaaaaaccaaatctttttggactcatccagctttttgtctttcaaagtgactattttggagggaaatttattagcttgaattctatgaaattgccatgtttaaaggaaaaaattggtagaataatgttaatttcataggattcaacctgatattaatggattgtatagaccatcatgtttatgaaaaagccagtcactatttaatagtcaaactttgtgtttttgactgtgtatatatagatacagacatgcatgtgtagatcactttattttctgtttatataaccatgcttgtatttgttggtatttgttgtcattttgcacattttcgtgaagtacatgtacgtattgttgcacgtactgcatacatcctggtagcctagaaaatgtaatatatttatgagctctatattttaaaaggaaaaacacttctcaaacacacagacttttcttcccaagctagacttgaaacagggttaatacatggcaggctaggttagataggtcaacaggattgatggaagggcacaagaggaagaagcctgggcttatcagtatcaaactagaccgttcgatactggatttcacagactgtggttggtttgggaacatgcaatcctagagacatggagcagcctagagctctgctcagtgaggtgaacacaaatgcctatgcggtgatgtgcaggtgcaggtcaacccttgcacaagtaggacttgcgttggccccattattcttggtgccagctgttgctcagatgcctgatgacacaggaagggagggtattggtcaggatataggttttgctgcatgtgccagagaccagcaatgccaatcccaatgccataagcaagacagaactttatttccctcccacctatcaaaaatagatgatttaaggcttgtgtgataactcttttctatgaagtcactcagaggccctggctccttctgaagttttgttgctcagctattcctacagcattatctttttcttttttttttttttttttttctgtttgagacagggtctcactctgtcttccaggctggaatgcagtggcacagttacagctcactgcagccacaaattcctgggctcaagtgatcctcctgcttcagcctcccaagtagctgggactacaggcatgtgccaccatgcctggctaatgtttttattttttgttgagacagggtcttactatgttgcccaggctcatctccaacttttggcctcaagcgatcctcctgctttggccttgggtttacagttgcattggtgcccggcctcctagaacattatcttttgatgattttttgctgtagtggtcttgcctatgagacatagatgtgcatcgtgtggaagcattttggagaactgcagtgttctttctcatgtgtgacgtgccttggcttaacttggaggtgttacagggttatgtctgaggggcctggatcacaccagctgctctgctctgggggagtgagaggagatgaggggaaaggcttcttcctcttccacttcccgcttctcccctagatgggcacacctctggacgctgcagcctcttatccttagcagcccatcttagcattcattttattaattagtgccaagttcttaatagcttgatccgaagatcacctgcatcacagcctcttgagggtctttctgggttgtaccccacacctgctgaatcacaagatttggaggtaggccctggatgagtttgctggggctgccatagcaaagcaccacagactggatggtggaaataacagaaatgtatcatctcacagtcctggaggctggaaatccaagatcaaggtgttggcagggttggtttcttctgagactgctctccttgacttggagatggctgtcttcttccgatgtcttcacatggtcttccctttacttgtctatgttcaaattccttcttataatggcaccatttatattggatcagggaccacccacgtgacctcatattatcgtaattacctctttaaaggccctatttccaaagatgatcatattctgagctaactggatttaggatgtttggaggacacaattcagccttcagcagaccctgactttgtgatttaaacaagcttcccaggggattctcactctcagtttgagagcagcaatgttagtggcataaaataaaaatgattagttggcttttttttacttgggacatatcagaggggtttattttgtttctgccattccctcagagagtaaatgacacaggaagtcagggtgcaggtgtccaggagcacagcccacaggccctttagggaagggagtctttactttcttggtgacgcagagctgagtgacacagcctgttggaattcaggcccagaacatggagccaccgagttctttgcttcatcctgatgggttcccaggatttgttgacatcctcagggctttgtccttgctgctcaaaagcaagacttgcagctgactttttcttagcaatgcttgaatattgggaaataaaaagcagaacatgttggaactgtgggatagagattttttttccctaaagattctttcccattaggcaaagtaattgatttttttaaaaaaagatttcatttggaattagtctctggagtgtttccatggacaacggaagaacgtacagattatgttccagggaagatgaaggtaaacagactttcaccagggagaacgtggttctcagatttgctgcttcgcgttcatcttaaagttggaacgagttgatcatgagtaaaagctgattttaatcacttttggtggtgctttgttgtggatgattctaaatcaaagttgaaaaattatacaaacagttacctgatgggaccatacaacattcactaggtgcgtgtgttaggattggtgagtgtcccctaattcattatccacaggcttctttctctcttcttaagctatgctaacgtgtgttgctccttttatgttaggaatctacttttcattagtgttgaattagtcgtaaaaactatttagagcagggtttctcaacagtgacactgttgacattttctggataattatttgttgtgagggctgtcttgggcattgtggatgcttaacagcttctttaggctctgtcctctagatgccaatagcaccttcccccaagttgtgacaaccagaaaggtcaccagacattgccaagtttgccccatcataagaacctctgacttagaggaaaacggtttccccctcccatttttgttatttctttgtctctctaatctgtgctagcctaaggcatggaaataggaggtacagattattctgctttttcatacaagtgttcctgaaaagccttgagatcctcaaaatctttgggatttgagaaaaatagagttggggcagactactctacaggtatgtatttaaattgtaccatgcaacttttaaaccccaaactaaaagaaattagcttggtgtggtgcctcactcctgtaatcccagcactataggaggctgaggcaggaggatcacttgaggccaggaatttgagaccaacctgggtaacatagtgagaccttgtctttacaaaaaaatacacaaattagccaggtatggttgtatatgcctgtagttccagctatttgggaggctgagataggaggttcacttgagcccaggagttcaaggctgcagtgagctatgattgtgccactgtactccagcctgagcaacagtgggaccccatatctacaaaaataatagtaataaaaaataaaaataaccctgcagaactccactaaaattttttaacaataagcaatataaaactttatctttcatttttatttttttgtgacagggtcttgctctgttgcccaggctggagtgcagtggcatgatcatggctcactgcagcttcaacctcctgggctcaaacaatcctcccagctcagccacctgagtcgctggaaccgcaggcatgtctggctgattttttttatttttagtagagacgaggcctcgctatattgcccacactggtgttgaactcctgggctcaggtaatccttctaccttgtcctcccaaagtgctgcgattacaggcataagccactgtgcctggcaaactttatctttcaaaaaagcattagcatagggctttacctttgaaaaaagaagcaactgtaacttgaatgggtagaaggaataattgagactcctaaattatggagacaaggaccacaagtatgaaatcatgatgctcagcagcaccgtgcaataaggacttgtaagcagagcccatggtcaaactgtaccaagagaaaaaaaatgtgaaataagtgggcagggcatatcaatatgctacattcatctgtttggagggacgtagagttcaacagctattctgtggtaatgtgaaatattataggctaggaaaagttgcccttgaaccagtgtgacctttccattgatctgcatcattctacactactaatcgcatataagcaaatttgcttgacagattcccattgtagccgaatagattgaactttcaagggttgtgcagttcacaggaagtgtggcacttgtttgtggtaaggaaaatggtgaaaatggacggacagcttatgttgaagttgaggaagagtcataaagttataccctggcttcccctgaaattgatttcagttagtttggagtaaatgttcagctcataattgctattaaagtgagcctcaagtttagatgataatggaaggagtctatggaagccatcttgccacaagtctataaaatattctgttgctactatcttgttagtttcacagtgcaattatgcatggaccaggactccggcttctcccaggcctttgtatgtgtgccatagatttcctctttcagtaggaacaagggcatggttggcttctagaaaaaaaaaaagtttatagatgggatgttagaccaaaaatgtatcattgtttttcttatccttaaagtacttaacgctggtattatatattgttttatccaagggcatggtctggaactaaatacattttctagatttttctggttgcatatcatacgagacatatttgaatgggcttcaatcggacggtagtgacttctgatcctcacatagtgccaggcaaagttctggcctggaggacctctgcctcgggacagaggagtcacaagaccctatgtctgtgaggagacctgtaatgaatcattctaaaacccaaaggaagggtttgagagaacttgagggcatgcaggaaggaaacccgggcaggctgagaagctacaatttaagatctttgtccttctttaggcccatccaagacttgagtccaagcctggctccattctctttacttcctgggttccacgtgctttaattttcagcctctgacagggtgcacatgttaggttcaactgtgggttcttttgtttcccaagcactgaatactcatgcacacccctgttctgtttcctcaggatgcacgctatttttctacgagagcgacggcaggtctgggatagaccacaacagcatccccaaacacgccgtctgggtggagaacagcattgtgcaggcggtgcctgagcaccccaagaaggactttgtcttctgcctcagcaattccctgggtgatgccttcctttttcaggtttgttgggcacttcctttgcagggcatttcaaacctctgaactggctaccttcttttcttgcctaggcacccagtctccctccactgctttttttttttttttttttttttttagtggtgagattaatctgttgctcattataaaaacaaaaacagtgaatgacaaaataaacatctatattaaattccaggagtaggtacattcagaagttttccaagtgaaggctaaggagggctatgagttggatgtgagaaacttgctctgtttgtcatgagttgaaggatatctttgtgtggtctcagtaccatttctgttgcatttaagaaagggatcgtgaatttcttcttttagacatgatttgagctgtcaaaaagttttatttataatatgttcctttctcatattaatcataaagtaaaataatgacatctcagaaatgactggcatcacctaaacagtttctcttcctcatctgatcagaactttctactcagcatccttgaatttcaacattttttaaaaaaaatacttctctgctaactgcttcaggattaacatttttctgatagggaatcttttgagtttggaatagttgtaatatactctgcaagaacttttttgtgttgttatgtaggaaggctttctttattgattccattgaagaattattttctcaaacctttattctgtgcttcctatgtgctctgcatagtgctattgagaatactaagaagattttgacagttcctctctttttttgagatgaagccttgctttgtcacccatgctggaagtgcagtggcacgatctcagctccctgcaatctctgcctcccaggttcaagcaattctcctgtctcagcctcttgagtagctgggactataggcacctgctgccacgcctggctaatttttgtattttcagtagatacggggtttcaccatattggtcaggctggtctcgaactcctgatctcaggtcatccacccacctcggcctaccaaagtgctgggattacaggtgtaagccactgcgcccagctgacagttcgtcttcttaaaagtgttcacatataacggaggggacagacatagcaaatctttataatgtggtaaagcctaccaatgactattaaaggaagagcaggtataaatggcgtgacaaggaccgtaagaatataacatgcaaggagggggctagaacaaaggtatagaggaaagaaatcatttatttcaccaagtttctggctttggcttcagaagctgtttctatttggacaattaaagtaagaaatataaagtgctaattttgattatataaagacaaagcatctgtgttttcttttttaaaaatctgtgatgtaaaacacagaaagaagagtgcacacaacataagtgtactgctcagtgagctatcataaagtaattatgcaaccaccaaccaggacaagaaatagaagtttcaggcacctaagccaccttccccaaccccaccccactcacaaatgcagcctactagttgaattgagtatgtcttttatcatccaagccaggacacttttatttatctgggaatgacttaatttccctttcatttttgaaggatagttttgctggatatagaattcttaattgaccatcttatttcagtgctttgaaaatcccactgctttctggccttcatggtgtttgatgaaaaatcagctgtttatcctatgaggctcccttgctgatttgaagatcgtgactttgtcgttaaacagtttgagtattatgtgtctaggtatcattctctttgagtttactttacctggaatttattgtctttcagatatgtatcttttaatatttttaaattttaaaaattgttgtgggtactagtagccacaaaatacaatgtgtatatatttatggggtagtgtcttttggatctgtagatttgtgtgcatgtgtttgtgtatttaaatcacatttggaaagtttttagctattatttcttcaaatagtcttcctgctcatttatcttgctccactcctttggtgactcctgttgtgtttacattagtatgcttgatgaagtcccataagcctctgagactctgttcatttttttttcattctattccttaatctcacttgatctgtcataagttcactgattcttttttcttccaactcaaatctgctgttgagctcttctggttatttttatttttttatatttatatatatataaaatatacatatatatgaaatatacatatatatatatatattttttttttttttttttgagatgaagttttgcttttgttgcccaggctggagtgcaatggcacaatctcagctcaccacaacctctgcctcccacgttcaagcaattctcctgcctcagcctcccaagcagctgggattacaggcatgtgccaccaagcccagctaattttgtatttttttttctagtagaggtggggtttctccatgttagtcaggctggtctcaaactcctgacctcaggtaatccacctgccttggccttccaaagtgctgggattacaggcctgagccactgcacctggtcattttttcttttcttttcttttttctttttttttttttttttttgagacagagtcttgttctgtcccccaggctgcagtgcagtggtgcactgattttggatctgacttttctgagacaggttctattgactactagaatgtcaatagaagcagtcctcctgttttggtctcccaacccactttattgttgtttattgtttatttgcatgtctcataaattgccaggtctctgctcagctagtttagtagtcaggtaattattagaaagagatttccttaaatgtacagaagcaataagtttcctagtctttcctaagaacagaagtttgcaagttcaagcctatcatcaacgctcaggcaactagcttccatctctgccttagccttcatctctgctttcactgagctgtagggtcagtagtgcactgatcacagctcactgcagcctcagcctcctgggctgagcaatcctcccagctcagcctcctgaatagctggggctacaggtgtgcaccaccacagccagctaattttttctatttttttgtagagatggaggtcttgctttattgcccagggtggtctcaaacccctggcctcaagtgatcttcctgcctcagcctcctaaagtgctgggattacaggcatgagccactgtgcctggcctggttctttcaaacaaaagttatatttccttattgatattctctatttaatgtgatattagcctcatactttatttctttagacatggtttattttagttctttgaatacgttcaaaatagttgcttgaaatctttgtctagtacactcaacatgggacttttctgagacagtttctattgactacttctttttctatatatgggccatactttatttaattgttttagagatagggtcttgctctattacccaggctggagtacagtggtgcaatcatagctcactgtaaccttgaactcctggactcaagcaatcttcccaccttagcctctcaagtagctgggactacaggtgtacaccaccacacctggctgattttttaaaaatattttttaaagacagaatcttgctatgttgcccaggctggtctcaaactcttggcttcaagcagtcttcccattttggtctcccaacccactgggatgataggcatgaatcaccattcctggcccatactttattgttgtttgttgtttatttgcatgtctcatacttttttggtttaaattgtacatttaaaataatataaatgtggcaactctgaaagcagatccacctcccatcctccaggatttgctattgttgttgattatcggtggtgatagtgcttctttgtttagtgactttcttaaaatctgtgaaatatttaggctttgttatgtgtgcccactgaagtctctgctcagctagtttagtagtcagctaattattagagagagatttccttaaaagtacagaagcaataagtttcctagtctttcctaagaacagaagtttgcaagttcaagcacatgatcaacactcaggcaactagcttcatctctgccttagccttcatctctgctttcaccgagctgtagggtcagtcatagggtgagcttaggaacttcttgggactatctgggcttgtggacagccttatacatatttgtgactgtattagtcaattcactaagactgtgttgtgactctcttagccgctaataaagacatacccgagactgggtaatttataaggaaaagaggtttaatggactcacagttccacatggctggggaggcctcaccgtcatggcagaaggcaaaggaggagcaaagtcttcttacatggcagcagacaagagagagcatgtgcaggggaactcccctttataaaaccatcagatttcatgagacttactatcacgagaacagcatggaaagacctgcacccatgatttgattacctaccactgggtcccttccacgacatgtgggaattatgggcactacaattgaagatgagattaggtggggacacagccaaaccgtatcagtgaccttccagattccaaggactgtgtcatagcttttcagagccttttgtggaaatcgtattccccaacttttcctcaagtttcttggtcaacttcttatttgttcgactgttatcactgcttcaggcgactgtagtgctaaacaattgtcattaattgtttttcacaagcaccccctggagtgaagagtgtttgcatgaatgaggtctgagtcaggtcaaatagcaacaagctcgtgaagaggtttttctgggacctgctagacaggtcgcttagtgatggttctctgagaaaggtgttttggggaagatgtagagatctaccttggaatgccatgtttagttccatgtgtcagacttgaggaaggttgttccctcctgtggtgctacacagctggttttcatgtgattgtatagatgaggagaaaaagatggaaatagagcaatttaaaatatcacaaaacttgctgtttttactgaagttcagccatttgtctttaataaatgcagcttagattgttgcagaacttagattaatttctggaattgtgaaaaagttgattttgaccattttttaccactgttcgtgttgcttttgtgaaggaatggctctttggaagttcttaaccctcctaccccaccccaacccccattgatgttgatggcattcaccaggacactttcgagagtagacgctattaacagttatgccagtataccaggtataagcgaggacagtcccaggccaactgggacatatagcaaccattccataggtacatttgagttgttcccaggtgttaaggatcacaagcaatgttgttgtgagcactcttgtacctgttctcaggttatgtttgtccacatttctgttggacaaacatatatacctaggagtggcattgcagggtcatgggttaggcacatattcaggatatgccaaacagttttcaaaatgattaatgtaatttatactctcattagcagcctaggagaattctagttattcctcatctttgcaaacttgatactgagattttttaaaatcctttttaagatattaatatgaaattgagcacatattcatgcgcttaatgaccatttcaatatcatcttttgtgaagtgcttattttactctcttgtccattttttttccatcagagtttctttgttaatgatttatggcagctctttgtgtattttgtatatcatcgctgttgattatattcattgcaagtatctttttctactctgtggcttgctttttactctcttaatggtgtcatttgttgcagtgaaacttaattgtagcccattctcacttcttaagccttccttaatgggtaatgctttgagtgtcttattttttaaatctacatgctataatgtcatgaaaattttcttgtatatatgttataaataattgttttggctgggcatggtggctcatgcctgtaatctcagcactttggggggccaaggcaggcagatcactgagcccaggaggttgtgaccagcctagacaacatggaaagaccctgtctctaccaaaaaataaaaataaaaaaaattagctggacacgatggcatgtacctgtagtcccagctagttgagaggctgaggtgggaggatcacttgcaccaaggaggtcaaggctgcagtgagccgtggttgcaccattgcattccagcctgggtggcagagcgagaccctatcttaaaaaaaaaaaaaattgtttttctgcatctgacatggtttttatttgttaattggaaatcttgcaaatgaggaaatgtctaactacctgacagcaacagtaacattattgtgagatcggtggctatgttttacttagcccttattgtataccaccatcttaatgtgagtcacatgtaattcttagagcagtagttagttggattatgtatccacattttaatccattgatgtgtgttgtataccccatttgttgaagtcgaggcttacaaaagctagtaattggacccaaactcaactcaaatcaagcctatgtttctccaaagccttttattgtctgagtatactatttgtcctattactgttgaccctaagaagaacgtgggcaagagtcagtggctacagtaaaaagtgactagctttttctcattcctacaattaagctactcattggaaatatttctaaagtgaaacctgattttggttattcttgcctcactacacaggttagatgattctcagatggatttcagaaaggttcccttaaaaattttttttaaccctcaagtggaatcagaaggttttctttttaacttacacatttctgatgtgaattccttttgaaaggaacttcatggccataaaattgctagtagaatgtaaatacccaatagatcacatgaggtaaacttttttatatgtgacaacgtaggatcttagttttgaaaacctttgtgtcttcttgctatggtgaaagctttatgccatttatgagggatagagcacaaaaggaagcttttggaggaaattactgctgtttggataccatgaaggcattctctgccttctgcttattataaatccatgtaactctggagcagccgaatcagaatgaaacctgtttgtgtaggggtgaggctaaagcacaggcaatcagccatgattatggaagtaatgtgtaggttattccagccccagggctcaattcagtgcacacagtttccagagcctgtgtgctgctgatttgacactgttactcaaatacccacagattcacccatggaaaggagattcatgttaccaacaaaagtagaaaaggaatttatatgtgtgaggccaggggagagtgggaatgagcaggaatgttggagtcatgtatatggaagaagtgctatgctgtctgcactattttaatttaagttctttccttcaacttgaagccagagacagtacctaccacctacaaagtacaatttcctattgggccttcattcattcattaccttaggatgtcacatacaattccaaaaagctcacccacctttatggtaacatatcctaatattagttattaatttgtctgttaaatgccttgggaacacagctaccaggcaaataagaaagacaatagagtagaaaatcatatgcagttatatatctaaaggggtatagaaaatgttatctctaggaattgattgccttttcttcccatagaaagttttctcatcatttagaaagtcacttgtgcaagggtattgtatgcatattaaaagactcatatgccattaagttgagttgaagattaagtgtgataatgatggtaagtgtctgatagatagcaaatgcttaacagttaccattttagtaataaagaaaaaaagactagttccatgggctcctcttaaataagcatctttacaaaaattaagtgtggcttcactgtgaaaaggctaaggtcttgagtttcgtcaggctcaagagaactaccttggaagccatgtctagctgtgtgtgtcagacttgaggaaggtcatggccacatgccctggacaagggcagccaggttagggaaaaacctgtaaatcatctttcataaggaggtgtcaagtggacttgtggtagaagagactttaatggggatttggcatcttgacccagtgcccctctcaaaggaggtatggtccctgcaagaccctggccaacaggtgagcctgcccactgggcagcctctcccattcctggagatctcccagctttcaaccatcggttttgttagtcagccctaagtcctagaaagttcttcatcatgttgagataatatgttctttctggtgagtcttgccatttctctttgtttctatattcacccacagagtcctgtgcaagtcttctgcttatccttactcatcaccttttaaatacttaaaaacggctttcatttacctcctgccacgtctctttgggcaaccctgcctaaggttcccaagccattctccctgttcttacttgtaagcgtgcccaggcgctcagcatcctgtgtgagcctctgtgtggtctgccccatgcaggctgcagtgaggttcccgttgtccttgtttcctctagagtcaattccttttattaaaagccacatcaaactgttgactcagactgagctcgtggtatcttaaaccctcaacatcaattcttacccaacaaggccttccccatcttattttaatagatttttttttcaaaaacccaactcagaacttaaatgtacctctttgatatgttatccttgtggcttttatccttctaataaactgttgaaatcctctgggatccttatttgatcttccctggtgtttatattcctcttaacttcacattatccactgatatgacaagctgagtgcgaggtcttcattctctttgttggtttccgtgttgacttagtctgtagctaagtcctgttttccccacaccgtagattatatccctgcccctagccagccactgtagaaatatttacctttgattttggcatggattagttgtgaagggccaactctaggatatgtggagccccaggcaaatatttttttatggaggctttatctatataaagaatttggctcactccggatcaactgtcagcaccattctggtggcccaatctcaagcaatctggtgaaagaaataccacacggtctggtgggtgcgactcactagccacagactcaagttcaagagcttcgggcatctttttgacactgaatagctggtacagggtgagagagctccctgaaggggagaaacctcctgaaacctcccctttccaggagacagagggagacttggaaaatttcaagaaaagccctccaaactatgggacctcctgaggtgcagagccctggcaggggccccacttgcctacctcttaggagactattaatggagaatgtggatgttgaagtgcaaaatgaatatacaaggctggaaatcagctagattttatgccttcttgtgggtgcctcagaggtttccccacactgcagaggtataattgtggttgagctagatcttcctatacaatttctatactgttatgtatcatgcaaattatgttactaactgtattcttccttttcttacattagtttaaatttgtattaaatcaatatcagcatagtttaaaagaattcagctaacattaaaaggcttaaagtgaaattattttcctccttttgccctcttcgcctcatgaggcttattccctagaagcaacgatacaaaactactttagctgatgtttttgttttcttgtatttgccctcattaacatgtttatactgctgtttctaatggattttagatactactgactttctattatgatagatgaacatttagctgtgttagctataaattcttctttcctcatcttcccatataggtatatgaacatttaggattaaagcactaatcagtgttattacattgttatgaccatataaatagtattggctgctgagtcaagtagtgtactgtgatcttatttcttttctgtaataatttcttaatttttttttctgtagttaatgactgccccctttttttgggaggaaggctcatattgcttattttcctggttatgtggcagtgatattttctaaatctccagcatgttagcttgttcatcattgatgttttcctttgaagcctgccctcccctggcacattgtcctgctcccatatggctgctctccgggcctcatgtacaacagcctctgtagaattaccagctgcttcgttttcatgaaaataacctggagtaacttcttataaaatgatgcacatttaaaaatgtcttcattctaccttttacttgcataatatttgagtaatttggaattttggcttggagatcatttccccttggtttaattattttctgattatgttcccatttctgattagcatgtttgtgttttattttctttttttctctttagcatcatttccttatcactggtgttctgatccttttttagtatatatgctgccaaagcaagcacaatttcttctctttttttttggagacagggtctcactctgtcgcccaggctggagtgcagtggtataatcatggctgattgcagcctcagcctcccaaggctcaggtggttctcccacctcagcctctcgaatatctgggatgacaggtgcacaccaccatgctttgctaatttttgtggtttttgtagagacggggttttgccatgttgcctaggctggtcttgaactcctggggtcaagtgatccacctgcctcagcctcccgaagtgctgagattacaggtttaagccactgcaccttgctggtgttctgatccttcatagtgatttccttctattgacattttaattttggttatttttttttaattcctaaaagaagctttctctcccaccttcccttcatccctccctccctcccttccttccttccttccttccccacctcctctctcccttcctccttccctccctcccttcccctctcctgctctcttttcagtctcattgttcctttttattgtaacctgtactttttgttcacttgtttatagttttagattcccttgcatctccaagggttgtgtagattttagggaagctttctctgtttcaggcatggcttctcctttctcctagtacattttctcctgtgtgctttagtctctgcctttcatgctgggggctttcagcaaatgtctggtgatccttgactggtcatatttacatgtgagatatgaaaaagctgcttatatcatctgtgcacattagaagtactgggacctttcatagcatggacagacagtaagcggccttgtggagagactccggttgacgattatttgtgagtcttttcttggaggcgactgagctttgccagagatgaatcctgccactgcccttcctcaggcaggctgccatctgttcgcctctttgcagcgcacggtccctgttttccttgtgtctgtcttcctggagtccagagcttcctttcttctccaaagaatgaacccggcgtgggtgagggtgagagggatccattatatcaccattttcagtgggggagggaaacctcaaatttaaagttgtctttttttgagacggagtctcgctcttgttgcccaggctggagtgcagtggcgccatcttggctcactgcatcctctgcctcccaggttcgagcaattctcctgcctcagcctcccaagtagcttagtttacaggcatgcaccaccacacctggctaatttttgtatttttagtagagatggactttcaccatgttggtcaggatgatcttgaactcctgatctcaagtgatctcacctcagcctcccaaagtgctgggattacaggcgtgagccaccatgcctggccttaagttctctttacagatattaaaaataatagcttaaataagtcttatgtaaacaaaatatgatgagtatagaatcaacaagaaaaaagccttttcagaattcacactggagctttattcctatctagcctcttaaaaaatggtaactttctttttttttcttttaaaatgaaagcgtttgacctactttacaattattcttgtgcttctataaacttgaattatctcaaattttagtttcctagatttggcatatattccctagtatttctcgtgtttaaaatgaatttcccttttcctgccacttacgtaaaccattgattatctgaaatcaccaagtgtcctccatgccattggatagttgaagctggatctatttaaatacataatgaagtcctgagcttcatcttatctctgcactcaaaggggctgttatgcaaaatgcatttttttgctgattatatttgtctgttggcaagaactttgcttattcccttcaccgaactgtatacagtatttatagcatctccagaaggcaaaggaagaatcacagaattccctctctctttacctgtctgctgctgtttgtttaatggaaggtgatttgtggttaacaagttgagagggcaccattgggtggtctctccttcctgccttcttggcctctgaattctgacgaagggacccatcatgaatctgatgtccctaactaaccttgcccggttcaagaaggggaggcaaggttagtggcttcggatggctttttctagcatgtcagaatttaaatcctggagagaccttgaggaacaacattgtgtcaggtcaggagtccactgtgagcagttgaggtgttaagccagtaaatggtcatgaaatgttgcaagactttttctccacccaactagcttttgaaagcagtcagtggagagttcgtctcctcttgtggacacatagctccctgtgtgccactgcaaagggacaaactgcagaaaagctcatttattgaattgtccttctgagaaattgatttggcttcatgatagagaatggtagggactgttgctttatttagacaagacagtgggagcaaaagttctctctaatggaactgccttcagccattgacaggtttttaaaaagtttggggggctgaggcatacttaatagttaaaagggctgatggctaaatgtttcatgcagctgtcatcacacatttctatatatgcttctctaggttttggggattgttatgctttttttattttataattattttttcttttaaattgaggtacaccacacataaaatttaccatctaggcatttttaagtggacagttgagtgacgttaagtacatttaccctgttgtgcaactatcaccattattcatcgccagaactttttttttttgtgagatggagtttctctctgttgcccagggtagagtactgtggcataatctcagctcactacaacctccgcctcccgggttcaagcgattttgtgcctcagcctcccgagtagctaggactacaggcatgtgccaccatgcccagctaatttttgtattgttagtagagacggggtttcaccatgctcaggctggtctcgaactcctggcctgaagtgattcgcccaccttggcctcccaaagtgctgggactacaggcatgaaccattccgcctggcccataactctttttcatcatgcaaagcttaaatgcggtccccattacataacaacattccatatccccttcactccggcccctagcaaccactgtctttctttataagttccaggatagctgctttgccgaaattaaatatataccattcaaagggtgtttaactttggtcagcttccttcgtttttccttcttacgtggaagacaaacgtgaactctctgacatcagaatggattgtgttgctattggctgaattgggctggggtcctcacaggggaaagaagacccactttcattaaataaggagagcaaaaggctgcagttccacagaacatatcagattatggtctttcttggggttccaagtgcactacacagactccgttatgtttgaggcatcccctgttttgcagtggaattcttactttgctggtagatcagtcaggatggatagaattaggctgaagaaaggagcacttaaatctcagcggcttaacatgctttctccttcctggcatgatcgaggctggctccagagccgtactcatcctagactcttatggatccaggcagacagaagctctatcttgacacagtgcttctgtgaccgtggcaacggggcaagaatggggcgaatcaggcttttgttgagcagtgatgtcacttctactcacattttactggccaaagccaagtgccatggccatgcctggcttcagagggggccagaaagttctattctcccatattcctagaatgagaagagctcaaaatattgaatggtcatgcctgtaatcccagcactttgggaggccgaggcagggtgatcatctgaggtcgggagtttaggaccaccctggccaacacggtgaaacccctctctactaaaaatacaaaaattacctgggcttggtggtgtacgcctgtaatcccagcactttgggaggctgaggctggcggatcacttgaggtcaggagttcaagaccagactggccaacatggtgaaaccctgtctctactaaaaatacaaaaaactagctgggtgtgtggctccctagtagcctgtagtcccagctagggactagggaggctgaggcaggagaaccacttgaacccaggaggcggaggtggcagtgagctgagatcatgcccaggcactccagcctgggcaacagagtgagattctgtctaaaaaataataattatcgaatgggtaatgcttgtgactctgcagcctggctttcagagcaattaacaagagctgggggtcaggatcagtatgtcatattaaacaaggaaaaaacagaaccaaaactttttttttttttaagaacagggttggtggagattgggatttataataaatgactgtgttcttcctaatttttctgggcttttttcctccatctgtgaaaaatggtcatctgagtcccttctggataaatatttttatttaaattcttaagttcataacatatattcagccgagcttgctgtcagaaatttcagatctttctatccattactcaggtattatgtcagggttgtaggtatttccttttcttactctgtgagttagggggtgagggtaggggctgggaggttctaactgaggcagagatgagagaggtttgccttgaagatatggatgtggaccgcccctgagcttccacctgccaggtgtttgtgcaggaaccatagcctctccttagtgctgcgtgcgcctctgcagggattgcatctggatgcccacacattatcctttaaaaatgggtgaagatggccgggcgcggtagctcacgcttgtaatcccagcagtttgggaggccgaggcgggtggatcacctgaggtcaggagttcgagaccagcctggccaacatggagaaacctcatctctactaaaagtacaaaaattagctgggcatggtggcaggtgcctgtaattccaactgctcgggaggctgaggcaggagaatctcttgaacttgggaggcggaggttgcagtgagccgagattgcactgctactgcactccagcctgggcaacagagaaagattccatctcaaaaaaaaaagggggggtgaagacacgaactcccctaaaatctaaaagctcctcatttccactgagcgatacaaacaaaatggaaagcatgtttcgggtcaaggaaccagctttttatcaggtactaccaggcacttgggaggacaaagaaataaatggtggagaagggtgaagctttttggaacttcctttgtagttttgtaaggacagtttttaatgaaaaccggaatatgaggtatcatatttttagcatagttatagaaaaattatactcaaatattaggataatataccttggaaggatgttctttgaaactttctatgatagtttaacgtatacacagaaaaggcacattttgatggtgtttaacaaactgaacacacccctgtcatacaccagcacccagcaccatgtaactagcacccagatgaagaaacagaaggtggccagcactccagaaaccttactgtgcttcttaccagattctacccattgcatctcatcccaccaaaaaaacctgccctctcaacttctaatactgtatattagtttatctgtgttgatacttgatatggtttggctgtgcccccacccaaatctcatcttgaattgtagttcccataatccccacttgtcgtgggagggacccattggaaggtaattgaatcatgggggcggttacctccatactgttcttgtgaaagtgagtgagttctcactagatctgatggttttataaggggctttcccccctgctttgttctgcacttctcctcgctgccaccgtgagaagaaggacgtgtttgcttccctttctgccatgattgtacgtttcctgaggcctcctcagccatgctgaactgtgagtcaattaaacttctttcctttataaattacccagtcttggatatgtctttgttagcagcatgagaatggactaatacaatactttatataaatagaatcctacagtatatactgcagtgcatctgattccttccccaacaagatgtgtgcccagtttatatgtgttaatctatagttataggtccttcattcttgctgtatagtatttcattgtgtgattatcccacatattcatccattcccctattggtggcacctggatggtgtccagtttcacccatgatttgctgctgggcatgttcttgtgtgtatattttcgtgtgcatatgagtgcatttctcttgagtgtgtacccagagtgcattttctgggtcacagggtatgcatatattcaactttagtaggtaatatccaacagctttctaaagcagttgtacaagtttactttccagccagtggccagcagtgcataggagttctggttactccatatctttgccaacactgggtattttcatcttggattctttttttccttcctttttttttttttttttttttttttttttttttttttttaaaaaaaggaggccgggcatggtggctcacacctgtaatcccagcactttgggaggctgaggcaggcggatcatgaggtcaagagattgagaccatcctggccaacgtggtgaaaccccatctctactaaaaaaaaaaaaaaatacaaaaattagctgggcgtggtggcacatgcctgtagtcccagctactcgggaggctgaggcaggagaatcacttgaactcgggaggcggaggttgcagtgaactgagatcgcgccactgcactccagcctggtgacagacagactccgtctcaaaaaaaagggctgggagtataaccccacctaacgagatacccatttattgtgaggcactgggagatccaatgatcaagctttgtacagtacatcagcaggagcaagcttggtgctctcattagatgcaggagagcctctctttttctggtggaacttcaggatgatatgtaaggacaaactataagataatgacctgcaaagaggagacaactataaaataaagtgaagcaaatttaatctcataaatagacatgcatttttcctcctaagtttctcaatctacaagtcctcacctgtggcttccggtttctttatcgcctctcctcctcccactcagtctttacaaagtgattccatttgctttatcaggtggtacttctgctgtttcttcttcagattgtctagcatattgaaatgtttatccacaggcaaaatatttgttatccacataacaactgctggaccagttaggtttgcccagtgggaggtgactttgttggctgacaccatttttaatatttgatgctgtttcttctgtggaatacaaaactgatcagattcagaaataataaagataaagtactatcttgacttaaattccagctgccagccagcacagtgtcatgtgctggtgggttcctgttaatagaatgttgtttacaagtggctgggcaagatggctcacatctgtaatcccagcactttgggaggccgaggcgggtggatcacttgaggtcaggagttcgagaccagcctaggcaacatggtgaaaccctgtctctactaaaaatataaaacttagccgggcatggtggcacacacctgtagtcccagctactcgggaggctgaggtatgagaattgcttggacctgggaggcagaggctgcagtgagccaagatcgcgccactgcactccagcctgggcaacagagcacgaccctgtctcaaaaaaaaaaaaaaaaaaaaaacacagaattttgtatacaagccatcactcaaattagttagaaaactaagaaggcgcttcaaaggagaaaaaacaatgaagtgtttttgtgcatgaaaaataatgttagtagctcctttagtattgtagtggctgaatagattatttcttgagatgggctaacttctgagcatttgtttcacctctctgggcttaagagagtatctggaaaagtccagtatctcctcacttgtaaaaactcattgattgaattcctaaagaatcattaatagcgagttatcacatgtgctgtctcttgaaaactattctgacttttgcctttcagaacaccgagtcacaccaatcccatgcaggtcaccattggtgggtgtcgctcaccattttcttaatgcccttctcaaacaggccacttttagcacatggagtgttgttgggcggctgcaattcttagagggttccatagagtccccaaagacggtatttcttctggctacctgaccacttccccaaccctagttctgtcttgctgcttagcaccaggaataggacctttggatttgggttgcagtggttcacgaggggcagggctgttgtagcttcctatgtcagtaatgtccctcagtcccactcatgtcctataactgaccgatcctatctggaaactgacctttgcttcacagcaaccctcgtgagtagacaccaagttgtgtgttaggagtatcactttcacaagtgagttcagtaagtacattgagtgagcagacatggtggcttcattcaggacagcccttgaaagggaggaggggagagtgggcatctgacctgagactcactttttgttactgatttcctgaagaaagaggaggtcaggttattcttatccatgggtgtctagacctgtcacctcgactcccaggcattgcttctctggaaatgctccggttcatttctcttaagttcctaagaggtgcctttttcttcctgccccttcttcctggtacagaccactagccagacggagcttgaaaactggatcaccgccatccactctgcctgcgccactgcggtcgcgaggcaccaccacaaggaagacacgctccgactcctgaaatcagagatcaaaaaactggaacagaagattgacatggatgaaaagatgaagaaaatgggtgaaatgcagctgtcttcagtcactgactcaaagaaaaagaaaacaatattagatcaggtaatcgttcttccgtgtttaggtccggacaaaattgttaggtctctaaaagggtttttttttttttttgctgttttggaatcgtgaaacatcatcggatatctcctcgacagcctgtcatccaggatgctaagttctttactgtgactgtcagtgttcttcaccctttgttcatagctgattgttaatagctaaacggaacaatattacattgaatgaaagacagaaacccagtagaggagccctggcccccatcaatgatgtgctcttctaggggatctgtgtaattagaaagtttgcaatttcatttcccatgttatcagactgacttggagttctcttatggtggggactcatttctgactcctcagtaaattttgaattcttaatttggaaaaggtaacgtacattaaaaatatatatctggccaggtgtggcggctcatgcctgtaatcccagcactttgggaggctgaggtgggcatactcgcttgagcccaggatttcaagaccagcctggtcaacatggcaaaaccctatctctacaaaaaaaatacaaaaattagccgcaactgtagtctcaggaggccgagaggagaggatcgcctgagcctgggaggcagagggtgcggtgggccaagattgtgccattgcactccagcctgggtaacagagcaagctctctctctatatatatagatatatatagagagagatatatctatctatctatctagatctagatatataattgctttatatgtgcataagtatatttcatgctaaagaaaaaagatttagtgaaatgaacaaagcacatttttgcctgctattcagctgtcagtaatagccatctggtagtgctttgacactttgtcctaatgctcaggaaataattacatgaataaatgatatttaaatcattgaacaattgacatgggccttccacatttctctccctctggggtttccctttgttacctgacattgtatttttttaaattgaggcaaaattcacacaatgtaaaatcaaccattttaacacgaacaattcagtaacatcgagtacgtttaccatgtggtgcaaacactcccccatctagccctgaaattgttaatctggcccaaaatgtaaccctgtacctgtgaagcagttgctcctctctgcccccggcactctgtcttcatggatttgcctattctagatatttcatatgaatggaattgcacagtacgtggccttttgtgtccggctccttccctgagcttcatgttttggaggtggatacacatggtagcatacatcagcactttactcctgggttctggttgtacgtatacaccatggtttgtttattggccatttcttgatggacattcaagctgtttccaccttttgcaaacagtgctgctatgaacatgtgtgtacagtgatatatattttgttgaagcaaaaagggagatttcaaccattcctcattatctgtaccattgtcagcatcactgcaccttcactctatgccagaccttgtacttatgcttgtattatctttttcaaacatcccaacagcctaaggaggtagttattattttgccactttgaaaaataagggaatgtctcagagacatgctacagttggaactttgtattccagagtctgggtctccaccatcttgtgttccacttccaccctgtgttccgggctaccccgctcttcccaaaagcacttggtccattgcttctagcctttcattcgtctcacttttctttgtatgaaaacctacctcttgttaagtcatatagttctttggtgatggaaatctctacatttttacttctggagtctagagtttgtggtccagatcttggagttgatagacctatcatgcccccagtacgaactccaagataggagggaacagaggaacttgtcactttctatttatgatgctgaatttatggctatagatcttgcagaagaaacataagtaactaagaaacttaggtacctgttgtttattccttaggattataatgaatgcctttacgacatatagatctgtataggataaagatattagcatttgtttcccattttctcactttttcttttcccgtgttttcactaccatagatctttgtctgggagcaaaatctcgagcagttccaaatggacctgtttcgtttccgctgttatttagccagccttcagggtggggagctgccaaaccccaaaaggcttctcgcttttgcaagtcgaccaacgaaagtggccatgggccgccttggaatcttttcggtatcatcgtttcatgccctggtgagtagaagctaatgaatttttgaaaaacattaagcttgacgcttaatcctgagcaggacttgacaagagtctcctaagtgtttttcgagcttcctgctgtgtatggatttctgaaatgccctccctttgcagtggatgcaaatttccatttaaacctgtctggaatatattacttaagcatctatctcttgatgggggggcctaagctattgtgcaaaggaaatatgaagggtaccatcttcagcgctgttcacatgtagtatttgttgatagctcttgtcatctttagacagtgtcatgtttggaacccaaatacatattttttatataaacttggtgggaatggtgagtggagtgctcactctcatacatcaatgcattctcaggctgggcgcagtgactcatgcctgtaatcccagcactttgggaggccgacgcaggtggatcacctgaggtcaggagttcgagaccaacctggccaacatggtgaaaccctgtctctattaagtgtacagaaattacctgggtgtggtgacatacacctgtaatcccagctactcaggaggctgaagcctgagaatcgcttgaacctaggaggaggttgtcacagtgaaccaaggtcgcaccactgcactccagcctgggtgacaaagtgagactctgtctcaaaaaaaaaaaaaaaaaaaaaaaaaaaatatatatatatatatatatatatatatatatgtatgtgtacatgtatgtatatatacacacacatacatacacacatacaccatatatggaacacagatctctttggagctctccatttcactttatttttaccattgttttgatgaccacgaatacccgatgcattagagcaaggcgaagaactctgtgattcgccagctgaacatatatgcattgcttgaggaagggaatttccatctgacctctagagcggcagattgtatagttgtgttgtgtgtttataatctgtaatttcatgtacttgctaaattgcgagcagctttgtgtacttttggctccttctcaaaaattgctgtatgagtaacatggttttagtctttccaagtcgacacccacttagaatgtactgcaccttagcacatttgctagagaattaaatgttaagtctcaggttccagaaactgctttgtaaaaccttagctgtgctgttcttctcttgctttgtcagctgtacccttcaattgcattcagagctataattcagtcagaggcgtttgtattctttataaatagattagcatcatcattcagataattaggggtagatttacatttttaaagaagtcttaaaccaatttctggagttattaaaactggcatcctgatttgttctgctaattacagctcagctcttggtctccctggctaccacctctccatacagctattaaatcctgttttttcagtagtggtgggacaaagtgctgtgttgaataaacttacaaaacgttttcagtttttgactccagatctatttcttggagacctggacaccaatttttaacttagccaaatctcagttcgcctattctgcaaaacaaaaataaacaaaaaaactaggatagaaattcttctttatctccttgtcagaatatcatccattgaggacgcatttttatgaagggaactcgtgatgtcatcgaggtaccatctgtattaataccaaacccggagcatcgaagtggcttcctcctcttactgtaccttgctagattttggagaaaataattttgctttctccctaaaacttgtatgctttcattattttcttcaaagccactgggcgcagcctccctgagaaggttaccgttttactcttccataattcatcttcggaccctctaatttccttcatctcaatgtctgtgatgtgtgtgtacttttctttcaggggggcaggctattaaaatttggccagctgaagatggggatgggagagttagttactctgaggtgttttggtcagtggttttaaagaacattgaagtccatacgttcaactctctgttcctttcttgggtttttgctcgctttgtcagtgatacaagtctgggtgtttcaatatgttcctgcaacttctcttttctatgaggggtttcatttcagccggaacaagtcaggcgagcctgttgggtgtctgttcctatttgttgctttagctcctgtggaagatcccgggcagggaattttgcagtctgatttattaggaactcttattttctttccctcctctccttgtcatttgacccctgggattttttttctccttggggttgaaacattcttcaatttagtctttgtccagaaattttttttcttctttttagtgggggaggaggaaggaggaggtgtgagggtaacagggctgggtagattggggagctacaattgaagtagcattcactgagaaagcttcccataatgctgagtgatttgcagtaattaactgaagggtcctcgctgtactctttgaaagaaggttatcattgttcttgtttgcacagatgagcagaatgatagagtaatcaggttcaggccacaaagggaggcattgtctgggcaaagatcattgggaaactcttgagctctggtccagcagttcttctgccagccctttttctaaatccctttgctcattttgagtcattattgtcttggggatagtggttacttttgcagtttacaaggccccaagcaatttagaattactgcttataagaaacttaagtaaagtgtttgttaaacagactaaactaactagtcagctgataactgagaatatttatgggtgtatgaatttctctttcatgctgtctttgtctggaaattgtaaactgaagagttttcttttttctttcttttttttacattatactttaagttctagggtacatgtgcacaacgtgcaggtttgttacatatgtatacatgtgccgtgttggtgtgatgcacccattgttgtcaccgtgttatataggatgtgcttttgctttgtggtatttatgtatttatttgttcaagcaacaaatgtatgtaagtgcctggcatccgtcagttttatccttgtgattaggactatagtgaacagcgcagagatcctgtcctcttgaagcttatattcttgtgggagagaagggtaagaaataagtaaacaattaactagacacagtaagtacaggtattgctgtgtgtatgaagaaagcaaacagtaatatatgtcgacgtattttatacggttgcctctatgtatgtgtcactgttaatgactggatttatttataaaatgactatatgactgtgaggccaaatggacatttttttcctctagaatttaaaaatttttaacaccatttattcagtgttgacatagtcatgtgagcatatgcatgtctgcatgttataatttattccttttacaacctttgtttacctttaactgagaaagtgatgaaaatagagaagagaaaatttttacatattttacggtgtgtttgtcttgtgattttgttccctgtgacacctccggtgtaatcttagattaagatctttctcatgaaaattctcaccagtgtcttggataccacatttttctatgccctgatctggggtttttttttgttttgttttgtttttttaacgtgctaagctgagaaaatgcaaaatgcaagacctctcagctccctcatcttcctatttttgtttgggtccaaaaaccttccctctaatacccttgtagagaagccgttttgattcctgtttttaatgtacgtaggggtccctgccacccgtggggcttctgcggtgtttacattgtcagtactgaagccccagaggggcgtgccttccaaccaacacgctgactgctggggaggcccctcatgttaccaacagtgcctcatcccctgcattgctgccaattggcatctgtcacattgggagttgcctgtgtgggaatctacaagtaggttccaagacattcacctctggcaacaaaagagtgggtggagaagtttcatttcaagtctgactcgctgttcctcctgccactcccttttttgaaaggcgagcgggtgggtggcccatggagaccttctggcagaagttcccttaaattcctgggactttgcttgccacctggtaggataaagttcaagcctgaatgttttgcctgggaggactttctggagtccttgtggagattctacttgagcaattatcctggtgacagatttacatttagggtgttcccttgtgaaatgcttctctggaatcgctccactggactccagcctgggtgacagagcgagactccgtcaaaaaaaaaaaaaaaaaaaaaaaaaaaggaaatgcttctctgggttgctggcacattgtaatacctcgacagagtttagcttttgttcaacaaaaaaatacaagttttctttcccatttacctaaacataggacatgtaagtgatgcaagtctggtaaggtgccttcatcttcagtgagcccagtcccttttgtcttgttattctgccatccttgaaaaggcttaggtagggacatcctagaccacaacacagaccttccttttatcaggaaaaagaaaacagataggatagcggaaagaataacagaaagccccctcccattgagcacagttcctggaagttgcaaatattttttgcttgtatgccattgaccaggacttaagcccaatccatgccctactgcaaggaaaataagtcatcttggactcagtggctgcatgctcacttacatatgagattccccaccccccgcttttttttttgagaaagagtctcgttctgtcgcccaggctagagtgcagtggcgtgttctcagctcactgcaacctccatctcctgggttcaagcaattctcctgtctcagcttcccaagtagctaggattacaggtgcctgtcactgtgcccagctgatttttgtattttttagttaagacagggtttcaccatgttggccaggctggtctcgaactcctgacctcaggtgatctgcctgcatctgcctcctaaagtgctgggattacaggcatgagccaccgcacctggcctacatttgagatttttctgactaagatggaatagagaatggatattgggggccaatgatcactcgtctgattttaaaacgtgattttatatatcctaagaaaacaaaatagtagagattggtaattttagatttaacctggaaacccaggaaccaaaatctgttgtttttccactattgttgctgacgctttagcaccatttttcaatagaatgcagaaacagctctgtagcatttggagagaaagcctggctcatttcccttgctgtagttcaagcctgtgaccagaaggacatgtcatttttggaaacagaacatatattttattcctatattatgtatttttgctgatgatttcaaacaaggattgaatttgccagcttttcatttccattctgaatccatgaagggctctcaaagtcccaatatgtctgggtcatggattgaatactttaggcattggggtcagggttggctggcatgatggaggagggttttttgaagggtgggacttacggggacctcaaggcacaagtgggtggtcctgatgcatctcccttgtggctgcttgtccttgccatcctcaggtggcagcacgcactggtgaaactggagtgagaagacgtactcaggccatgtccagatccgcgagcaagcgaaggagcaggttttcttctctgtggggtctggatactacctccaaaaagaagcagggacggccaagcatcaatcaggtaggttccagagcagatgaaaagtgagcccgcacaaatcacttctgtggccacctcaatttggggtgtgtgtgtttcttcagtgaggccgagtgttatttaaaatcaactagttggcacaaagaaactagctgtgctagacacttttaatagataatgcatacccataacattgaactctgctattagtctatcaccaagctgcagtttcccacctgcatcctttccaaaccctcattaattacagacctactcaaagcgcacaattcaccctgagtcttcaggaaaaagcagggctctgcaatgaagccaagtgggtacctgagtgcagtctttttttttttttggagacagagtctcgctctgtcaccaggctggagtgcagtggcacaatcttggctgactgcaacctccacctccctgattcaagtgattcttctgcctcagcctcccgagtagctgggactacaggtgcccaccaccatgcctggctaatttttgtgtttttagtagagatggggtttcaccatattagccaggctggtcttgaactcctgaccctcatgatccacccgcctcagcctccccaagtgctgagattacaggcatgagccactgcacctggccatgcagagactttttaagctgcctctggcactggatgaaaggcagcctccagggaattctgattattctctgcccttgactttttggagctgacattaaatgggcagatcctctgcctactggaatgaggagacaggaatccgagagagctcgcccactgccacagcccccttctgctcaggtccaggggctggaacgggatctcggtatgtcgtgagggcgcaacatagcctggtgccgtgacgggtgtccactgaccatgtacagccacccaattcttgcccattaaatttgacttcttcactcgccaaggccagtctcctgctggggttacttccgtgaagcccactgtctgttgttactgtcttccttgtcgttcggctttgagaaatgagtagctccagaactgcttgtttagatttcagggactaaaggaacgtgagcatctgtagtctttcggaagaagaatgtccagtttgtgggctgcggtggctggaaagtcaggccttcagcattttggaggtcatgactaagactgctagtttgacctattcaccgcatgcccttgtgaaaagtgagaggacgtcatcgactgacttgatagaatgatctctccttgtttgctcggacagttccagccattaatttacttaagaaatgaattttagaaaagagattagtcctgaaagctgatgccctgagtcccttagctgactgtgatactcattggttttttggttttgttttgttttgtttgtgatggagtctcgctctgtcacccaggatggagtgcagtggtgcaatctcggctaaccgcaccctctgcctcccagttcaagtgattctcctgcctcagcctcctgagtaactgggattacaggcactcaccaccacgtgcagctaatagcttattatttttatatttttagtagagatggggtttcaccatgttggccaggctggtctcgaactcctgacctcaagtgatctgcccacttcggcctcccaaagtgctgggattatagacgtgggccaccgtgcctggctgatactctctgttttaatgtggcatttccctatccttgatggaacctgcggagagcagatgagcaaatgctaagcgagtgtgagactgaagcagtttcgcagtttgtcttgtgatctttggggagagtagatcattgagcttgcttccatgggttttacttttatgtaaatctaaagaaaaaactgtggaggaaagtcaacatttcatcagaaaaataacaaaagagacttgatggttctcagttaaaacctgcaaaaaggaggacatgaaccatcagcatttctcttctttttttttttttttttttttcttttttgagacagagtctcactctgttgccccaggctggagtgcaatggcgcgatctcagctcattgcaatctccgcctcctgggttcaagtgattctcttgcctcaacctcctgagtagctgggattacaggcgcctgccaccacacccagctaacttttgtgttggtcaggatggtctcgaactcctgaccctgtgatctgcctgctttggcctcccaaagtgctgggattataggcatgagccactgcgcctggcccatttctcttcttcttttgggaggtggtggtgtcattgtgtatgtgtcttctgccctgagagatggctcagcccactgcttctggacttcacagtttggacttgttttctaacaaaaccctttgttcatgtgcttctgcttgattggcaccaggttatgttaccgcccttttctactgaaatatatgactgaatttaaatgaattcaagagaatgttttaacatttttctaaaatcaaagcacaatgtaatgtcttagaaacaattcttgtattttttctaaaagtatgagtttttaagaaccttttgcttagccataaacataccagtaggaatttagtcattaattctataatttgaaatggacaaaaattatgtttttttggccggggtggtggctcatgcctgtaatcctagcactttaggaggccaaggtgggaggattctttgaggccaggagtttgagaccagcctgggcaacatagcaacatgctttctctaccgaaaaaaagttaaaaacattgtatgtttttgtatattttatttgcatggaggaaaggctttttctcaattgtgtacattatcctgatactacattcttgttttagggataatcacaaaattcctcatgtccatgagtttccttacctagtggcattgttaccctattctaattttcatggcatctttaagttagcaggattgattacatttcaaggaagagacaattttctattttttaattaaaaaaacccctatgttgccatgttgaggtaaaaaactataatattctcacattctacttaagaatgtattacaaagcaagcagatttttacttataagtatctggtcaggtatatgaggctataggagaaatgcttcattgtgagtttatctagctcattgcttttgctagtttcttttcttttatttatatttttctttttctttttctttctggttttttatttttttgttttttttgagacaaggtctcagtctgttgcccaggctggagtacagtagtgtggtctcagctcgctgcaaacttgacctccagggcacaagtgatcctcccatctcagcttcccaagtagctgggactacaggagcatgccactatgcatggctaattttcaaattttttatagagacagggtctcactctgttgagcaaactggtctcaaactcctgggctggagcaatcctcctgcctcagcctcccaaagtactaggattgcagatatgagccaccacgcctaacctattgtctttctctttttactttttttgggacaaggtctccctctgttgcccagattgtagttcagtgatgtgatcttgtgatcctcctgccttagcctcaggagtagctgggactacaggtgcaccccaccatgcctggctaatttaatgtaattctttttttttttttttttttgtagagatgaggtctaactatattgcccaggctggtctcaaactcctaggctcaagcagtcctcccgcctcagcttcccaaagtgctagggattataggcatgagccaccatgcccagcctattttctttaagtagagatgaattatccatatttgagagcaaacttttttttttccaactgtcaaacacgtagggaagtgatctagatagagggatgtgtttttccaggtctgctcccataaattattgtacctgctttgggatttgatgtaggagtatctgaacacgtgtgtaaggttttgtcatagccatgcccatttccttcccccttcctacgtttcgtttgccctgttgcccagattcctttttaaggtggtacttttgtatatgcaggtgtttggagagggaaccgaagctgtaaagaaatctttagagggaatatttgatgacattgttccagatggcaaggtaaaaataaacgtgtgttttcttttctaaaagtaccacaagtgcatcaacatatacatggtgcagtgttgtcttgagctactaaaattaagtaaactcaatattaaaaactgaaatcagtttttaaaagttatgtaataagtcaacaagagatggaaaatcattttatatttaaaactgagtggtagagggaacattctcctgctgacataacatttcccatacttaccatttgatgtgtgagtttctaactagaatgtaagaggaaatttgggttctgaatagctgaatattttatgccattgccaatttctttccatgtacaacttctcttcccaagaggtgtgttcttactaccctccctctctgcccacacatgctgttttgctcccattagtttcaaagaactgttctgatagcgtgttctttaaaaaaagaaaaacaacaaaaacgcatttgcctcccaagtcaagtattcaattaaagattcggccgggtgtggtggctcacgcctgtaatcccagcactttgggaggccaaggcgggtggatcacgaggtcaggagatggagaccatgctggctaacacgatgaaaccccgtctctactaaaaatacaaaaaaaaaaaaaattagctggacacctgtagtcccagctacttgggaggctgaggcagcagaatggcgtgaacccaggatgcggagcttgcagtgagcagagatggagccactgcactccagcctgtgcaaccgagcaagactctctctcaaaaaaaaaaaaaaaaaaaaaaaagattcacaggcttggttcagccttgtgcttggatttaaacaggggctttcaaactgctctgattgaaagcccataaaaatactgatttgttttttaattggccacttttttcagcctctaaataaatagacgtctctcgttttcaagaccctagtagtgatactgggagcctgtttgtgtgggggatgggggatggtctgatgttgataatgtgaccttggtgggatcctctggttcttgggctcagaatcaatatgacagaattcagccctcagttgccatgcatccaagtagtgtcagtcatcagtggctcagccccatgttgtagatggagctgagcttcagaatccagagtgccatggggagttctgctattggaggggaagagagaagagtggccatgggaaggccttttctttccttcatacacaaactactcatgaatgatgctatcctggatataaaggccactgtccttggaaatactcatccatggccactgtctgagcatctctgtctgatgaaatttgaagaaattcagtttttgggcctatgtgcaatccaagcatagtttttgatgttaacttggtcatttctgaggttggccagttcatcttgcataccattattagtccacatttaatactgagatatcttctctagaccacagaacttggaaactgcgaaagtttttccattggatttctgtgtagcatttttggttttccatttttctaaggtacgtctttctcccacatcctggctagaatgccttgttctcagagtgtttagatgcaaaacttgggttgatccagtgctaaggggcatttatttaatgtggcacactggaacagagtctgaatattccaattatacttaatgggatttaggtatgttgattgctttttgacaattccttccctggagtccagcttatctgctaaagcaactctgttcaaaggcgaggctgaaattatcttccccagttggatttagttgaatggcttttacgaaaacgtttcccccattcttggattccattcttcttttgaatggaggttatattaccacctctcagccttcattgggaaatttgttccttcttgtaatttgctgataccagccttgttcttggtcatcagtagatacatatttaccaactagtggcctggttataaatcaataatgaaggcctattacttagcatatattgagcatcaatattatgtttacattgctgaaatctaacatcattctttccttgcttatttcgcggggctcctaacattgtatcaatctaaggaaagtaacattatatcaagctaaggaacatcctctgcttcatctgcttagcttgcttaggtttaacccagctgctaaaggaggacttccgacccttctcccacattcacaaacttcattccactccctggtcctcaggcagtgatggagaggatacagtgatggcagcaaaggaggcttgtttttgctacattgtgccatgatgttatccgtcaagttctttgacctccagaaaactgaattgtctctggcgccgggtcgtgctgaaggtccaaggagagcacaaaaatgatgctgtctataaatataaatataaatatgtagtgctaaaacatgatctttttgaaaaaaaaaaatgattggggcttcaccattgctttgaactgtaaagttctcatggcagatgtgcttgttgtaggaattccctgcttgaaacttgaaatgagtttgtggaagaaataagagccataaagctgagctgaatggtgacctttctttctttctttctttctttctttctttctttctttctttctttctttctttctttctttctcccttccttccttctttctctttctttctttctctttctttctctttctttctttctttctttttctttctttctttctttttctttctttctttctttctttctttctttctttctttctttctttctttctcccttccttccttctttctctctttctttctttctttctttctttctttctttctttctttctttctttctttctttcttttccttccttccctatctctctctctttctttcttttcttccaaattttgatgcccactcattcatgccgtgatcacctatggatgctgtgggttgtgaagcctgcctcacagctgaagtttgaaatctctccattgcaccataaatctgctttctcagtagtttctctctctccaagggttcccctgcctcccaccactgcctccgcttctgccctgggctgttttcatgggaatcggtgattcctgtgtgcagtctgggaatctagggttgtcagagctccactgctgctgccctgctaactttatttcttgttatagagggagaaagaagtggtcttacctaacgttcaccagcacaaccctgactgcgacatttgggtccacgagtatttcactccatcctggttctgtctgcccaataatcagcctgccctgacggtcgtccggccaggcgacactgcacgggacaccctggagctgatttgcaaggtatggagctgctttgggttgtttctccaagaagagcagaatggggtgtagcaatcttctaaggcacatgtggaaacccagagccgtgtgggagaggaaggtgcttaaaacacacctccctttcatttcggagcagcattgcattcctttgtgataatattcaaaattatattagtgaatgcttcacctttgggaagagaggaactcttctaagtagcatctttcaatgtgtgtgtttgatagatttctaatgcatgtatcacatgctcattgcaaaccttttagaaaatctaggtgaagaacacaacagaaaattaaggccactcttattcacgaaatccagaaataaccattgcaaacattttggcgtttgaccattcattcctttttccgcacacatacagatacatgtgttcaatggcatcatattatgggtactgttctgtcacctgctctttaatcagtaaccgatacactatgggcatctttagaattggggaaaatggaaggaaatataagtttgacctccattgatgggaaattcttcttttgtgaacacagaattagcctttttagaaacatgacaaatgattgagctccttttctctttcaccttaaaccatggaagaaatgccttgatctttttcaaagtgaacctggtttcatttttccccgtgaagggcagccaggtgaatggtcttgagtgaggggagagagaggaaagaagaactttacttgcatgcttgtttttatttttacataatgaatagcattaatagttctatgtcgtagtcgtatcaggtctgagcctgagaaagagctgagactttgccattgtacacatggaggaagtgaagctcagagggccttagctgcttgcctgaactcacatcacagtcagttgcaaaggagagactgaacccacgtctggcttctctacagctgggtgcatcctgcagtgccgagtgtccacaagaactctcagaacctgggttagtcttcaggaaggacaatcagtaaggctcagaagaatctagaatatattcttaggggagtgaattggtcttctttggggctgctaaaaaaaaaaatgaaaaacttttctatcacaattttatcctagaagaagttggatggatgaaatgacgttttaaagatctcatcattcaacacaatgtttgtaaatactgaatgactttcactacctccgcaagtacctcaattttgtagttctactatcagcaatttttgtattttcaaaaaagcaaatcacagacggctttttaaagaaaaaacatggctcttcatatgaatcagagaaatggacagttcagctcaaattagcctcttaaaatgtcttatgtatgtggaggaaaaatagaagaatcacttgttttgggccataactaaagtcagccctgacatggatgctaaaaataaatggtatcacctctctgtgtgctttgaatccttcatgtacgagggttctagcttttggagataatggtatctcagttcacaattttttcatgttaattacttaacaaaattggtctgtagaggatttctgcattcctttatttataattagcacaattctttagagacccattaacattctgcagagctgaagagttattgtcagatctgcagatgaaggtgttaaaagtagaactttctggcttttttgtataagccgaactctggaaggtgtttccagaagaataacatggctttggagcatcctgtgcacattggctttaaactggatcaggaatcgaaggttaagccaaagttttccgattaccattgattggtggaagattgatcagtgagtgaagcaatgaatgattggcccactttacgtatgtttcaagcttttgctttggaagaaactaggggaatgaagaatagtattgtcattgacagttagagaccatatctagataatgtagtggacctgatcccctttaaagtgtttatttctgtcacctgaaaggtttctgatggcatcattaaggtacaaaatccctttctccaacagtaaaagttagtcctgtccaattttccctgggccttcaggtctttttcccaagacatagaaataaaagcaaaaacaacgtgatgtggaacaagcttctatctcatgagtttatgccgggcacggtggctcacacctgtaatcccagtactttgggaggctgaggagggcagatcacttgaggccaggagttcgagagcagcctggccaacatggcaaaaccccatctgtactaaaaatacacacacataaaaaatctcatgagtttaaaactggaagacttgtgtgtgcatttcagaaattgatggtctttggaaaagcacccatgtaggaaaagtgatatagtatgctcagggccaggtgccttctaaagcttgtttcttccttggaaaacaccttattgtaattagtggatctgattttattcttaagagggaaggagataatggggaaaacagtgtcccatgttattaacaatctgatataatggcgaatggtttttttttcctcattgaaaacaaacatgattgtaaaaatgcctgtcttttgtttcattattgttattctcaatgtttggtgatagatgctttctctaatatttaataatcaatctgtttcttctgtctcttgcattcagctcattctctttcctattctatctgatccacatcatttcacatcagtttgccatctgccatctgagcaccagtcaagttctggtatagtaaatgtttcaagatcttcatttcatatacaattcatgtcacagatgttactggaatgattgttgctaaatatagcaggtaaccatgttgccctgtaggttttggatatattctgatcgttacaactacaaaaataattgcaacatattttcattcatttatacctactgatattattcacatgtgaccatgtgtcagttttatttcatgcttttactacgtcattctgtggctttggatatgctataaccattggcgtttagagaaagaaaaggttactttgaaggggagggaaaatatctttagaaattctacaatagcactttgtgtgtgtgtgtgtgtatacatatttctgtatgcagtgactacatgtttgcatttgtgtatgcagtaattgcatgtttgtatgtcttctagaagtttgactgaaatggaagaatatgaagaaaaatagcaaaacataatggattaggagctctaaggcagtaaattctgagacatgttatctattttaattggtgcaaactatttactgaaaatatctacattgtgttttgctgtttcatcctttgaaatagtcatagtaagatgcgaatttaaaaaattatgccaactaaactaaaaattgttgtaccataatacttagggtataatttgcggctgcattgcctcaaaatgcatcaaatgctaagtaacttaagtacatgtacattggaaaacaaatttataccatttaaattttttcctaactgaattttccttgaatgttttacgagtctcaattttcttttgagttttcacttgaatgttttatgtctaaagcaaggccacacatttagaattactatgtttaaatattcattaacatttgaaattcctttgcacaaagatgtattctgaacatggttagttgtttgacttgctttgatattgactaacaggtatctaaggagcataaaattcttcttgatcgttctgatgatctgatttaattaattcattaggattttatttttatgttagaccagccgtgattaacaagggctcataattcagaaacttttaccaaaatagtaagacacactggtatatattttgatccaatgtcctgttttgagagtaactatttactgaccaaaattagggctcttaagttacaagtaagaccattataattttcatgtttgctgcttgtgctgatttttattttttaaagttatcaagacattattgtaacttaaagaagtttgaaaaatatgatggtttgtggcaataatctttttttccttttacttatttattaattttttttgagacagggtctcactctgtcccccggctgaagtacagtggtgtagtcatagctcactgcagccttgccctcccaggctcaagcaatcctcccgcctcaacttcctgagtagcctacagggactacaggctcaccccaccatgcgtggctaagttttgtatttttgatacagacagggtttcaccatgttacccaggctggtcaaactcctgggcttaagcaactagcccaccttggcctcccaaagtgatgggattacaggcatgagccaccatgcccagccaagaatcattcttattaccattgctatatttatcattctttagttctctgcaatgcattacacaattcaagtgaggtgccttgacattctctgcatgtttgtataaatgttttcagtactgtagcatttaggggatgctgcagttctccgcagtccacaccaggaccaccttaggctatttgtgcctgacagtgggctgtctctcacactgaagtttcaggaaccagaacttcttgggtgaggttgctgttttggcctgatttctggaagacagtctgtttcagtggcagtctcattaaggagtgcccacaaagtgtttattaatgatgatgataaggtttccaagtgaatttgttcctgttactaagaacccatgaaatttcatttctttcccttccgcctcagtcggaaacagatggtgaaccaaaatttttgcttctaattaaagatttcagtgaggacccaggtaggtgggaaacatttgcagcttcgatctctcttaggaaaacttttcttgctcatcacatcaccctaaatattagtattttgttgttgtttatttatcttgatgattctccagcagtaagtagcacacttaaaaagttcctgttttatgttccctgggctttcgcctccagccttattatctttgacatcaacaatcttggatctgtcagacattgagcatctggtctcaaatataggcagtgaaaggacaaaagccaggtgcactgggacatgttcggtgaatggcatctgtgtctggcacagcaggctgcaaactatcatattactcaggagaggagaaaggttggggttcccaagaatcactgatagaaaactttatccttctgctatgtgttcagagtgaactcatttccactttctggaaatgtgcttttacaagaatgcaggttgcctgtcctgcatgtacatatttatttaaaatgctaaaccactgctgcctcaccttccacatctacatagcttttacctgcagctgcagacactcctgaagactgcatttatgttgtattagtttctgtattctcactactgcacatggtgtctggcgtatctaagagttcgttaagtgtaactgaatatatattactggaatggttattggaatgctgttagtttggctttaaaaatattattttgagggtggggtaagtagaaagagtactgaaccagttaaaattaactttatttattttgaaataattctcacctgcagagctttgaatgtgaagaggttttatatttattttgtgaaaaatgtccaatttgtataaaagtagggaacaatgtaataaattctcatgtatctatcacctagcatctgtaatgatcaaattaagttttatcgatttactcactcccacccccaactcttatttgttttggaagcaaattccagacattatatcatttctatctattagcgctttaggatgtacccctaaaagataaggatgcttaaaaaaatcacttggtttaaacattttctctctagcaatatattttcatgttgctgtgtaacttttggagagcattttctttttttccctgtatcctcttgactgtctactgagaatgatttataaaaccatgttggtattattacttattcctcaaaattaattcaaagattactttttagacaggaagaaaaaatctattgttccatcctggactaaagggtccttgaaaatttcaattttagaattgttttctttgagcgagtcattcagtgtgtttccatagttggacacacgcctattagcactgcccctggagggagtctcacttggggagtatataaataagattgaagtccaaaagccttgtcttcacactgactcgcttgcaaatgaactgttaacaactgtcccactgtccctatgtggttaaaaaaacaactttgcctgggcacagcttttttctctcattgtaaatacagtattttcttacctttcttgttacccttttctttaatcacctatctatgaagttatatttaagaacctttttgatctgctgtgttgtgttgaaaattttaccagtgttagagagcacaatgaatcaaataaggaggcgtggagatgtgagtcagttgtttccattgaatcctaagatacccttggaatgttaccagtgtgttcaatgaaagttattttaaaactttgcatttacgatgtaaactttttaagaagtatagaaactttatacccccattcagcatcaaatttctattgggccgggagcagtggcccacgcctgtaatcccagcactttgggaggccaaggcgggtgaatcacctgaggtcaggagttcgagaccagcctggccaacatagtgaaaccccatctccactaaaaacacaaaaatcagctgggcgtggtggtgggcgcctgtaatcccagctactcaggaagctgaggcaggagaatcacttgaacccaggaggcgaaggttgcagtgagccgagattgcgccattgcactccaggctgggcaacaagagtgaaactccatctcaaaacaacaacaacaacaacaacaaactctattggtcataggaatacatcgtatgttggtggagaactaattgtgcctatttactattgaacagacattttctttctttctttcttttttgtcccagacacatcaactggatcattctgctcattacctgcgcctgaaatttctaatagaaaacaaaatgcagctctatgttccacagcccgaggaagacatctatgagctggtaatgttatgactgttgtccaagcacactttatgggagattatcttcaaattatgagtgttctcgtgttaattgtagttggtggagtggaacgagttcaaaaataaatgagcttcattcatagcccttaagttggtggagatggccctacttagctcagtattccagagtggaatgatcacctttgtttacgcacgaagcagtgcagtgctatcatgacaaatcaaaatctagagctatctcttagatagaactttagtcattattataatactagctttccttgcattggcaatcttttattttattgtattttagtatttttattttgttgtttagagacaggatctcactctgtcaccgaggctggatggagtacagtggtgtgatcatagctcacctcaaccttgaactactgggcttaagtggtcctcctgtgccagcctcctgagtaactggaaccacaggcacgcagctccatggctgacgaacttttattttttaattttttttttttttgtagagacaggatcctgctttgttgcccaggctggtcttgaactcctgggctcaagtgatcctcccacctcagtctcccaaagtgctggaattacaggcgtgagccactgcgcacggccagtcttttattttaattggtgacttaaaaatcagctggttgttgttacagaaaacagtgctaattctaattttgtgtgacatccgtagccatgttgaaactgctggatcaaatcttgttgggtgaaaaaagctgccatctatgtcctagtcttttggaactgtatttatatagcttctcggggacatttacatatatttgagtttgaacatacttatgggactggggttctgaatcagacctgcttactaatcatatggaactagccaagaaaaaaaaatgaaatgctaatacttaatttctaggattttacaaagattagagataatatgcttacttggtaaattacaatggttgttattgcagtaagcccagtgacaagctctttgctctttagcaaagtggtgcgtttgtcagttccaggaaagaaacattttgggagcaaggcgcctctattttggagttcctgtgctctctctgttcttagtcattcctctgggggctctgactgcttgccatggatgtgtgaataacagtgacttcagagagggtttcaccacagaaagcggaactgaacatttaaacccaagtattattctctttttggaaaagggaagcatgatttaaaaatgagtaggaaattgtgtttttagtcaactttattgaggtatactttacatttaaggaaactcttgccaactttaaggacacaatccaatgagttttgacaaatgtatacagtcttgtttccactgctgtgatcatgctttggaacatttctgttatctgaaaagttaccttgtgcccctttaagggcttttaaggaaatgtaagagagcgtgtgcttttgtaacacttatagcacgttatgcaatagaagattatcaaaataatgagcccttttccaactatcacttaaatcagtaactgttctgtgttcagtacatttaacagagagggctgatgtattctttttctggcctggggaaaaggccagtcttggtgctgctgtatgagtaaaggaaagaaaacccttttttcttacttaaaaaagggaagtgctttcctgctaacactagaagagttattagattatatattttgcatcttggggttaatgagtattttgcatcctgaattatagggatcatgcctaaccaggttccatgttcctcatatttttcacataagaggtataggtacttcagacatagtttttgaaattgtatggactcattatttttaagccttgcccattgtgtggtctctttagtctgtttggatctacaatttttgtatgcagatagctatatatgtattttaaaagaatcttaagtacagggagaccatggtattatttcttggcctgttgcagaaggtctccagcccatagatctgtaaggatgcaaatgccacagtcttgcaaaacctctgtttcaaccaaggttcttaattattttgtcctttggatacttttggtagcctggtggagcctccagaccccttctcagaatgatattttcaatcgcgtaaaatagaatacataggcttacctgtgccctaaatatattgaaatagttctcaaaaatattttttgaattattggtaatatatgttcttatttattagcttattaaattataaggcttaataggtagacatagacctaatagctagaccattaaattacaagacctagcagtagatctaatagctaccactgttctgaggtaacgatgagcataaataatattttgagacactagcagcagctaaaacatgatatgaaaataactgtgatttccattcgtgacggagtcacaggcactgctactattactatgtttgttgcctacattcatttaggataaaaggaaatgctgattttcagtttaaggtttgtaaatataaagatatcacttttttttttttctgtgatgaagttttgttctgttgcccagtctggagtgcagtggcgcgatcttggctcactgcaacctctgcctccttggttcaagcaattctcctgcctcagcctcccaagtagctgggaatagagttgcccaccaccacacccagctatcatctagcaaatatttatttagcatttgtatgcctggcactactctagctgttctaggcactggggatacaccaaaacaattctgcttctggtggaacctgtattcaagtttgcagaaacaagtaaaaatacatgtgaatgtgtaatatgtcagggaatgttcaaagcctggagagacaagaagttggggcaagtagagagagggagatggcacatctgcagtgggtcttgttgctattttattttatttattttttgtgtgtttttttttttttttaatgtgatgttcgaacagggtgagtgagtgaagagagggagtggaatcatagaggtattttgcagacaagtgttctaggctggccaggcatggtggctcacgcctgtaatcccagcactttgggaggctgagcaggtggatcccctgaggtcaggagttcgagaccagcttggccaacatgctgaaactccatctctactaaaaatacaaaaattaaccaggcatggtggcacacgcctatggttccagctattcaggaagctgaggcaggagaattgcttgaacccgggaggcggaggttacagggagccaatatcgtgccactgcactccagcctgggtggcaaagccagattctgtctcaaaaaaaaaaaaaaaatgttctaggctgagagaacaaagctggctaaggcctgggcagggggagggtggccatggtggaggtggcttacctggtgtttgaggaggattggcggagagggcacgaaagaggggatgcaggagatggtgggggggagggaaaaaggataggccatgtagagcctaagtgccataggaaaccccagagagaaagggcattgtcggctttgaaaggctcactatggcagatgagtgggcccatagggcatgagaagatgagcagccagggcccatagaaggctgtagagagtcatcgtcaggcaagagcgtgacggtggctcagaccaagccacccaaaggagacagagaaagaaatgatcctgattttgtgagaactcaagagccctaggtaagcaatttttttcttaaaatctggtgatcttctcatccagtttttgaaaacagggaaagttgcaacattattgatttaataaaagaaagggaagatgtgagctatttcatcattaagtgcatttatgtataaaactactgaatttccagatttctagttccagatatcgtggttgcattgaaaatatattttaaagtacaaacgcttcttgagatatagttttagttttgttcactaaacctggctttagtccaaccagcctaaggatgttgtggccagcgggcctgtcttatgatactgagttgttgtctgagaccagcaaaagacacagtgatattcacactaatttcaaagaaaactaggaagtagtattatgaaaatataggaaagattatgcacaaagctctagtcccactagatcctgtggaaatgattaaaacaaacagttatatactgccacctggaggaagggtttggctcttaaagttttaaaaaataaaagtaaggctcctgataagttgaagtgaacgtagttgataacatttccttgagcattttgtggtgttaggttatacattgtaaaccttattgaatttagtatttagagttttggtggctattttctgaatgaaaaagtagtataactgatttcttctcatttgtaaatgtatcagtatgaaacatttctaaagtataacactgaaaccacattcagtcatgcccttgacacgttgcatttggtggaaattgcattaaattgaggtgtttaaaaggatccaagctgtcctgtccacgttcctatcccccacactccttggcattctattatagcaaacgctttctcaggctcctgagtcacaagtattatgctgacctttcaaatgccccaagcaaataaagagaagaaactggccactcttttctacctgcctgaataaaatcgtttctggacgaatggctgtgtggtcagggatacgggcaagtttagataatcatcaagacttctctttagtgctaacggccacgttttttgttattgaccttggctcaaaattggttttcattttaagatagagtaataattttaaaaatctatatgagcatttgacacatctatttgtttgtgagtttttattataaattttggatttgaacctttgactgacctaagagggtaggttccctttgcgttcataccctgtgttccagtgaaggctgatctgggaggcatcgtagtgtagtggaaagaatgcggctctagagccagtgagacctgggttcataatcccagctgtgtatgaactggtcttctgaatttaggaaagtactttctctttaggctcttgcctttatttgtaaaatggacatcacgcttgtctcatggagttagcgtgagaggcgtgacacatggtcagaactctgtaagttattgtcttgatgatagatcttgacataagaaaacgaaatatccggctgggcgcggtggctcacgcctgtaatcccagcactttgggaggctgaggcgggcggatcacgaggtcaggagatcgagactatggtgaaaccctgtctctactaaaaatacaaaaaaaaaaaaaaagccgggcgcggtggcgggcgcctgtagtcccagctactcggtaggctgaggcaggacaatggcgtgaacctgggaggcggaacttgcagtgagccgagatcacaccgctgcactccagcctgggcgacagagcgagactccgtctcaaaaaaaaaaaaaagaaaaaagaaaatgaaatattgattaatttaaacaacatttatgatgtgtgaactctgcatcattcttatcttgactttgtacaaagctctttttccagccttttttgtttaaaaaattttttaaataattttaactcttattttagattcaaggggcacatgtgcaggtttgttacctgagtatatcgcatgatgctgaggtttagggtactgttgatcctgtcacctaggtagtaagcctagtgcccagcagttagtctcacaacccttgtcctcctcctgccttccccctctggtagtccccagtatctattgttgccatttttatgtccatgagtactcattgtttagcccctagttgtaagtgagaaggtatttggttttctgttcctgtgttaattcacgtaggataatggcttccagctgcatccatgttgctgtaaagaacatgattttgttctttttcatggctacatagtattctgtggtatacatgtaccacattttctttatccaatccaccctggatgggcatatagattgattccacatctttgctattgtgaatagtgctgcaatgaacatacagtgcacgtgtctttttggtagaatgatttattttcttttggatgtataccaagtaatgggattgctgcgtcaagcggtagttctaagttctttgagaagtctccaaactgctttccacagtggctgaactaatttacattcccaacaacagtgtataagtgtttccttctcagccgggcatggtggctcatgcctgtaattcctgcactttgggaggctgaggtgggcggatcatttgaggtcagagtttgagaccagcctgtccaacatggcaaaaccccatctccactaaaaatacaaaaaaaaaaaaaattagccagatgtggtagcaaacgcctgtaatcccagctactcaggaggctgaggcaggagaattgcttgaacctgggagatggaggctgcagtgagccgagatcgcgccactgcactccagcctgggcaacagagcaacactccgtgtgaaaaaaaaaaaaaagaaaaaagaaaagaaaagcattcccttctctctgcagcctcaccaacatttgttgttttttgactttttagtaatagccattctgattggtgtgagatggtatctcattgtggttttggtttacatttctctgataattagcgatgtgtacattttttcatatatttattggccacatatatgtcttatcttgagaagtgcccgttcatgtcttttgcccattttttgatgagattattcactttttgctgatttaagttccttatagtttctggatattacagctttgtcagatgcacagtttggaaatattttctcccatactgtagattgtctgtttattgacagtttctttttctgtgcagaagctctttagtttaattaggtcccacttttccattttcatttttgttgcagttgcttttgaggacttagtcataagttatttcctttcttgggcttttagaaggctgattaatttgtgtacttcagttttctagctaatttcgatacagttcagtggctaaaaaaaagaatatcctcctttacgtaatttgttttctgtttcaatgctatcatttgtctctacttatttgtactatgatgaactttttgaatggaagcatagagatttatcttatttccatgaattccataccaagatctttataacctcttcttgattttaataaactttttctccccacaactagagatctccattactttagcattatttttcaggtctgtgatagacattgggtaggaatagacagacagagtgatgtggaggaattacttagaaaccaaactgtggctatgtttgaggacgacagctggaagtttttacttttactttttacttttaatgagtttcgtttaatgataagattgtgaagtgcaaattcacgtaagtatcaattgtgaaaaaatagatttatgaaatgatgaccatttttaaaagttagttataatgaaattctaattagattcccctttgtaactttcagctgtacaaagaaattgaaatctgtccaaaagtcactcagagcatccacattgagaagtcagatacagctgctgatacttacggtaagtttatttttctttgtttgtgttttaaggtaaagtatttcttatgtaagcatgcatttatttacagttcaacaaaatgcctttgagtcctatctaaaacagatagtatatctggctcctgctctgtggagggcagccacactagggaataacagggatatttactctgggtacgatgtagactttggtgttaaatttcataactttaattactgggattctactgtcctaaaaaggaagtgggtagcttattttatatgtcaaaagataaaattacaacaagtttagttataaatctgactggcttttatttgtgattcatgcatgggatagcctccattctacaaaatagaatgagagctccctctgggcagtggcagaacagtgatgtttgtaagttggcgacaaggaaacagaacagtggaagaagaaaactgattgtttaacttagcttacttcaggttacttttttgtaagggttaaagcagaggggacctacttattttgttgactcaggtagaccggaatctcatgttttcaggaaaaactggtctgtttggggatctacttgcttcctgaaagttttagtttgattatgtggcatccagcatgagtgattccatttttatttgatctggcctttcgggcataatgcaggaactcagttcacaacaatgacctcccataatttttgtttaacatatactatgatgtaccttagtaatgtaggaattattcttttacaccccctcccgaaaactataaattttgagaaatctcaaaataagtaagccattatcctacattatcctcccttcccatacaaataatgttaaaggaactattttggtggtgtgtaggggggtccccaagaccatccctaggtttgctgattcactaggaagacccacagagctcagcctctggtcatactcacaactatgatttttttaatagcaaattatactgaagcggcttcgttgtcttgggtaaatacccacggttcgttgtctcatgccaagggaatcgaggatgcggacacacaagaagtgggtttaggagtagaggtttaacaggcaaaaaaaaagagaaaggagaatagctctctctcctgcagagagagaggggtgcccgagtgggtcttccggccagcggcggaatgcactggatttgtatagccaggcttgaggaggcggtgtctgatttacataaggcccacagattgtttggaccaggtgtgaggtctacacagcacgcatggaagctggctgccctatcctaatctttattatgcaaatggagtctttgcctggcgggggccatgttcactgcttcttactgtacgcatggctgacaaagagaagagaggatggagccgccattttgaacatgcttagtcccagctagcttttcccgattcacactgccggcactcaccggtgtaagcttccagcttgcttgtctgtgtgtgcagcttgattttacaggctgctttttgttacaaaaaaaaattatttgggggttgcttttcattaaaaggaaaatgttactgaggattttcttctcctcgctctctgcctaaatcatttcatcttaactcctgtatcaacacaaagcaaaatcagcaaagggaaaaggcgcatggagtgaagtctaggggaaaccaggtgtgagcttcagcgggccctgtttcagtggagtcacgtagaatgaggataactcctgcagcaccaagttgtgaggacacctgagaaatgctctctcctagggaaggtggttagagagtcagtgcccagggcttttctggggaggctggttccctaggcaccctctgcctagcatgcaccaaaattccagactcccaggaggaaagtaggcgttcaccataaatcccattgtttgtaccacagtttaggcactgtgagccactcagggtgttgggaaccctcccaaaatccaagttctcaggataccagccaaggttcaaatttgtaagcgggcctttcgaagaatagcagtcatgcctgctgtgttaacgctttcctatgcggttgtctacattctggcggagttaaatatatattcctttccatatgtttaagaccagtcttctttacttagcattacactgtatggcttgaatagtaacagagttggtgcctgagtaaattaagtgaggaaaatccatgctgtgctgtatcagtcaggagtggcgaggttagctgaggtaacagacagccaccaaagcccggtggctcgaaacagtgacatttatttctcacattcaccacgcgtcccttgtgggttggctgggactccatacgttgtcctcattccacacccaggtctggagcagctgccacctgggacagtgcttgtcactctgcagagggggaaggggagatgggaaagcaggtgttgtcccactcccaattcattggccaaagcaagtcacacagccatacctacctacgagggagcactgaagtgtgattctactgtttggtagaaggagaacaaagttcccggtggaaagacataaagactacctcatatgctcgcttaagatttctctctgaatcaagttattaagctgtcttttttttttttaagacacagtttccctctgtcgcccaggctgaagtgcagtggcgcgatctcagctcactccaacctctgcctcccaggttcaagtgattctcctgcttcccaagtagctgggattacaggcgtgtgccaccatgcctggctaatttttgtacttttagaagagacgggtttcaccgtgttggccagggtggtcttgaactcctgacctcaactgatccacccacctcggcctcccaaagtgctgggattacaggcatgagccactgtgcctggcccaggttattaagctttttagcatttgaaaatctttaaaactcttttctgagcactgggatattacattccttctgcaccttcccctgtaggccaccagtcttcatctcggaatactcaatagaggatttgggcctaatgaagagaatccagttttgaaccctggccacttgcgttataactttatgctgtttatttcttgaccttaaaactaaagacataataaagccaggagaatgtttctcatggcaaggaataaatgtttatgagcggcttattatgcagcaaaaagccgacctcagtaattagagctgtaattggtagcagtgaagtgcctggatcctccaaaattagatgctccataatgattattctttttctcttcagtttacttaatttttgttgagtaaggataaactagcaaagatcaagttcagaaggctgaatttcaaagctcttggactctgcttctaagattgagtgattcagggactcagaaattggaactgggcatgaaactgctaccgtttgtatacattttaatactttttgttaaagtcactgaattactcacagaacccatttacttttaccccctgaggagggtatgacagggcaccaggcgtcagtcttgagagtgttacaaacagtgcttcccaactcatccgatgtaaagaagcaggtattttgttttgttttaatttccactcttttgtgaccactgctgcttttgtgaaatacaaaatcccatgcttggaggttgtggcaatgtcaaagctacaagaggttctcaatgcttagtcttgatttctgtcctgacattactgccattagcaaacagttggcacctgttccctgacttcactttgaaaagccctgccacaggctggacacagagggtcacacctgtaatcccagcattttgggaggccgaggtgggcagatcatgaggtcaagagattgagaccatcctggccaacatggtgaaaccccatctctactaaagataaaaaaattagacgggcttggtgacacacacctgtagtcccaggtactcgggaggcaggagaatcacttgaacctgggaggcagaggttgcagtgagctgagattgtgccactgcactcccgcctggtgacagagtgagactctgtctcaaagaaaaaaaaaagaaaagaaaagcctgccactcatggctaataagctcagttaaatcatttcttctccgtgctcgggttggttttggcatttgatgttccagcagcgtattgattgaagaggtgaaacattcccccagtcctcagagatctgattgcctctggattaaaagctaccgcagagtcgaaattcagcccatctgtatctaatattaacacctagctaagtggcttctggttagatactgagttcagtacaagtaaaagctgccggcacaaacacagaaacacctcacaatacagatcatatgctgctttctattttagaacactttagggaggagaatataatttaataatccaactgactgaacacacttaaagcgggaacatttacttaatttctctctcttgcctctctctccatctcagccctcagctcactcccacactttactgttgaaattagttcacatatccagttacatgatacttagactaagcatgagaccctcggctgccttgaagtagaaggatgcgtcatttcagcaacttaatgttccttttctctgggtacttctagtactattatattttttagtcgtgtgttctcctcatgttataggtgcctgtgcttgttatctgaattttcattgtatcctggactctagttttgagtaattctctattgtttatcatgttatggtttttctaggttgaggaatcttttggtggttcatctcatgagtttgttcttagtttcttttttgagacagggtcttactctgtcgcccaggctggaatgcagtggtgggatcatgactccctgcagcctcaacctcctagactcaagccatccttcccacctcagcctcccaagtagctgggactacaaggcacgtgccaccatgcccagctaattttttaaaaaaaattttgtagagacagggtctcactgtgttgccagggctggtctcaaactcctgggctcatgctttcctcccgcctcagccttccaagagtgctgggattataggcatgagccaccacgcccgaccttagtttcatcacttaattttaagcacttccttcgttctcctgatcattattccagttgccactcatgatcccttcctgtatttgaagctaacagccttccagttggtggatacataggtttatattgaataatttccctctgccccctgttggcaatcattttggacgatattagagttgtctgctgagagttagaacattgctgtcctatttaaaagaaatagatctgactttgctgattaactgttaaaatcattatgttcttcattcagttccacataatccagctgtaggatatttcataattttctttatatttgttcatgtagaagatggttataaggttttcccccagtgtgcaaagtattggcatctttaaatggaagccgctcacatgtttgttgcaaggcaaggtgtggggagggctgcctacctggaacagtgaaaggggctcctgtttgacccctaaactggtgtccaatatgaattccagtacagagctaatgtgctattcacttttgtaaatttttggctttcatttgggtgatcttcaaagaaggaacttatgcccattatcgtttcttccatcctctttcctatcatagagatttccccactaattagagatgtctgatctgtttctcagacctagtctttttacccagttgtctggtacaaattacataatcaattgcagtcctcagactggaagtctcctctatttaaccttttgattatacaaaaagaggaccaagaaaagagggaatggctgggtgtgatggctcacacctgtaatcccagcactttgggaagccgaggcaggtggatcacttgaagtcaggagtttgagaccagtctggccagcatgacggaaccccatctctaccaaaattagaaaaattagctgagtgtggtggtgtgtgcctgtaatcccagctactagggaggctgaggtaggagaatcgctttaacctgggaggcagaggttgtagtgagctgagatcgcaccactccactccagcctagacaacagaatgagactccatctcaaaaaaaaaaaaaaaaaaaaaaaaaaaagagggaatggagcaaatcatacctgaggtgtctccatgtctccatctaattggcttcaggtgacttgcagcaggctgtcaccatgttgcctctcctgccatcttccagttaagcaaaggtgtttcctggtaccccacaggggtgctaattttttaatagaaaaaaaactggggccaggctcagtagtgaaagcctgtaatcccaacactgtgagaggctgaggtgggaggatcgcatgaggccaggagtttgagaccagcctgggcaacatagtaagaccccatctctaaaaaaaattaaaaaatcagtcaagcatggtagcactcacatgtagtcccaggtcttctggtagatgaggtagggaattgtctgaatccaggagtttgaagctacaatgagctatgatcacaccactgcattccagcctgggggacagagcaagaccctgtctctttaataacaaacaaacaaaaaaattggtctcagaatgtagtagaatgatggcatttcaaaaaggaaattccaatagttagatgaatcctattcattctttcctatgacgtagcccttgattctatctcgcctaatagatttttttttaatttccactaaaatgcagataaatacacctgtgttaaggctaatgtaacttaaatggttcttgtgtaaaaatattttgatttcagcagggcttcttgacacttaatctgaaagttagaagttgctgaaagaagagaatttaaaataagagaatgaaatgaagactttggaaagtcctcacgggtggccctctgctgttccctatctgagggtgttacggtacttgagagggcgatggcaattagcctttttgcctatgtgaggttatccatttcctggtcctgtaaactaaacaaaaaaccatgtgttcatcatgacatggcctaaaaaggctcaatgactccctggaacccaatcttacaaaattctgttttgctatttgcctgcttgtttttttttcaaccactgctctcccctcagcattacgatgggtatctatattatgggatgatttttttcccagagctgaaattattgcagatatatacaatgacatgtgttccccttgccctttttagaaatatctgcaaaggtatttctttcccttagcaaagtaggtattcactgtggacattcaaagtaattgattaggaaagagttttacatgaggcggtctggaaacaggagtgaccaggacttgtaaccatagagttttgagtacctaggatcctcaagccacgtagaatacctcggcctcactctgctttcctctctgaagtatgtagcagagcccagggttaattagcaagttggctttgagctctgggagcccagagaagtataagataatcttatgatcagatactgctagagtgtgaaatcaggtacagtttctgtaatgtgtaattcacattacagattcgtaatgtgagttgcatcttgctcctgtttgcagaattgtattaaagcagtgtccatatagtcatacatatggatgaacacacaccctccaacagtacagttgttaacatattctaggacatagatttgatgaaaaacgtctggggactttgaggtaagctaatctttctgttttctgctttggaggagagtatggaaaagaaaaaatgatggcgtttaccaggaagcaagattaaacaaaataatttgctttcctttgagttgattggtaggtaatatgaagatagacgtacatagtaatctttatttttacaagtagtgacttccagagtgatctaaaaatacacttttctgctatgtaaaacaagaaaaaacaatcagtccaaactataatgacaaacatgaaacatacctagttcacagcaggcacttcctgttgtttgctaaacattcagaaggtgtgagccctgccattctgtctttttgtgtttcacagggttttcactttcttctgtggaagaagatggtattcgaaggctgtacgtgaatagtgtgaaggaaaccggtttagcttccaagaaaggtaagtcagtgaaggagggctggtctgtctgtcttaaatgccctttggggcttctctagtttttgaaggagaaagatatgcccaaaggattcatttgtggaaagtatttgaacattttctcattgaaaacccttccagggaatatgcattttattccattaacttaagtgtaccagaaaggtcatattcttgaactttttttttctttttttaatttttagagacaaggtcttgctctatcacccaggctggagtccagtggcgcaatcataggtcactgtagcatcgaaatcctgggctcaagccaccctctcacctcagccccccaggtcgctaggggagtacaggtgcatgccaccacacctgactaatttatttacttatttatttttcagagtcaggggtcttgctgtgttgccccggctgttcttgagctcctgggctcaagcgatcctcctgtctcagcctctcaagtcactcatttttggattttaaactgattgagcccattaccctggggctggtgggaaattccattctaatcatgtggtcgtccttctccatcttctaggatggtgtggggatcctgggggggttcttcctggagcagagcatgggggaagacccctctgtactttggtccacactggtcaaagctgacattggctattgcctgagcctgcagagctctttcaaaccagttgttctgttgcttccgttcatagaagaatctgcgaaagttgagaacctagggatttgagatccagcctccctccccttctttagagagcgcttccccgctacatcctgcctgtttcattttagcccttaaatggcctataatgcatttgggctacttggggaaccccaactcttcatcctttttctacccctggaaagtctttgcaacctagatgatttgctcacagtgctaatttcttagagctactgtaataaactgttacacactgggtggcttaaaataacagaaatttatcctctcgccgtttaggaggccagaagtctgaaattaaggtattggcaagattgatttctctgaagcctctgagggaagaatggcttcatgcctccttctggtttctggtgtgaaagcagcacttggcattctgtggcttatggctgtatcactccaatctctgcctgaagtcacatggcttctgccctgtgtgtgtctctgtgtcattaacatggctttcttataagaacaccagtcattggatttaggacctacactaaatcattgtgagttcattgtaactttcgtgtgtaatagtatataattatgtgtaattattatataattataatgatgatattgtaattattataatataattatcatataatgatatataatatattaatataatatatagctatatgatatataatatattatattaatatataatatattatattaatatataatatataatggcataatatattatattagcatattatatataaatatataagcatataatatataaatatagaatatattaatacattatataataatcgttaatataattatatataattatataacataattatatataattatatagcataattatatataattatgatgtgcaattattatataattacaatgattatattattacaatttcatctgtgatatatatctatccctatttccaaagaaggttgcattctgacattctaggtggacagggactctattcgacccactatactcgctgtaaataaatgggacaggtaggtagggctggaaatccacctttgtttctttcttcttgctatgggatttgtagtttcatccaagaagtggcaaaataatatgtattgaacgtcagagatcaacacatccagatcaactgtgcttagatgtacttaccttgcatctgttgtgttaactactgctgaatggagcagagaagggaaattgagtgctgatcttcgccactgccttttttgtcctggttcagctgagttctgggtagttcatggcttgcaaagctacctgtgcaggttatattgacctgtcctgtaaacactggaaaagcacaaccgcggacttggctatgcatggaaaggcaaaggtgtgacgagtgagaaataaagtcaggataatttatctgctgctgactgtcacagaggagcattttccttcttgttccttctatactttctaggccataggcagcctggggccagagtttgacccagtcactgagctgtatctcagctaagagcagagatgacaggatttcttccccttcaagcccaaagactgatttttatctctttcatcacaacgagtgtgccggtttgcgtggcacgggggtggggaatctactgctctggtttcagtcacatcctgttttaggtctttgaatctgagagccctggtgttaaatgaagatgaacggtcatctgtactaacccccttgctctgttctcaacagatgcaagagtgatgtccattctgtcctcctggtccacaaacacgatcccaacacctggcgtgtctagaaagatattgggggtattttatgttaaatttagctgtgaattggccgggcacggtggctcacacctgtaatcccagcactttgggaggccaaggtgggcggatcacctgaggtgaggagttccagaccagcctggctaacatggtgaaaccctgtctctactaaaaatacaaaaattagctgggcatggtggtgcgcacctataatcctagctacatgggaggctgaggcaggagaatcactcgaaccggggaggcagaggttgcagtgaactgagatcgcgccattgaactcaagcctggacaacaagagcaaaaccccgtctcaaaaacaaaacaaaacaaaaattagccagacatggtagcacatgactgtagtcccacctactcagaagaatgggagaacccgggagacagatgttgcagtgagccaagatcgtgccactgcactccagcctgggcaacagagtgagacttcgtctcagaaaaaataaataaataaaaattttaaaaaatttggatcacctgaggtcagcagaccagcctggccaacatggtgaaaccccgtccctactgaaaatacaaaaaatagctgggcgtggtggtgagtgcctgtaatcccagctacttgggaggctgaggcaggagaatcgcttgaacctgggaggcagaggttgcagtgagccaagatcgcaccactgcacttcagcctgggcaacagagtgagactccgtctcaaaaaaaaaaaaaaaatgatttcagatattttagaaacctgaataaggatgtccagggcatgtgactctgtgaagctgggaagcgagaacttctttgtagggtcattttctgcagaatctgagtgggatgcccgagggcctgggaggcttctcgttcctgcaatttatctttgcctgcccttcgctcactccctttttcaagttggtttttccatattggtgtataaaattagaaattgggctccttttctctccctagctgaaaggattattttattttctttcatgttcttcccaccctctccatttctcaggctgctggaatgttcttccagtgcgagtttgaactgcaccttggtgtctcaacttgctgttcttctaggttgggcttgttcatggtcgttcccttgggtcccaaattttggcaattcccctagcagatcctttggggatctaccaaaagagattcatcccaaggttcagatgtagtttgaaaacaaaacaaaaaaggacaaaatgattgcattgggttcttgaaactgtcatctctaagtgtatttggaatgagacattcttacttctgtcctcatagccagagtgaacgccctgcattttggttccttggaaataatcaatagatattagctggctgtgacttaagtgtgcactgaggcatgaacatgtacaaaacacagtgatggcagtcatcagagagcactgccattccccgctcgccccgccccaaaagtgtaggaagataaccggaattaattagcatttgtgagaaatttgcagatgcttggaacacacaaattaatgaaggagtaagtttgtttgcttgatgtatgaaggaccagctaggcatgttgtaacctgcaaatctagaaccttcagaacctgaggcccctgtcctctcctgaggatcactcccgagcaccgcagcctgtctgcagcagcacctggggctgtgagacccacagcaggtgtgccctttatagcagagctcctaagctgttgtgttctgataatgtgtgtgaaattaaaaattttccatcttgcgttggcaggcctgaaagcaggagatgagattcttgagatcaataatcgtgctgctgacgccctgaactcttctatgctcaaagatttcctctcacagccctcgctgggcctcctggtgaggacctaccccgagctggaggaaggagtggagctgctggaaagcccgccccaccgagtggacggccctgccgaccttggcgagagccccctcgcctttctcaccagcaacccaggtatggctgtgcagggtgctgggggcgagtctgaactccgttgtgccacgacccggggagtttatcatgcggcttgtgtgtttcagtgagtgcctctgtctggcaggtggtataaaatgtgtgtgcaagatgggctgatgactggccctgcatttcctgttgaaatttcaaaggcgcagggaactttattttctcatagagctgttttgctacagatccacctgtcacccatgggcagctttataatgcttctgctgtttctcattttggggaaaggtgaatatttagaagactttgctgtggatagagatacagaggcacagaagtgttgggaattgggccacgtgtggtggctcgcacctgtaatcccagcacttgggaggtggaagcaggaggataccttgaggtcaggagtttgagaccagcctgggcaacataacgagactctatctctccaaaaaaaaaaaaatgagctgggcatagtggagagcatctgtagttccagctacttgggaggctgagtcaggaggatcgcttgggcccaggagtttgaggctgcagtaagctgtgattgcactgctgcattccagcctgggagacagaggcctgtctcgtaaaaaaaaaaaaaaaaaaaaaaaaaaaaaaaaaaaaaaaaaaaaaaaaagaagaagaagaagaagaagtgctgggaatcacataagatgctgagactaagtcctacctctgttcctgccttctctatcgtcatcttccaaaccaccactcagccctgctttcctgctgtctgagagaaggacgtgagctgagatgctgagaggcccagagtggaaatgtgtgcagagctctgtttgtcttttggactttttcaacctgaagactgaacccgagcgcttcagtgacccccctgccctgcccttccttcctctccccgctccttctggcaacctgtgctcattctactagaagcagcgtgagtgccacctgcctttcgaagtcttcctgggaccccatagagttagctctctcctctgggcccccacaaccctgcaaatttgacttccatatgggccctcattagatcatgcgattcttacttgcttgtgtctctcttttcgcctaaatgtgtttcctgagactgggtttatattcctcatttttgtcttcccggctctttacatgtggtttgctacatgggtggccctttcttgttcagcaagagagtgagtgagtgatggaacagatgaacagcatagattactatcatttatttctccatgaccgggttctcgggtttgggttgatttagtaagttggggttttgtcattattttctcttttcaaagcttgggatacaaaaggagcgttctgttcaaaatctgaaatggaaggctcttgggtagttggatattcttgccctgctattgttgtttttcaaatcattttctgaagcttggcttgctaaggaagttggacccctcattcttttgtccattggctccttggaagattttgacaagttgaagcttcagaaaattgattgctctcagttacagttgacttccttgactcattatgttattgtggtccccacatcccaatcaaatttttgaaaagtggctccagtgagttgtgtacccttagtaaaggagaatgaagactataaaggctgttatttcatgtgaccacaagatggcaggatcgatcccataaaacggttcacagatagagttgtttctggaatatgactttgaatgagacatattatgttagattagattatttaaaggattttataagcttgcacatatgtgctataagcaacagtgtgtactcaactttctttggatttttttcttctgtctgagcccttcttctgggttacagatataaaaaaaaaaagaggtgggtaaactataatccataggctaaaagcagcccaccacctgtttttgtaaataaagttttattggaacacagtcatgccattcatttacaccttgtctctggctgttttccttctgtaatggcagagttgagtcgttgtgacaaggacttagggtctacaaagccaaaagtgtttactctatggccctttacacatcaaattcgctgtccctgatgtaaagtatgactgagattgctcacaatttgtttttttaaggatagacacggttaatgttttcgtctatttctttcttcttttttaaaaaaagtctaccgggcgcagtggctcacacctgtaatcccagcactttgggaggccaaggcaggcggatcacctgaggtcaggaatttgagaccagcctggccaacatggtgaaacaccacctctgttaaaaatacaaaaattagccatccgtggtggcaggcgcctgtaatcccagctactcgggaggctgaggcaaaagaatcgcttgaacccgggaggcagaggttgcagtgagctgagattgcaccactgcacttcagcctgggcgacagagcaagattccgtctcaaaaaaaaaaaaaaaaaaaaatctgtgtatgtatatgtacgtgtacgtgtgtttgcttaaaaatctattaaaatacatttaatagagtttaaaatgcattgaataaatcttgaaatgcatttaaaagatttttaaaatgcattttatatatatctattttagaaatatctgagtatttctgtgtatacagttgctgtctggtcttttgtgtggtggagttttaaactaaacaactggactttacaactgaccacgttacctccttcagaccgctcacctttggaggctgtgcgctaaatccatggaccctgccattattttaaaacacattaaaactgcaattttgggatcatctttggaaggttttttttttttttcaattaagcggccataactcggagctgatattttttaagtatttactatgtgccaggcatggagctgaaagtttgataataactatgactcaaattttgtcctccagtttatgttttaatgtagtttttcattttttcattgctttatcttttttttttgaaacgaagttgcggtcttgttgcccaggctggagtgcaatggcgccatcttggctcactgcaacctccgcctcctgggtccaagcgattctcctgcctcagcctcttgagtagctgggattataggcacctgccacctcgcctggctaatttttgtgtttttagtagagatggggtttcaccatgttggttaggctggtctcgaactcccgaaatcgggtgatctgcccgcctcggcctcccaaagagctgggattacaggaatgagccactgtgtgcggccacattgctttatttcttaaaattttgtagttttacaatcatcaaaaatccttcaggctgggtgtggtggctcacgcctgtaatcccagcactttgggaggccagggtgggcggatcacctgaggtcgggagttcgagaccagcctgaccaacatggagaaaccccgtctctactaaaaatacaaaattagccaggcatggtggcacatgcctgtaatcccagctactagggaggctgaggcggcagaatcgcttgaacccaggaggcagaggttgcggtgagccaagattgtgccattgcactccagtctgggcaacaagagcgaaactccatcaaaaaagaaaaatcctccagaacagagtctgctttgtcaagttaggtaatcagactgactcaggaataaagcatggaagtaaagccactgtattgttttgttgtttttgtttttggtaaagtttctaaactggcttcaaaattagtaaatttcagaagaattcctggccgggctcagtggctcgcgcctgtaatcccagcacttcgggaggccgaggcaggcagatcacgaggtcaggagatcgagaccatcctggctaacacagtgaaaccccgtctctactaaaaatacaaaaaattagctgggcaaggtggcgggtgcctgtagtcccagctactcggcagactgaggcaggagaatggcgtgaaccccgggggcagagcctgcagtgagccgagatcacaccactgcactccagcctgggcgatagcgagactccgtctcaaaaaaaaaaaaaaaaaaaaaaagaattcctgaatacttggtcaagtagcagcccaattggacctgctggtggagagaaggcatttcacttccccacctgggtctctgcctatctgccttctgattgcttctgcttcctagtccccacttaacagtggaagataaaagtggaggcaaataaacaggataaaataactgaaagattgctctgtgatggggcagagataaagcagtatcagcagaccactgcagttaaaatagaaaacaaccgagaaaattttgtacaacgggcaggatggactacagccttagtctaaatttagaagtaacaaaaataggaaacatcctgagtggcaggtttgaggtttgatgggagtaagttaaggtggatgattggtgtcctcgacagagagccttgctgggtctcagggaccttggggtccacgtgagtgctggctgctacctggctgctggaggcttgtcctgcagagctccacagtctcacaaactcaagtggtcagacttggccaggtcctcccttaaggaccctgagtgagtatgggattagctttcaaagttggattatttctgaactgctttctcatagagaggtttgtttcttctatgtagaagcatcacagcctagtggcgaagattagggcctggaaccaagttatttggaacttagtccatttctttggaactcagtcattggtgggggggacagagtctcactctgtcacccagcctggagtgcagtggcaggatcttggctcactgcaacctctgcctcccaggttcaagtgattctcctgcctcagcctcccaaatagccgggattacaggcatccgccaccacgcccggctaaattttgtatttttagtagagacagggtttcaccatgttggccaggctggtctcgaactcctggcctcaggtgatccacctgcctcaccctccgaaagtgcagggattataggcatgagccaccatgcctggccagaaatcagtccatttctatgttcatcagcttcatgaccttgacctggtcatgcttaatccctctgtgcctcagtgtcctcacctgcaaaatggggataatgccacactgtcatctcattgggctgttgtgaggaccaaatgaggcataaaagtaaagcatttagaatattacccagtaagcgctcaataaatgttttgtacctgaagccattctcttatgggggacatgaggattccctggcctatgaccagagattgctctttttcagtattctccctgccttctacgccacctcagtctgcaacaggtgaattacctgataactaagtttgtgaattacagcttgttcatattttcctttctcgagtagaaagaactgaatgctgtagtctagaatgctgaggttcctgggccctttttcagagctcatgagtcacctagtgtgggatggggtctgggtctgcatttgttccggtggttgcttctaatgtccagccctggttgggagccactgccttaggtcaccaactcttcctggttactgctccctgtcctttttcttgtcttggtggaatcataagataattggaattttacggtgacatgcaaaccttctatagtttcttgatcacattttgtgatctgcttcattgagatttttttgtaatgaaaatttgttaggtggtcctgtagtacattctccattctcccgttccttggtttacgagggaagcctgctgaatgggttgccacgttggcttagaaagccaggatctgcataaggagagtctatgctgagtgttctctgtaagactcagtttcctatccttggctgtttgccatccctgagttctggttgcagtcttactggagctactttcatctgttttggttttttttttaagcatttgttttcatacatattggtaggaaaaaaagggaaggatgtctaggacaaaaagatagttccttcagtggctgtttttataaaaagatcttagcagtgaaggggaagctagaataggaagttgcagaactgtatttgtatgaggtttcaaaaaagtctctcttgtgttcttgtgtgatttattttgaatactgatcttatctagcaatattaacaatctgggctaggtaatgctttgctgtggggagctgtcctgtgtgttgatgtttagcagtacccctgcaagccactacgagacaatagtacgccacctccccaagttgtgcccatcaaacatatcttcagacattgccaaaaggccactgggcagccaaatcttacccagttgagaactactggcctaatttattaaaaggtatagctctatcacccttttagggaaatgttgcagggaacatcaatataggaaagcaaagcaaatctagatgtaaaacagttcttaaaaaaaagttttataggccgggcgcagtggctcacacctgtcatcccagcactttgggaggccgaggcaggtggatcacctaaggtcaggagttccagaccagcctgaccgacatggtggaaccccgtctctactaaacatacaaaaattagctgggcgtggtggcgggcgcctgtaatcccagctgcttgggaggctgaggcaggagactctcttgaacctgggaggcagaggttgctgtgagccaagatcgtaccattgcattccagcctgggcgacagagggagactccgtctcaaaaaaaaaagttttataaagcatttattgagagaattccaacacaaatccccatttatggccttgtttttcctttttacatcaagaagaaagccaagaaaaaataaatggaattatgtaacagtaattatgcaaaacctcagcttttatgcaaattataagaatcatagttgaagtgacaccattagtgtctttccgaagtttcaaacgcctgtttctctctctctttgggttcacgttcactttatttttgtggtttatacagctgtgctgtgattgtccctagaattccacttgaccagttggggcgaagcaggtgccttggtttacctcagtgagtagcccacaggattacaataaaagtgccagaggccaagcgttcgttgtggctcacacgtgtaatcccaccactttgggaggctgaggcgggaggattacttgagctcaggagtttgagaccagcttgggcaacatagtgagaccttgtctctactaaaaatttaaaaattagccaggcgtggtggtgtgcaccggtagtcccagctactcaggcagctgaagcaggaggatcacttgagcacagaaggttgaggctgcagagatccttgatcataccactacacacagcctgtgagacaagcaagaccctatctctaaaaaagaaagtaacaggctgggcacgatggctcacgcctgtaatcccagcacgttgggaggctgagggtggatcaccagaagtcaggagttcaagaccagcctggccaacacagtgaaaccctgtctctactaaaagtacacaaaattagctgggagtggtggcaggtgcctgtaatcccagctactcaggaggctgaggcaggagaattgcttgaacccgggaggtggaggttgcagtgagccgggatcgcaccactgcgctctagcctggacaacaagagcgaaactctctctcaaaaaaagaaaaagagaaaaaaggtaacaattttaaaaataataaaagttccagcgttccaagagctgcttcttgttcaaaaaatggttattcctgctgtggtgttggagaaagccaagtgcgtgtggctaacagcaggcctatggcatgttaaaggcaattagggccagcgctggagttgcagagtcagatcctttgataaacctcaggcgtgtctgtctgatgccaagtggaagcttgtgctctgcagtccagaccagtgtccctcctgcaggaagtagattaagcagcgtttgttgaacaggaaaggcctctgtgatagccgtgaaagtcgaaggcaccttgcttcagagagaggaattgccaagtgctgagcacggacagccgcttggtctgcatgggcaggacgtgcctctgtgcagtacccgtgaagtgtgaggttctattttggtctgatgttccatggagatggcctggagctcgattctgaaaaccgaagacagtcaggcggcagggaggggcggcaaaggaagaggaactgcacagatttctcttcccacaaacaaatatggtccagggcttcagattctctgaagtctcacagatacccggcagcacatggtcctctgtttgtttgtcgataacatttggagacacgcgcgcctcgtaaactgtcggcctgctgtgcttcttgtcacacagcacatggcctgcctgcgtgggccctgctatggccgggggcggggtaacttccagtgagatttgactgatgacaccgtcaaatcctgcgtgtgaaaaaacatgtttcggagactgagatgctctattttgatatttttaaagattgttaatgtatatttgactttcacaacaagctaacaggattagtaagtttttatggatttttaaatttctataggaaacaaagactgagattttgtgacatttgactaaaaagaagttactattttaaatctacagttttaatggaattttaaatttctctttataggaaacaaaaactgagattttgtgacatttgattaaaaaggagttattatttgtctaccaagttcaaattgtaacattcctttctttctttcttttcttttctctctctctctctctctctttctctcgctctctctttctttcttgctttgttttttagctttgttggaggggtgagtgtttatgctgatgttattatgggtatttatatggaattcttaaaatcttataacagtaaaatgactgaaacgcaaaataaaattatatcctaacagttgagttccagctaaatatctttattgacagtgtttaagctttcttttgcccccacccccaaacgttttttttccatcagggatttaaactcaggcattaaaaagaccttttaaaagtttcgtgttgtaattgtttctctttgtcaatgtttgaattggagggtctgcttagagcacattgttaagacatctcacgaggccagaattttttttcttcctccttaagcttaagtcccacatggacttgaatgaaaccaaagtagatgtgtgtaatctgggtaaatgaaaggtaaatctcaatgtaaactgcactaatatgtttgtacttccccaaatctcctcgttgtctgtcctgttgatggtgcgtcagaggtactgattgcaaacgtttttgcagtcacaaaaatattattgtaggtaacttaaaaggcaaagcattgattttacctgttcacaacaatcaattctatttacagggttaccgcagtttttttttttcttactttcaaatagagttggggtttctctctgtcacccatgctagagtgcagtgtcacaatcatggttcactgcagccttgaactcctggactcaagtgatctcctgctctaacctctcaagagtttgggattacagttgtgagccactgcgccgggctctatagcagcttttgatttggcctatgatccctgtctgagagagtccacagtcctgctctgggcttcttcattccctgagactttgtctctctagaccgagccctcttcctctcccccggtcccctgctgcatgcctggcagtgtgctcagtactgggatgtggatgggcatcctgcttctccagccacgactgagccttatcttcagctttcttctctctctgattggtagcagagctgtcgtgctttgtttcctggtaagtaggtggggacaggaatgtccagaacaaagaggataattcctccaatttctgtcattaggggaaagccgctcacctactactattgtgagtagcacaggggaagctagagtaggaaattgcaaaactctgtttgtatgggattaaaaaaaaaacaaacaaacttgaccatgttgttgtctacacttcttaagctgggagtgtttagagaaggccctcaagtatgggagtgagaacaatgccctttcccacttgaattccctcttcctgccatgctggtgtctctcctcagcttccttgaagcgtaccactgtcacctcctgctttctggctttctggtatcatgaaattccccctcaccacttattggttatctactaccacgtaatagaccactctgaaacaactgttttacttgctcactgttctgtggctcagcagtttgggccagactcagctggttggttgttctgctaaccttccctggagtcactcatgtgactctgtgatccagtggtctgactggggctggagggtttaagatggccttactcactcccacgtatggtgactaaacagctgggcctcctctccttggggtctctcatgggaggttagcttgagatttctttgtatggtgggctcagagttcccagcagggcaagaccagagactgcaaagtcacttgaggccttggatcacaattaacatattatcaaagcaaatcacaacaccagcccaaattcatggagtggcgaaatagacataaaagtctgcgcttaaagagatgaaagaaataatcactgtcatctttgcaaatgatctgctacaaactgcattgcccattttaattcattttattgatttttaccttcagttaagggtagaaaacatgacatatggggataaaaaaatatatgctttagaatcagatatgccgccaattattgatttgtaagagttcttttatattttagatgttaacattttgttagttagatgtattgaagataacttttatcagtctgtgatgtcttcttgtatttatggtgcctttttacaaacaaaagtgtttaatttcagcaaaatctgaattttcaatcttatatggtttgtactctttacatcttgtttaagaaatctctctctcccctgaagtaataaacgctgtcttctatattttcttctaaaagatttacagtttgggctattcatatactgatttatatctctggtactgatttttgtgaatggtgtgagttaggttccaatgttatgtttcttcacgtgggtaatctaccgtcctagcatcatttatcaaatattctattcctttctcacttgtccgcaatggcataactgctgtatttcacatttccatatacagatggcccccaatttttttttttttttttttttttttttgagatggagtctcactctgtcacccaggctggagtgcagtggcacaatctcagctcctggcaacctctgcctcttgggttcaagcggttctcctgcctcagcctcctgagtagctgggattataggtgcgtgccaccatgcccggctaatttttgtatttttagtagagatggggtttcaccatgttggtcaggctggtctcgaactcctgacctcatgatccgcctgcctctgcctcccaaagtgctgggattacaggtgtgagccactatacctggccagatggtccccaatttatgatgatttgacttaatgattttttgactttatgatgggtttattgggacataaccccatcataggttgaggaacatctgcatgggatggaggctctgtttctgagctctctgttctgttagcctgttgtgcactgctttagattactgtaattttataatatgttttgagatctggtaggtaaagtaccctaatcttgtttttctttttaaaaactgtcctgggtgttattggcctttttttctttcataaaatatttagttccaagaaaaatgttgccagtgtggtctgcatccatacagattctttggtattgcttgaaatttacactgtggcctaatatgtggcctacttgcataaattgctaattcttatggaaaatgtatattcaccaatttcttgggaataggtttgaaatgcattcatggatcaagctgtataattactgatttttacatcttctgtatcctgactaatcgattgtgtctgacatttttgaggctttctttatgtttgcctaatatagttttccagccttttaatcttgtgtgtcttttgtgtttaagtctattacttccatatagcatgcagctggggctttgttttgcactgtttttttctataatctaaacatgaagtttaagtattacgtttagcctgttttacatttgtttagaatatctgtgtatttttatttgtttctattatcttgttttgctgaatttgtcttgcttgtttttcttttcctttcctgtcctcttctaggttgcatttataaattctgctttctcctttcaacctgtataatctatttctgttcttttagtgtttgatcttaaaattttaagatgattattaacagaaaccaaagttaatgtttctagttccctcttgcataaaattatgaaatggctttaaatataatcacttccaccattgttttagttacagtttgtatttttttttttgcccccaagtaccttttttggggagttgagggggttgtcatatatactaagacttacctgtgtgtgtatcagctgtttatcattttcgcttgtataccagatctttttctttctttccccacctgaaagtacatcctttagcgaactttttcagtgagattctgttcatgataaactttctcattctttgtttctcaaaagtcttaaagtctccttcgtggatgatattttagctgaaaatgcaattccatattgatagttttaacatttgaaggtttctttaggagctctagtaagtcagtgtcttcggatagatgttccagtcttctctcatttcgtcaatttacatctcatctattgagtgttcatttcattggttatagtttctatttctaaaaattctattaatttacctggtgttttttgaaattatctctttcttcttctgttttagtattattattattattattatttgagacggagtctcactcagtctgccaggctgaagtgcagtggtgcgatcttggctcactgcaacctctgccttccaggttcaagtgattctcctgcctcagcctcccaagtagctgggattacaggcatgtgccaccacccccagctaatttttgtatttttagtagagatggcatttcaccgtgttggccacactggtcttgaactcctgacctcagatgatccacccgcctcagcctcccaaaagtgctgggattacaggcatgagccaccgtgttcagccccctttcttcttttaaaaaaatattttaagcatacttatttgacattctacatctgatcattgcggtgtcattccttggtggcctgattttgtcagttattgtgtctgttgcctcttgctcatagtgatgtgttgcctcttgtgttttataatatgggattatgggttcttctttgaccaagctctatctctgggtattatatgatatcatcattaagagtgaattctaccagagtagatttgtttttgctcctaccagatgccttggaatacaaacatatgaagtcagtcctatgattagaatgtcagggggcctggcacagtggcttacacctgtaatcctagcacttggggaggccaagacaggtggatcacgaggttaggagatcgagaccatcctggctaacatggtgaaaccctgtctctactaaaaatacaaaaaattagcagggcgtggtggcaggcgcctgtagtaccagctactcaggagactgaggcaggagaatggtgtgaacccgggaggtagagctggcagtgagccgagattgcgccactgcactccagcctgggccacagagcgagactccatctcaaaaaagaaaaagaatctcagggaacaggctgggcctggtggctcatgcctctaatcccagcactttggggggccgaggtgggcagatcacctgaggtcaagagttcaagaccagcctggcaaacatggcaaaaccccatttctactaaaaatacagaaattagccagcgtggtgacgggcacctgtaatcccagctactcaggaggctgaggcaggagaatcacttgaacccatggggcggaggttgcagtgaactgagatcacaccactgcactccagcctggtcgacagagtgaaactacgtctccaaaaaaaaaaaaaaataataagaatctcagggaagaaacctgctgtattccttttccaccctcctaccccaaagtataggcagaatttctttttccatctctttttcttttgccagtgagcacttttctcttttagtctatgtctttttagactgaggggtgtagcccctcaggggaaccatatgaatgtgggacattcacttctaactcctgaagttgtactgacccaagccctgttttctgtatcatgtatcatgggcttacagttaaaaccgaaggctccagggagtgggtctcaaactgggtggtgctgctgttgggaaatgtgtgggtacatttttgattgtcacagtggcaatcaagtcctaatcgtttggtgctcaggagccagggagcctagtgccaagtgtacctacgaagtgcacaattctgtcccaaaagaattgtccccctgctaacaccaacaggttctcacaccctgtgggaaacgccgttttagggcttggggattgatggatatacttaggctgccatagcatggacactaccccacttcctttatcaactttatcttcttcatttgggctttggagagttttcggagctcagctttgtttaaaaaggacatttgttttactttatttagcatttctaagtgttttgtagatttatttgtttgctcttcaggaaacctggctctcaacggtattattaaaaatgaaaatccagccgggcactgtggctcatgcctgtaatcccagcactttgggaggccgaggtgggcgcattcaggagttcaaaaccagcctcaccaacatggtgaaaccctgtctctactaaaaatacaaaagttagccggacatggtggtgcacacctgtaatcccagctactggggaggctgaggcaggagaatcacttgaacccaggactcagaggttgaagtgagctgagattgcaccactgcactccagcctgagtgacaagagtgaaactccatctcaaaaaaaaaaaaaaaaaaaaggaaatccttttatttgctttcccactattttatgagcatcagctatcctaggcattgtgagcgatgggatgtgcagggttacagcatttctctgcacagtgtatatgggttgttcaactccaggaggttgtgattctgcagaccacagtgtgaagggggcccctgtcagtcgtgcctcctggctgctccggacgtcccactgaggatgctgtggttcctgtgatcagagcactgagtgctgttgccattgtgttcccagatgagcttgtcagctgttccacatcagggatcagtacctgtacctaggtcattgcccctgtgcaaaatattcaagcacttttgctttggcaatggcagttgccatagatgatatctgccaagttaactgagcttccttctttgaccactaccaccttaagagcaagtaatgagtgattgaatactgaaaagtaacacaagaaaatccaagagccagagccaaaaggtggggaaacacacagaaacctctaagccattcagggtacactcacttagttggtgcttcattccagagaagaaagggatggtaggaggcagcattggtgccaagtttgctcaggggtccacttcctccctaactttcctggccagcttggacctgaatagaaagtgttgccaggcagcttacagctgtaatggtgtcattggagcaaggtagccactttgcagacggaatctttcatctaaagcatcaggggctccttctgctcccatttcttctctttccttctctcttgtctggttatattgatagtgctctagtccgtgatccagtgcctcatattttaggacagtggtactcaatccactgtcttctcagattcaattagagaaggtttttaatgttctagagtctttctattccaagtgtggtccatggacctgcagttttgattagtatcattcggagctagtaaggaacacacagtcttaggcccaaccccatgcctgttgaatgagaatctgcattaaacatgttcccctggggatccagatgctctgtcagtttgagaagcaccccaggggaaagtgatcctcatattctcttctcaacgcagaggaccactatagagaaccactgtggtgggcactcagtaaatagcaaaggaagaaagttgcttgcacttttgcacagaatatcatgggaagagcaggtattataagatgtttatagtttgccagacatggcaaaaacagacgttgcaggatttttcaggtaatggatatgggacagtcattttttttgttgtactgttctcagtatggcttatttaattattttagtaattaatgaattaattcatcaatttgctaattgtaaaatcaacaaaatcagttaattttttagtatataatatatatattcttttattataaattattattgtcttaacttaggctgttgtaacaaaataccataaactgagtggcttaaacaacactcatttatttctcatggttttagagcctgggaagccccatcatctgggtactaaccaattcagtttcctggtgagggctcttttcctggcttacagacggctgcctttttactgtgtccttacatggtagagagaaaacgaactctggtttctatctcttcttatgacactaatctcatccatggggaccccaccctcatgacctcatctaaacttaattacttcccaaacatccctcttctaactactattacattgaggggtaggtcttcaacataagaatttgtatggggggagacaaagacattcaatccacaacaactattatttattatgaaaaatataaagtaataatactagtagtaacagtaacaactatcattttaatttgattgagcccaggtgatggagcttgtacttggagggtcttacagtatatgtacatgtcatgagcgagattccttgtccccctcacacaggggtggcttttagcaattactgtccatgttgacccacattttcttctgatttcatctgacagggcacagcctttgcagcgagcagggcagcagtgctgagaccgctccagaggagaccgaggggccagacttggaatcctcagatgagactgatcacagcagcaaggtgagagattttcattttcacatcccatgctttgaaccactgaagaatcacagctgacaatgtcacctacacagctgtatgtggttaccaggcctctccatggacgaagtgtttttgcttctgagatgttgctgaatagcaggaaatgaaatccaaattatagccttggtaacaaacctgtatgtgagaatataggggagaaatcactcgtaatgaaataaaatcccttttcttaaatttctgccactgctggagctcccagttaatgccataattttattccatttccctattacatcttcatttgtgtaggatgaaacagcatcaaaagtatgtgggattgagtcagctatgctttcttgctacttagggtttctgtaatgaactccttttgaattacctgcattcagctcttgttaaaagtgagcaacttttatgttaaagggaaagaaaccatattttaaaattaatccaaatacactttcccttagttgaacatagtaagaaagttctcctgactttttggtgcaagacactgaaattgttgcccataattttttttttttttttttgagatggagtctcgctctgtcgcccaggctagagggcagtggcgtgatctcggctcactgcaagctccgcctcccgggttcacgccattcttctgcctcagcctcccgagtagctaggactacaggcacccgccaccacgccctgctaattttttgtatttttagtagagacagggtttcaccgtgttagccaggatggtctcgatctcctgacctcgtgatccacccgccttggcctcccaaagtgctgggattacaggcgtgagccactgcacccggcctgttgcccataacttatcatgcttctattccacttcataaagagttccatgggtcagtagcctcttttaccacagtcttcaaaacacaacccaacttaaaacctctgtgttacctgaatccaaacgacactgcccccgcaaaaaaagcaattgcgtgtgattttgtttccatacttattcatctttttctataatgttgttgagatatgtatatttctctacgatctctcttttttttgcttgacgcttactagtcacttaacctaagcaaatcacataactgtatacttttgttttctcatctgcaaaatcagggtgattcttacctttgcttggagattggatttttgggtgggtcaaataatataactatgagaaagcacattgataatggaaaaatgcttttcaaacatgaactattattttgaaaacctacgtttgtacatttcctgttttgattccccctgtatgtgtatattctgtaggactttcttgtgtgcacatatttgattcttcagtatcttttatccatatttgtttctctttcctgactgtaggatcttcattctcagtgtctttttaagttgggcacaatataaaatttaatatttgaaagcaacattaatatttatagactgaaaggcattatgttgttggttgttaattaaaaagcagatcattggaaatgcacatgtttccttttaaggcaaatttaaaaaaccaactgcttaaagttcctttttatttaggtgacccttacatttcttttacccacttacttttgtggggtcggtcagttgtcctcaggagaaacagatatttctatactgatgtaagacaatttgaagggtatctattaagttacagtattataagaactaaaaatattaattttcaatttctaactggatttaggcaaatagctatttttcctgtatctaaaacatttatttctgaacacttaaaaagtattggatccaaaatgattaggtcatttttactttactttgataggtcagtgttctcatctccttgtggattttgagagagatcgtttccatgttaaatatagtgagtcatgaggtcataaacagagtcctgtataatatgaggttctggcagtggagaggacggaagaggctccagggctttgctgactggtcccatgtgtcgctctgactccgtggttctttttccagagaacaaggctcttgaacttatctggaacatgaagggtcaaatatagaaatagatggtgctgttcaaagattttcttgtagaaattcttagtgggctttctaaaaagggacagaattttctcaaaattattgacaagctactcgggaggctgaggcaggagaattgcttgaacctgggagacagaggttgcagtgagtcaagatcgcgccactgcactccagcctgggagacagtgtgggactccatctcaaaaaaaaaaaaaaaaagattaagaagtttgggtgatgatttgaatatattttaaagatcatgcagtagactgcattcaaaccataagttcgtatttcattctgctgggttggatgtggggagcactgtgtaattctgtgtccgaaatacttcctggttttgctttgattcagacttcatcttctctatttgaaattttgtcatgcaactcaaattagttagctaaaataacctttggtcaattaaatttctcacttagggtatttgaacgcaaaaagcttaaatgagcagttcttggtggctgggttctactgtgtgttattaatagtaaatgagaagtaatacttatttaaggtcttgtatatattaggcactgttccatattaactcatcttagcctcacaacactcttgagggagatactattatctgccctattttatagatgagggcactggaacagagaggttaagcgacttgctgaaggtcacacagctctgtgatgacaaaaccaggatgcaaacctggtttggctccaggtcttgtcttgttagtggctatgttaaaactaccttgtgtccagattgttaacatctggttttaaatactgggtttcataaaaagaaggaattaatttattagtggtgctgtaggccatttatatatacagccataaaccacttaaattttttcctaatgcttaatgtttctgtgtgtctctttttatgatttaaagtaagagcaagaaaacacctgaagtttcttgatcaaggctaaatattttttgatgcgtctcctatataagtgtgaagcttttcttgagaataagctgaaaattaatttttcaatcgttagctgtctaaactcggaagcatgatttagccttgtctgaatgcacgaggctgagtgtagagatgtaaatgtgtaaataactaaataaacagaaacaaataatcactttttattccagctgaatatgttagagctgttgattttgtgtaatattcttggtttctttctaaatggactgttttacatgatatcggtcagcataaagaaaaagcatgttggagttctgtatgttttgcacttgtactgaatagcagtttttgctatgtgtggccttttagagttgagcaagtaaataattgtatgcttgttgttgagcgtggtggtactggaatgtcacagccgctggggaggggcaggggaatgtcacactgcagggacagtctagcagcctttctctttctgagccgcctcctctctcctgtgactgtgggtgacaacctcaaaaagcctcatcatcactggctacttttttctctgcttctcattgaaaactcttgtttctggagatgaatgctaattagcttcagggcagtgcggtcatgtgtcatgcattccaggccgcctggcagctgtgattgtgttttccatttagcaaatgtattagaataattttcaggacatttccattaggaatgactttttctttctcatccatattgtttttgtctcagaaatgtctgcttttataacaaagcatgagtggaaaaatgtgaaattatcaactgttaaacacacacacacacacacacacacacacacacacacacacacaacttttcttagttgcctgctcttgactcagtgtggaataccttgaaagttgtcggagccgggcaggtttaatattcctgagcagtgcaggatgctggccaatcagctgatctcaggctgcagggcagagacgcttacatcccggggaggcattttgtgctttgttttcttgccagtttcagctctccctttctggaacttttgttgtttagccaggtgaaatcaaagcctgagttctggtccacagtttagcctttgacagcttcccagagggcactggtgggaagcgagtgcagctccggggtctcaccgtcgctgtccttgctgcgttgagacgtggccgtagattttcatgggaaaaccagcatgggacgtccatatgagaggatgctctcttcagagctaggaggcgtttggtgctctgggaatattttaagaaacttctgtctccgtgctgaacacgtcaggtggtagaattaattaccatgagaatacattcctgatgatgtctgcactgtggaaaataaagcgcaagcccaggattgaaaacaatgacaagtccggtgactctatgtatcgaacacttcatctggtgagcgcctttgctgtttgaatcctatcttgctaggtttgattgtgttatgactttctagctcagttgtttttcaatccgaatgacagtgattacacctttcccatttccccgtattctgtccttttaccctctggatacccttgttcataaagtctgtattgtggcttttggtgggggacgtggggaggttcagagttggtatggagttgaatttgcctagcatctttacatttttctactcttttatacttaaatggcagaaagatgtaatctgcatttttttgtttaattaatggtcagttgcattttttgcctttgttttggttattgagattttgattgtgttttgtgttacgtgcatggtgagaatctcccatcccccctcagaacgggctgtccgagtgatcggcagggaggtctggaaataggatgttcaacttgtttccttttataaggcttgaggtgtttttgactttatttctgcttccttgagaaggagatagatatagaagggttggctcaggggacgtgttactggtttgacagcaactgacctatttgaacaggtctattcctacagtaaatattcactctccaatgaggaagtgtagtggggtaatggcaagaaataatttagcaaaatcagattcaaccttttaatagtttattattaatagctcagtctgtcgactattagatgttgtgtcatttaatcaaacttaaacttctacagtgcgtacacctgatttgctcaaataagccttcttccttcttggatatttcttctttgaagtttgttcaagaggaaactgaaaaggtgatcgagaactgtagggattaccattgtacatagtgtctctgaaattatggagcgcattgtccccaaaaaaagcttaagtaaaggctataagattttaggccactctggccccttttaaatctgtgggatgtgttaaatcggtcagactcaaagaacagttttagaactgtgaactcatctagagttagaaattgcctttggtggttgcataacaggaagagcttaaacagctgggtggcttgagttgatagtgtgtacttaaaagtctaccccctctttttgtactttcttttcatcttccacaggaggaaagcagcattataaacattgagcatcacgctggtctcagtaaagtggcccatttcctcttgccattgtcctctccttgtctgtatgttggttggataattcttagtcctgacagtggaaaagctctgctaccctttaacagttttaaactctcaaaatgcctgtaagtacttttttggtttccagggtgactgattacagtcctcaagtaggggagaggtttttactttccccactggagaaacctggtctgccttccccttgctggagtcctaagctgcttgtcccacatccaggatacttggcttttgggagcgtgttgagaagctcccattgaggcgacctttcttggcacttgtggctacagcgcttggtgtgggaatgactaggatgccatctgtaacactcagtggtggagcggggcaaagccttgaacccaactcctcctatattccacatcatggctaagctgcgtggagaagggcctgatggattttgatgtaaagaagtttggccacagtaaagagggagggggatttaaaagctgagccccacagtatggaaaaatctctagcttagaggtattctaaagaaaacctgcatttcataattccttccaaaaaaaatttgggggggtgttattttaataaaacagaattttcaaacttgatgacatccttttaatttgtttccaagcaaattttaagaggcttgtatataacaccgcttaacaacatgtatgtgcattataacttgtaatgatgcatatggtacctttttattctttattcaaataacgtgcagttgacagtaaagagattacatccatctggactcagttccttgtgctacacctgagggttggtgccttgattcattgagtagggttgccggtggggaaactgctttgccccttgctcaacttgagagaccactcagctaagtctatcctaggcctaggtcgtacctaataaggaagggatacttaaggctgtgaaatgtccaaagaggacccaagggaattttagctgtcccctgagatgctaaaggtgtttcctaatataagccagaacttatctctggctgtctgagggtgaggttgggcctaggagacagctgaatttagaggactgaagccctagcctgcatcctactaacctgagctcaccccacaggcctgcttcaaactaaggatgccaaacctcaggcgtggtaaacttacatagaccaagtcagaaaccctgttcacactcttaaaaatggaattctcaaagtatttatggtagaacagatggaatgaaaacccagaggtagtgaggtgtgaattggaagcacaaaggaatgtgttaggttcctttgtcttttggaatttcctgcctttgatatgtgtcagatccccatgtttgcctttcgtgaatcacgatttcacacagtttgcctaaatgataaaaggtgtgctctgcctctgtggcagttcctcagataacgttttgttcaacatcatttcatcataacgtttatgtgaaaaaaattgatttctagccaggaccactgtctgcgtggaatttgcatgttaaatccaggtcttcgtgggttttctctgggtactcgggtttgctctcacagcccaaaaacgcgcacatgggatgaattggcatgtctcagtggtccctgagtgagtgtgtatgtgtgtgcaccctgtgatggaatggcattctattcagggttggtttctgccttgcaccctgagctgtcaagataggctccagtcacccatgatcctgagctggaataagtgggttggaaaatgagtgaataagtgaatacaaatcattataaaataaaaacttgtaaagtatacaatcatacaaatgcatagcaggaaactatgcagtacaaaagtattcagagatcctgccaaagttgttcttgctagtttttgaactgcatgatggtaggaggtgccccttaacaatttttgctttgcaaacatttattgcttgacttaacacactaccgctatgaccaccgtcactcaccagttcaccaaaagctgggtaaatagttctcttaacttgtttttatttatcttacttaaatggatatctggcttacatttatttcagtgtttaatattagaagtcttttggtctttatttagaagcgtggtgattttttctttgaccagaaatgtgctgtaggaacttaacttgtttgtatcaattagcctacagtaaaaatggtttctttatgccgtttagcttaaagtcagtttccaagaacctataaaccatgttaagtgaggactcactgtaatagactgcagtgaagaatatatttgctatgagcagtagctttcctattaattctgtgaaaaacagacagctgtggttactgttggaagctttagaaaaggatggtataaagcgaggtgccaattatacatttgttgtgttaggtgcctttgccaggtaccaaatcaaagcaaccaaggagagtttgggataagacagggacagggcacagttagttgtcagctgttatcactgtctgtccatggattttcattttggcaagggtttgctttctttctcattatgactgtgttataatgagttttctattacagttatcactggatcatctaaaagacacatgaagattttttgctaaaatggatgtatttgttcctttgtaatttttaagacaaagccctacttgactgtatatttaatgatgattttgagttagtgaaattctagctaactaaataaaattgtttagtttatttctactgaaacaagctttgatgaaaaacacagtttttcttttctaacagccttgttgagatataatttacataccatagagctgagcccattttggtcaatttttccagtcagtcacctaagggaaaattgtttgtggggttactcagtgtcagaaacatgcatttccacagaaaacattgaatagtgccactgacaggtgactgacaccttctggcatataagaccagggttagtgctagcaatgaataagctgtggtaattgtaagagaattagaataataattatgtggatgtgggtcctggctctcctctgtcctgtcatgccactgcagctaatgcatccttcttaggttctgattttccctgtccttgcctcatctttattccagacttccttcccttttggatatgctaatgagggaaaggctcttcagtgttggctgccttcctctgtgtttaaaactcctccatggcatacacttgattttagcttttctgacctacacaaaacagcagccttgacttttagctctgtgcaccaacgattgtttttgggagggtattctcatgttcttgctaggtaggtgggtgatagaagaagttattctttatttgcaccggtatttactggaaatgctttgtgcctagagttgaattagacaatagaagcagagagagaagcgtgagaaggacagccactagcttcaagaaaatttccggggccgggcgcggtggctcacgcctgtaatcccagcactttgggaggccaaggcgggtggatcacaaggtcagattgagaccatcctggccaacatgttgaaatcccgtctctcctaaaaatacaaaaaaatagccgggcgtggtggcgggcgcctgtagtcccagctgctcgggaggctgaggcaggagaatggcgtgaacccggaaggtggagcttgctgtgagctgagatcgcaccactgcactccagcctgggtgacagagcgagactccgtctcaaaaaaaaaaaaagtaagaaaatttccatcaaacattcattgagtggtgctttggaacaaatattagtgaattaaattttgtgctactacatagcctctagagcaattacacagagagctttaaaacatattgatatctgcatatcccaccccagagattctgatgaaattgatctctggtgtgcatgggcatcgggaggttgaaaagctccccagtgattctcataagcagccaagttggaaaactactggtctcatgggtttttacagcagcccttgctttggagaactgtttgtgtaactggaagagttggaattttagaatcctggaatcctacgtttcaaatggatgacaaaacgtgtgcaacctttatggtctacacctgattcatccctggtagatgtggagactgggatctcccattgaggcctattttagggctaatctcgttattcttaaaggggagtggtatctttttgcctttggagaagctggagagggagaaacttttatttaagtatgggtatctttcttaatctagaaagttgactcagtgtccatttttaacaggaagaaccttagcttgtaaaatcatctttgcaacattgcaaagtagatagtttactgaactgggagtctgataattaatgaggcttgtaccttgggtgaaatgcagctaacttttatgtctcctgatttatcgacttcttgcttggggagtggttaagatccataggctttgaaaccagattgcctggttcaaatcccagctctgccacttacgtactgcatcatcttggatgagttacttaacccctctgggcttccgttgtccttaccgtgtgggcagatgaaatgcattagaccggcactaggcgtgtggtaagcgatgagtgtatgttagcaattgttatcctggttgttatgagcattcaagaagctctcctaaatgtggagcaatttgtggaaacacaagacgacattcatatgtgacagttgactaaccagggagaacacctctaggcggtccaggtgtcaggtgcgtctaatgagggataatgacctctgccttcccttcccccctgtgctccgaagagtacagaacaggtggccgcattttgccgcagtttgcatgagatgaacccctctgaccagagcccatctcctcaggactccacggggcctcagctggcgaccatgagacaactctcggatgcagataagctgcgcaaggtgatctgcgagctcctggagacggagcgcacctacgtgaaggtatgtttcttttttctccccctgccctccctctgcctcataaaggagtgaagttggtgtgtctgctggttttcattaacagctgatttaaactgtgttcatgaagagcgtcttggtttctcctggaattttgcctatactctgaatgttaaaagcttgttttgagttgttttttttgtttttttaagatagtctcactctgttggccaggctggagtacagtggtgtgatcatagctcactgcagcctttacttcctgcgctcaagtaatcctccctcctcagcctcctgagtagctgggaccacaggtgcatgccaccatgcccagccccgttttctgtttttttttgtagagaggaggtttcaccatgttgcccatgctggtttcgaactcatgggctcaagcgatcctcccaccttggcctcccaaagtactgggactataggcgtgagagctaccacgcccagccttcttgtgatttttaaggaagcctagtgattttcacggcaattcatttatatatatatatatatgtatgtgttgttgacctaataagaaagctacatttaatttttttaaaagttgagggtatgatcttcataatctaattagaatctagccagaagactgccaggtctgttgtctttgtgttatcacttgttctgacacctggtcacatttcctatgcgaaagcagggtgatctgtttaagtatctatatcttagtcttttaaatcaggggttagcaaacgacggctctcaggtcaaatccagctcgctgcctgttttcgcaaataaagtttgatgagaacacagccacgctcattccttgacatattgtctatgcctgcttgggtgctacagttgaagaagttgcaatggagaccgtattttagtcctcgaagcctaaaatattgacagaaaaggttggcttactcctgcatgaaatggaccttaacgacctaaagtctctaacgttagccttcgggacaggatctgtttgttctcttctagatccttttatagacattaacatatgctttatactttaagttctagggtatataaaaaataaaacacataagctaatgagttctcttttcaattcttaggatttaaactgtcttatggagagatacctaaagcctcttcaaaaagaaacttttctcacccaggatgaggtatgctggaaatggtttcaactttgtgaccatcataccgtggtttgacttgttggtaaagaggaaaaatggggacatgcggaacactgaaaacattttaaatttatttaattgtaactagctgaaattattgcctgctaagctttggtgtgctcatgaagagtaaaaaactgccccgctctctggtagtgggattattctcttaattgataagaattgatagaaaaaccttgtaatcagatataaataacgtttaggaagactaatgagatatgaggtgcattaaattctgttttatttctagcttgacgtgctttttggaaatttaacggaaatggtagagtttcaagtagaattccttaaaactctagaagatggagtgagactggtacctgatttggaaaagcttgagaaggttgatcaatttaaggtaaatagtgcaaagctgcctccagcgtcagggctatagtgtggctcaagttgaatcccctgatcgtgttgatgtcttcattggagggccacagtggggtccgttcctaagggtgtctgagagggaggggaatggagtgtgtcttgctggtctggctaagggaagcccaatgccatcaatttgcattaaactggtgcagctgctggcttttacgtgagaagaagtaccaaccttgaccttttgtttggtttatgtgggggcctttaatgctttagctatcagtgaattagaataggcactcctggctgggcatggtggctcacgcctgtaatcccagcactttgggaggccaaggcgggcagatcacctgaggtcaggagtttgagaccagcctggccaacgtggcaaaatcccatctctacaaaaagtataaaaattagctgggcatggtggtgggcacctgtaattccagctactcaggaggctgaggcaggagaatcgcttgaacctgagatgcagaggttgcagtgagccgagattgcagcactgctctccagtctgggggacaagaacgaggctccgtcttacaaaaaaaaaaaaaaaaaaaaaaaaaaggcacttctggttacccagtaaacaaattaatttatcgtgttctgggaaactttgcttaatggaaatgcttatcattatccaggggaaagacaatcttccagcacacggtgtccttgcagcctaatgaggatttatgactagtgccttagcaaggatgcttatttcctctcccctgcttggctttcttttattgcagatttcctgtgttgcacctccaattaacaaagcacattgcttcatgtgttggcttacgtgtcaccctcatgtgctttaacagattaattggggtataattgtgcagtagaatatgctgcatatacttagtgtggaatttgatgaattcacacacacacacccctatgaaaccatcgtcacaatcaggacaatgcacataatcatttctcctgaaagtcttgtcctgcccttttgtggtttttctcttctgcctcttactgccctcccactctacccctgctccatgctctgctccctgttatgttaaatatgtttgcattctggaattttatattggtggaatcccataccaagtacccgtttttctggggctgcttccactcagcgtagttgtactgagatccgtccatattgctgtgtgtatcaagagctcatcccttttcattgctgcattgtcttccattgaatggatagaccacactttgttatccattcacctttcttgggcatttgggttgtttccagtttttggtaattacaaataaagctgctgtgaacatatgtgtacaagttttagtatggatatatgctctcatttctcttaagtacccaggaagggaatggttgggtcatatggtaagggtatgtttaactttttaagaaactgctcaactgttttacaaagtggttataccattgcagctccctccagcagttcctcctcattgttctgctgaggtcacagtcactttctctttttagctattctaacaggtgtgtagtagcagctcattatggttctaattttaatttccctaatgacttacgatgatgagcgtcttctgttatgtgcttgttttttgccctcagtatatccaccttggtgaagtgtttgttcaaataatttgctcatttattttactgggttatttgtttactaatattgagttttgagagttctttgtatatcctttataagtcctttatcagatacatgatttgtaaatatttttttctgtatttgaggcccatcttttcattttcttgacagtgcccttcacagagcagaagtttttaattttgatgaagtacagtttttcaaattttccctttttgaatcacacttttggtgtcttatctatgaaatctttgcctaaagattttttcctgtgtttactcttagaagttttgtagttttctcttagaagttttatagttttacatttagacttctgatctatttgaacttaaatttgttatggtttaatgtaggaatcaaagttaatttgtgtgtgtatgaatatccaatttttctaatcctgtttgttgcaatggctgtcgtttgatcctttttccactcaatttcttttgcatttgtgttaagaatgagctgttcatatgtgtataggcccccatacactttgcctgccttctaacacttgcaggaatctagctgtgtaatgttagggtacaagttttggagccggggtaaagactgcctcacctcgatattctacctcaatatatgtttttttgtgtatgtgttatctctttacattgcctctctgcaacaggagctactaagaattacatacaaacacacataagtatgtgaatatatatgtatatattataggtgttcatttttgtttgggtataatttcagacttacagaaaagttacaagaatagtgcagagaattcctgaatacccttcatctagattccccaaatggtagcattgggctacatttgctttattctttctttccctccctgtctcctatgtgtatatgtatccatatgtgcatgtgtgtacattatgcatgtatggtgtgtctatgtgtacatataaaatattttcttccaaaaccatttaagagaaagttgtaggcacaataatatatctttcaccctaaatactccatatagttcatttttgtgttcaaaaattgcttgttggtggttatgctcttcatttgaaataagttaggttcattgtagtgatacctgttttctaaattagtaaattgataatttgcacagtagaacacataatgtggcctggtagttagataaacaaaaaagctgcttaataaaaatggatatattctggaggccagggttggttaaaatatggttatagacatactttaaaatactacgttttaacctaaagtagctaacattcattatattcatttacaagtcttttgctgtggggctggttctttgagtttgggtccagttaatcactaaaaagattcacaaaaaggagactttgggtaccagaactttgatatagacttgagtgtactgagagcagtgttattctagggagaggcaggtacattgcttcttttagtgacaggtggagcatctcaaatctgaaaatctgaaatccaaactgctctaaaattggaaactttttgagtgccaacatgttgctctaaggaaatggccattggagcattctggattttcgatttttgatgctcaaccagtaaatataatgcagatattcccaaatatgaaaaaatatgaaatctgaagtacttctggtcacaagtattttggatcaaggataccaaaccggtacttccatactcaaccatcactcttctcaattccacataagtgggaccctcttcatataccttcactttgctgtttatggcacaatctgattgtctccattccatctgtaaggtgagatggctcatgaacactagtgtgcctgcctgcaggattctctccaggctctctgagttggtttccagatttgctcccaaacctgttgctgctgatttccacaattgctgctctttttaaactcctcattgtatatttgaccaaaaaaaaaagaaaaagaaaaacttgttaaaatcttcaaactgtgttgcatagagcactagtctcaaggtagtatcagaaggaaataattagttctgatgtcaaataagttttgataaaattttcatttggaaatttgcaatgtacgtcagcctgtgagaagcgttctgaagtcctacagaacagaaacattggggaagtggagtctttgtgtataaaccctcatatttgtgtgcacattgttccctgagaatcaatttttaaggcgggaggaataagtgaataccttagtgtttcatctgtggttatggtagggtaaataaacagtaaatattaagttaaataaatgaatggctttaggatggctaaagggaggggttacatttagcacattttcttccacaactttttttgcttaattcttgggtatgactctgtattagttcattttcacattgctatgaagaaatacctgagattgggtaatttgtaaagaaaaagaggtttaatggactcacagtccctcatggctggggaggcctcaggaggagcaaagtcacatcttacatggcggcaggcaagagagcgtgtgcaggggaaccgccctttataaaaaccatcagatctcctgagacttattcgctatcatgagaacagcacaggaaaaacctgcctccattattcagttacctctcacaacatatggggattatgggagctacaattcaaggtgagatttgagtgaggacacagccaaaccatatcaggctccaaggataactccctcacagagtccgatggcagtacccagggtactcctgctgacaccctccaagccagggtggagatttgcggagggcttggaaagtaaaggaggaaaaggagaacacgtaagaagagtagtgaggcatctaattaccaattatgtatggtttaaaataaaccttttttttttttttttttttttttggtcatggacagactcagaatcctctgcattgttcattagataaattgcactttggggaacctagtttgttactcaaattcaaaaccttatttctttgcttgaaccctgccttttaattctaagcctcaataagctaaataaggtccctctctaaacaagactctttcagtgtgaaacagaaggtgtttttctgaggccatatatatatatatatattttaatataatatattaatataatatattaattatatattatatatttttatatattatatattttatatattatataaaatatatattttatagaatatatatttatatatatctatatattatatatttacatataacatatctctatatataatgtgtgggatacaaagtatcttctcaggcatagtaaaatcttaatgagaaggcctctacccagttgtgatcctactgggacagggcagagaggctggggagatgatacctgacttccatagttgagcgtgtttcttcctttaatattgcttatgttcttagttgctagaggagaaggtggttttggaaggcatgaagatagtgatcagaggaacatgttttctgcttcgggggcgggaggtatgagcatttcctgcctttatttagtttgccaacaggagctaatgagagaattgagatttctgacttttccaaagtatatactttctcatcaacattcaaacagcccggataggttattaaaagacacagacctggaaaaccagggacatctaccctataaatactaagaagacaaaaagtccaacaccttttacacaaacttgtacaagcacatactttgtaatgggcaattttagggcatttgatagcaaagaaaggctctgacaggcacggaagatgttgatttgtggggtgggccaggcagatgtgagctccctgccataacctgctgatatttccagtggaggaaggaaacaaccaactgtgccttttctcgtcaaatccagaaagtgctgttctctctggggggatcattcctgtattatgctgaccgcttcaagctctacagtgccttctgcgccagccacacaaaagttcccaaggtcctggtgaaaggtaaggcctctgaggatgtggaggtgggggtgtgttgcttgtcagttgtgtggctgacagtggttgggggcttttgggcagaaatctaagagtcattggttgccagatagatgttccagcaagccactgatatgggtgctgagcaatgtaatgtattcatttttttttcattttttttttttttgagacagagtctcactctgttgcccaggctggagtgcagtggcacgatcttggctcactgcgacctctgcctcccaggttcaagtgattctcctgcctcagcctcccgagtagctgggattacaggcgtgcaccaccacacctggctaatttttgtatttttagcagagatggagtttcgccacgttggccaggctggtctcgaactcctgacctcaggtgatccacccgcctcgacctcccaaagtgctgggattacaggcgtgagccactgctccctgccttgttttttttttttttttttttttgacacagagccttgctctgtcacttgggctggaacctccacctcccaggtcaagcgattcttctgcctcagcctcctgagtagctgggactacaggcccctgccaccacacctggctaatttttgtattttttggtagagatggggtttcaccatgttggccaggctggtcttgaattcctgacctcaggtgatccgcccacctcggcctcctacagtgctaggattacctggccaatatcttgaattaatggttttgtcaattttcttgtaatgaaagttttaccttgctatttggggccagaattgatgggtcattttgcagttatgtaaaaacgtagggggtttagaaattccctgctttatttctgtttttctttaatttcgattataacctaccacacttcataactaagtcctcacttcacgttgtcgacaggttcttggaaactgtgacttttaagtgacacgatgtacagcaggttcccaactaatgtcattttgttcaacatcattttgttataatgttgatgaggaaaaaaattggtttcattgtatgtcattttgcataaagttgcagtttccaagaacttactgactacattaagtgaggacttaccgtatacctttttgtggaattttatctttccttcacctacttttgttcctgggagtgtgataacagctcccaaaagcacttctaaagttgtctcagttatccttgaaaactgctgcatttgtagttatttttgtgcaggacacagtagaatttttatatgggcaagctgcttttccttaagtgctctgagaagacggtggaacattctgagagtctccagaaagtggttatgtcgccatagttcagcatatggtggtttttgatggtaaaaggattaaggaaacattttcttggcaaacagttgcaccaacagaaagtttgattttaaagaatctctggaaatcagcttgctgttccttaacacttcactgtagctgccaagtaaacagctgctgatcaggtccccggatatgtaaataatgttcttgtgtttatgtttgctgccaaagagaactagcttgacttaatttaaaacctattataggaagtattagcacaatacagatctctgggtaacaaagagcctgccccagataaaaacagtcttaacggtagtggtggtctgtgcaacagagttctggtggaacctcaaatgaaaaggggacctgggattctccttgtcatgctgcctgacctttcccgtgtgctgtgttgggcatatggctctgtgtgtgcagtgtgtttcttttaaaacctttattgaatgctaattgttacgagattgttaaagtaacaattttagagtgctttgctccacagtgaaattatatacccatctctgcccttgagcaatttgtgttatttttaatcactcaattagattaaattctgcccccatggattttttcttaattcaataagaaaaatattatattatctttcaaaactatcccttaaaacagtgggaatgacccatatttttcttttcttttcttttttttttttttttttttttctgagatggagtctcactctgtcacccaggctggagcgcagtggtgtgatctcggctcactgcaacctctgcctcccaggttcaagtgattatcctgcctcagcctcctgaatagctgggattacaggtgcacgccaccatgcccagctaatttttgtatttttagtagagacgggggtctcaccatgttggccaggctggtcttgaactcctgacctcaggtgatctgcccgccttggcttcccggagtgctcggattacaggtgtgatccaccatgcccagctgacccatattttctaattgtctaatgagcccagagtgtcaggataactctgagaacaacaaagtgcatgttcatgttcatcgcggactcacagctggcctggaggagtgacgctcctggactgcgccaagcgctgtgaactgtgcagtcttttgctctgatatggaattcagtcgatgggtgaaatacccacagccatatttttggacgagaatattttgttggggaagagttcctaggtccttctagatgtggccctagacttgggatgccccacaaaatccatcagttccacatatgctggcccccagcccggcccagctctcctgtcacatggggccagtcggccactcttcccagtgtcctttctcttcaggattttgtgctttggaaagacaagaaatgatgccaacccagggagtctgttctcttaatggggcttaaaagggataacaagattgtggtcttatgaggtcttcccccatgattgctgtgttttaaaattaaagacagggctgggtgcggtggctcacacctataatcccagccctttgggaggccgaggtgggcagatcgtttgaggtcaggagttcgagaccaacctgaccaacatggtgaaactccgtctctactaaaaatacaaaaaaaaaaaattagccagacctgatggtgcatgcctgtagtcccagctactcgggaggctgaggcaggacaattgcttgaactcgggaggtagaggttgcagtgatccacagtgtgccatcgcactctagcctgggcaacagatcgagactccgtctcagaaaaaaaaaaaaaagacagaagaatcatgttctgatgcccttttatagcatctttagtcttagctcatacccctaaccactggggatggaaagacatttttattagacattttaaaagtttaatgtttatatattttaaactttctaataaaatctataaatatcattaaacttttaaatttttgtattttaagctttctaataaaaaatatatatcattaaacttttaaatttctatattttaaactttctaataaaatatacgtgtgtgtgtgtgtatatatatatataaaaattatatatacactcccactgttttttgcggggagagggtatttatttattgaagagatttttgagttcctgtgacattccaggtgctgttatgaaaagtatcgagtcactggagtgccatgttaaatttccagtgggggaaagtcatccagatgaatattcattggaaatgaatttccaatgggggaaagtcatccagatgaatgtgaagaatgtgctttttccaatgttgattgtgttcatttactggtttatcataaaggatgctgctcaggaatagccaaatggagaggtgactgggcgaggtatgggggaggggtgtgtggagtttccacactggaaacgtccagagtgcccacgctggacgtgccacagcccccatcacccccaggtgctcaccagcccagaggcagcgtgtgtccactgttacgttgcttggatacactgtcccctcctcttcccatattttgccctcccctgacattcctttgcacctggaagacattagccacggcttcgtatcatcccctgccaggtacctctgtttggggtcccacaactccccagggctgcttcccaaaccagctgggacactgaggaaggaggcaaggctggtgaggaaagtgctgcctgagctgcatcagatcagagcccacggatgcccacaggtggtgccaccgagttaactttgagtagatcaccgtgggagatcctgccttgctctgcttcactggcactgcgagatgctgctgcttctgcatctgcttgccttttttttctttttctttttctttttttctttcttttttttttttttttgagacggagtctccctctgtcactcaggctggagtgcagtggcacgatctcggctcactgcaacctccgcctcccaggttcaagtgattctcctgcctccacctcctgagtagctgggattatgggcgcctgccaccagcctggcttttttttttttttttttttttgtatttttagtagagatgagattttagcaggttggccaggctgctttcaaactcctgacctcaagtgatccgctcgcctctgcctcccaaactgctaggattacattcatgagccactgtgcacggcatgcttgcctttttcaaaagaggtttttccagcagtgaaatgcttgaaagattaggaaaaccagggtaaggagtgttcagaatgtaggtttatcattattttgggatgacagggccaacagctcaggggacggatgattattagtttgtcactcacagttcccaagaggcaggggcaccccatgccatgcgggccagatgaggacatgcagtgtcaggaggcagagggagcgaggggaaaatgtggccaagagcctttcttggggtttctgagggaaggaactggggaggccgggctctgtggtgcactcgaagccgagatgtgtgctccccaccctgagatgattaggacaggggaatggtggcccagggtgtaagagcctcagacaggaggtggcagtgtgtggggactctataaaaggcacatttcctggcaagtcttttactatctccaggaactggccagcgtgggcggggcagtctccccatggacagtaaggccccaggtgtcaaaacatcaggataaaaaaacatgtgtaataggaggaggataaagagcagccgctggaaatccgggtgtctgcagtctacactccgtcatcctttaactcatcaggcttctccccaccccacccccaacacataaatacatagatctgactgcctgtggtctccctgactgccccctcccctacctgtccctcttcctgccacccactctctgctcagtcctgcaaaaaggcaccttggagtcactgaggaagggagggaaattgtgggaagggagtcacgtgggcgttccacccccatgacctgtgtttaaaccctgccagccaagacagacacggctttcaaggcattcttggatgcccagaacccgaagcagcagcactcatccacgctggagtcgtacctcatcaagcccatccagaggatcctcaagtacccacttctgctcagggagctgttcgccctgaccgatgcggagagcgaggagcactaccacctggacggtaggcctcggcctgggacccccggcaggcctgagtctccatgagggtctctaaatagcctctcatttcacaacctgttttcttccagtggccatcaagaccatgaacaaggttgccagtcacatcaatgagatgcagaaaatccatgaagagtttggggctgtgtttgaccagctgattgctgaacagactggtgagaaaaaagaggtgagggtccccatcttctcaggacatctgtcaggaaagccgagtttgagtttgcttttatttatttatttattttttaaaaaggtgttacttgtaagtaaaatagttaggatgctgttgtttttcttagtggaacatctgtgctttatccaaggctgcaatgtgaattttcttcctcagctggactatttcttcctgtaggaaatgttttcctgatgttcagctcctcaccctggggatctctggctttattctgtgttaagtgtgaaagtgaacttccattaccacaatctgggctgtttctagaagtgtcatgaaagtccaaggctctacctccagagattagaatgacaccaggcacatagtgggtgcccaaaaaatagttgtcaaaggaatgaaaatttcaaatgactctgaatcagttaaatctacccaaaaacctacttagaagagcagtggcaggaacagatacacctgagaaagacttaaggtgagctaaaagttgtgcctgagtcattaacatgcacttacctgaataaaagtatgttgccaacacagaggagtggtagatgtttgagatgatggataagttaattgctctgatctgatgggttatacagtacatatatcaaagcattactgtgtacccctgaatacatacaattattatttttcaattacaaaatgccaataatacttagaggaatcatagggatatgatatatagtaacattcgtcaatgcctctgtatgctcaaattcaactagagattagactcagtttttctttccaccttaaaaaagagaaaatgtgggaaggaacctagaggaaaaacactcttgctgtgactagcagcagggttaaaagcagtgtgggtggggcaaagtttggttgtttagtgtaggctagagaaagcaccttatctccagagatactaaaggccattatccaggctcatttttttgtccttaatgaaacaaaacaagttttcaggctgttaaaggataattttctgaaagaggtaaaattatgacctctcataatttattttactcataagatgtgaaggacccaggcaggtgttgtaaaggttcattggaaaaatcacaatcacagaagtttacatatggagtgaagaaatgttgaggtgaattgtaaatgagacaaactggtttttccacagctggaggaaatcagctaggccagtatcagactggacagaatttacacatctgtctgttacctacactttacaaagaatcgcacaggctctcaaagacagtgtacagtcaggatctgatagcccaggaaggtctgctgtagaggatatgtagttttcaactgcaacacaattttgtttttacataacattacaagcagagcatgagaatgttctgagactacttggcaggtaatttaatctatcagagtatagaaaagatgaaggttgccaccctggacttagctctcactttcttataaaactttataagaagaaaaaaattatgcttattaaagaagagggcaaaatacagaaaaaggcaagaagaaaactatggtttcaagacatagaacttaccatattttggtgttgattttgattgttttaaattaatatctatgtatatgtttagttatatcttgaaggtaattttataccttgattttatgttgatcacagaattttaatgctttttgttattgactaatatgaataatactgtaaacttttttttattataagaagtcctcccatcctttggtttatttcattctgacagaagtgcattttactgggccatggaaatgaacattttcattacgtcatattacattttctttatatgccaaattaattattagattgtaatgaccttaggagcaaatgaccatgatgctaaagattagaaggcgaaatggatattgggttgcaaagaatttaggaaaaaaagatgaatatgatcagaagtcagagactgtaaaagggaatatggcttcagtgaacctggaagtcctttaaaatgaaattctgatatgtaagaaatctttccagtgaggaacaaagtgatatagtgctatacaaagtattttttgtgggctgagattgtaaaaagaaatgtgcaaaagatggaaggagggacactggctgagtaccaggactgaagaggaggaaaatcctacttttaccaggaggtgcaaagcccagaaaatttctggcttggaaaagatgccaaagagagcaagagaagatattgttgtggaaggataagacaaacgagcaggaaatagacccccagtgggaatcaattactccaaggcagttggttttactcaagtcttaagccccatttcatctctttttcttccattgaggagaatggcctttaaactggaaaggatgcagcagcctcaatgccgtaagaacaaaaccctagggagaatgagtcttgggaaataggatggtctgtgccaagatcaatgacaattctgttccactgctctcagcagtatattggaagaattacggagactcaggcgggtgattgtggaggtacccaaattatattcagattttcacaaaagtaattcctgatccttgtggttccctcttagtggcaatgtgaagtaacagcctagaatggattgatgaagtttgtaaagaggaataggaacatttatcagtatctgctggtaacagcaggtttattgtaaaatggtaacattctaggaacacaaggtacctgaattgggtcttcaaccaacattccttaagatatctctgaaggcaaataggttcacagagaacaaagctggcaaagaaacagctttttgatgaaactgggccttcaacctcctacccccatgttaaactctggggagttaggctaagaaatcccttttgcttaactaggaggaagaagaatgcaagagggcatttccccttaaaagaagtccttaaaaatgctgactcagtcgggcatcccagtccttagtaaggtggaggcctcccagcagaactctttcttggggtttgggaggaggattcagaagggaaccagtggaagccccagagagaggctgtggccagagggagcaccctgaccccctagtccacttgccctgggaagcttgtccagagaaaaaccctgtgcacaggaacagcatcagcccattttcagttgtgtaacaaataactggaaatctcagtggttctctacaacagatatttatctcgtatgtggctttgtaggtcaaccaaggtttggtttctcttggttagctccagttctgaaggttctggtgtgctccttgtctcttccttccaggatccaggctgaagcagcaatggctgtcttgggcaagtccttcccatggctggaaggtgggctctaagtcacatgcctacacccaaagtcatccgggcggcgatgtgtgtaccctgcctagtctagtgggaggtgctggaaaatcacatggcagaaggtgcagataatgtaattctgttggaagaagtagagtttggacagtctaccatgttggcctttaatcacttttaaagacgtactcccaggggctgtggcctctgggaatttgtcttttgtatgtaactcctcctcttctatgtgggtcttcgggggataggtagtggagactatgtcattaccttggctgatcatatcctgggggtttggttgatgagttacttaatatctatagacaaaataatatggctgcttaaaaattattttaacccttgattgtactaatggtactatagcttagtaataatgacagtgatgattataataatttcaatcaagggaggcaacaatacctctgtatcctgtactgctggagccacatctcagcacggtagcctgttttggtggctcgagaagggcaatccaaactgcactgtgttcagtggcgggtcgccaggttgctgctgtataggaaacccagctagatttggaaggaggccagtgactgcagtgagaaaagcagacgggactgttgtgaggcatagacgttgaacttgcatcagactctctggatcatcgtgtctagatggctctgcaaccagcacttgtctgtcggagacagtttagcgtgtgaccgctgggggtgagcgactaaacctcatggtctcttgggattccagcattcacgctgcctgtgccaatagaggaatcttcaaactctttattggcttctctctccctcatctaaagtgaaataaagtcgtctttgaaatggattggaagaagaaataatttgcctacatttcccaaaagtggatattcactggtggaaatgtctgcagttatctgggggtggatctttgtcatggacggccattagcatctccttgggaaactgtctctgaacacaaaacatctccagttttgtagatcagttttgacagactaactgcatgtgaatttcagagccccagtttgtacctatttgccatccttttctgaaattctagtagacaagcatggaataaatggggaaaaaaaagatgagccttttctctcccctgtattccatgtgtttctttgggaatggagaggatttatttttcaattaggagatttcatatgaattaaaggattttttttttcgttaaaatttcattgtattgttcctagctcaaacttggctagaacataatgatactattatttcccattggaaaggttaactggatattgtatcttcagcctgttttgatgggaggtggtgtttattgagacagtcacaaatcgaaaatatttttaaaaaatgtagtctgtcattttggtgcgatttcttttctcaaaaacatgaaattgacaagtaaaaattttatatatttatggtgtacaacatgatgttttgatatgttacattgtggaatggctaaatccagcagtttaacttagcattatctcacatatttaagcaaatgtttttaggagcagtattttcttgaagtaaaattaatatcagcatgctgaattttcaaacatcatgaaaatctgagtattgataacaccacccagtaagctttgtcacgtctctggctttcaggttgcagatctgagcatgggagacctgcttttgcacactaccgtgatctggctgaacccgccggcctcgctgggcaagtggaaaaaggaaccagagttggcagcattcggtgtgtatcagaaaagcgttttatggagggggaaaagtctagcttagttttcaaaacaagaacatttctttttcaagacccaattgattaaaaataaagttaattgcagttacttgaatcggtcttcctgccgtagccaccaacatctcacaaacactaaatgaaaccttcgagttaaattgccctatgtggtcactcagccacatgggtgggcggaaatggctgtgcccaagtctatcccagacataaacacagaggcaggaaaagaatttttttttttttggctgctgctctgcgtgtcttttcaaaataatgggttaattataaaccaaggaaaaataaagtgaaaaatcaagacaaaatggcctctgtttctgagaccccccagtcctagatcttttatttgcttcctgactttgttgctgtttggtcttaaggccaggatttaggatgctggttctcagctgagctgttgtggcaactctggagtgcctggatcagctgtgaggtgcatcccaatcgcattgccactcaatactagtgaaattagagatgtttgcgaatgacttattttttaataaaccagtttagatggatgcagttgctgcaattagagatctcatgtgattgtattgtaatatgctttttgagagagagaaaaaacatgggttagcatataatttaggaaacatagcttgttgttgcaatgtaaatgcttattggcatattgctgtgttgttcatgaatataaaactatcaacactccatgcttttgttttaggttgcgttttgtcctagcctcttgctaaaagactcatgggtaggaacataatataatggaaatctgccttattctcttgccttatattatttttgtgggcttgctgggaacggaggttgctttctccttcttaactaaacttttttttttcctccatgatgtgaacaaagtatccccaaatggaatgtcctagtgattttaaaatcaaagtatttaatgcaaagatccattggactttgtatttcaatgacttagccttcattgaaaagttactaatattcccaaaatttccaaagagcccctgtagctgttgaggtcatttcattaaaaataacaaaggaggccaggtgtggtggctcacacctgtaatcccagcactttgggaggccaaggtggacggatcacttgaggtcaggagttcaagactagcctggctaatatggtgaaaccccgtccttactaaaaatacaaaaattagctggatgtggtggcaggtgcctgtaatcccagctacttgggaggctaaggcaggagaatcgcttgaaccctggaggcagaggttgtagtgagctgagatcgttccactggactccagcctgggtgacagagcaagactctgtctcaaaaaaacaaaacaaaacaaatgtaagtgcagagaaagcatgtgactaaataggccattcaaaggaatattgggggtattttaacaagttgttagtttttgatggggtaggtgttttgggggaggggggaagtagtatttgctttcttttcaacatcaccacttgtgtttcttctatagtgatttcttcttggaggagtctgggatctcctggatgctgcttaatgggtcattcatgggatgcaggatattgatgtaaatgacccacacagtgatgtgggactacagactagcagtcatagaggtcaacatttagatttttcatggctttgccctcagttttacagattcactgtagttagaaatcaagagatttagaataagaaaataatttaagtaggagaaaatgggttggcaaactcttttctgtttcgttttgttttgtttttttggtttttctggggggatggagtctcgctgtgttgccaggctggagtgcaatggtgcgttctcggctcactgcaacctctgcctcccaggttcaagcgattgtcctgtctcagtctcccgagtagctgggactacaggcacgcaccaccacgcccagctaatttttgtgtttttagtagagatggagtttcaccatgttggccaagatggtctcaatctcttgaccttgtaatctgcccgcctcggcctcccaaagtgctgggattacaggtatgagccaccgcgcccgaccctcttttctgttaaaggctacatagtacattttaggctttgggccaagaggccacatgctttgccactggagccagaagcagccctagataacatgtaaatgaatgagatggctggatcagcagctgcaccacacaggtggcagcaggcctgggtctggcctgagggcccttgtttgccaacccatggtgtaagtgattcaggaaaatgctggttttgaggttggggatttaggtaccactttctgcacaggctccgatagtggactctacattactctgttccctgcctcctgggctgtttatgagaagtcggtgtgggtgctgtctccaggaaggcgggcccacagcacctgtccctggtgtaaatggagactgcatactccagcttcatgggcatcacactgtcagcaaactcaataggggctgtagttcataagagaaaaactgaaggctctgaggtacaagacgtgtttatcattattcagaatcctctccagagtaataggaaagagaaggggaaggattaaaattgggattatgaacaaaggctgtagtcatgatgagcttctgtggattcccagccgttaaagagacaagtttgatggtttgggtgtgatttcaagtagcaaggcagaactagcagaaaggctgagcaaggagttgaaataaggaagaggtgctgtgaaggaaggatcatggttaccctcagtcggcagatttggggttaaaatgtggttgtcttgttttggtttaaacctctaacctcaggaaatagtgcagctttcttctgaaaccgaagttgacttgctgccaacgaagcgccttgatgtttcacaggatggctcatgtgtaccaaatgttggtgattgttgccttaaacagaaacaaacaaaaatagaaatagccttctgccttgaagggtatttgacattcacgttttggggcacagagtggatgctttaggctggcaaaggtagcatgagttttggagatcatcaaggccatgtctgaagggatcgggcaacactgtggagtcacttgagtaacactagctccgaggattagggaaagtttaagggagaggctgaggtcccggtgccaggctgaagctcactttctggccctcctgctgtgatccacaatggttaagattgagggaaatcgagggaatcatagcattgagctgtggtcccagtggcatggtggcgcttctgagattagagtcattggggtagagctctttcatttctaagaggacctagctgtcccagcctctctgatttctgaaggcttcatagtgggaataaaaggccttctcaggttgcttgtgctcagctgctgtgaagagctggtgtggcctcctcgggtcagtgtgaacctttgtggggaacctgccagtctgtgctctgggaaccttgaggggtcagatgctgtgaggtgtgaagggctatgggcagtctagaccgagtggctggagtcagtttctttgcatctcagcgcttatttccctgcagtggagattagcatgatcttacacaaagaggagacaagaccgacctgccctccgtaggatagaaattgaaccagatacttccagttggcctccaaagggcctgtgagcctggtggcccatccctgagaattctctgaatgtttgttccttttgtaattctgtgtctggtgtacaaggctgtgcctccttcagccgctgtgtgactgggctattccttggggtcagtatgaagggataatggagactatcttagtccatttgggctgctataacaaaataccataaagtggccagcttccaaacaacagagatttatttctcacagttgtggaggctggaagtccaagatcctgctttctcctacttcctagctgtggcttcatatggcgaaagggtcaaggcatctctctcaagtctcttataaggacactcatcccattcatgaggacagagtcctcagggcctgatcacttctcaaaggcccacctcctgaaaccatcacaagggtgattagtttcaaggtatgaattttggggaaacacaaacatttggaccatagcagagacgctgacacagagaacaaaggacaggcaggagtcagtcacccttctattccttctgggtgccaactctacttacccttctaggaagaatcagaatcactgcaggttaaatgtgcttggcattgcttaacaaattctctggaagattatgcataactccattgtatctccccacccccgaaagaatataagaatgaaactacatgtttaccactcctagagagcttacctgattcagtcattctggaagacatacagttgaattctatttcataaactcatttttgtttctttaggtcaaaagatgagttatatttcctaaattatcactgtctatgtgcactattaccttaatttgcataaatgtaaatcatcttcagcaattgcattgttattgtgaaagacgtttatattattcctccatctactgaattagtacatttttgttgaatatgtatcagctgaagttttaaccttgaaattgtatcatacctaacatattttacgcaaaagttttttgggccataggttaattccatttatgtaggctttctatgtttattttgaacctggaaacttgtgtctcaataggcttttgattttcacagatgtgatgaatgaatggaaggtgggtgggagtcagttaactgggatctcaacgtcctcttcataactgtagtgtttattaccacaagttggtgatgtcaaggggaaaaccctacacatgacataccataactgtctttattttattttttccagtcttcaaaactgctgtggtccttgtgtataaagatggttccaaacagaagaagaaacttgtaagacatcttatgttaccccatggtttgaaactatttctctatctgcttatcagttatgcctgcataattctaccattttgtcagtatgagcctttttatgatcttttttctttcttaagcattgctaaggatgcttgagatcactcatcctgccatcttttcaggcaggcttatgtttagagcacaaacatgaattggtctcatttttgtgaattggaaccaactggactcaattggtgattgggtctgccatggcccagaaccttcctaacgctacttttccccttctctgttgcccctgttcttcttttgggatcctttttctcctcttctctgtgtgtctctcttcactgcatttgcttagcaaacttctttgcacaccctcccctcaacgtatttatcacgcagcctctcacttcctgctggatggacaggagctcatgggggtgaagatcctttgggcacgcctagagttactgcgtgagagtctgtcgctggtttagaaaatgcagggaactggtccggggcaggttagattcttcttatgcagctggttccttctcctctgcaggtaggatctcacaggctttccatttatgaggactgggaccccttcagatttcgacacatgatccccacggaagcgctgcaggttcgagctttggcgagtgcaggtaaactctcacctgtgctgggtatttcacacacatatttctgatgtgtgtaggaattatttgtttgaatccacactcttggtctaactcttctaccgtcttttttttttttttttccctatgcttaactctcttgtctctcggtctctctattgcctcttatttacccagccattgattaaatattgaatgaatgaatgaatgaaccaagtgaatgaatgaactgagtgaatggatgtgtaatgtcttcaaaattcctggaaaagattctagttattctattctatagattaatactatagtgactaccacctgagtacagtgagcctgtgcttcttgaaagaatccttgagactgagcaaacaaagcccacataaactactcacttgcctttcaactgagagatccaaaaataccaccaaaagcactaaaaagcattgactacacatgttttttccctaaagtattacaaatctttatctttgctgttagtgtgaaggcttttaaaatgttgattcttttttacattgattttaatttttttaaagatggggtctcattccattgctcaggctggagagcagtggtgctatcatagctcactgtagcctcaaatttctaggctcaagctatcttttccaagtacctgggactacaggcatgtgccagcacaaccagctaattttttaaatattttgtagaaatagggttttgctattttgcccaggctaggcttgaactcctgggctcaagcaagcctcccgccttggcctcccaaagtgttgggattacagacgtgagctgccatgcccaacctgaaatgttgattctttttctgtgatccacatagcagtgaagtgagttgttgggtagctataagtatacttcataatataattagacgatgcttgaaacacatgagtagcaggggtactgactaagaaaagtgatatttctgtgacccagaagctccccatcctgggcctaatttgaagccaagttctcaagaggaggaatggactgtgtggctctcccaggcacatcctggaatgagcatctctggagagtcaaatggaaactctttagccacatctgttccctgtcccacttggacagcaggtgcagctttggtaaagaaaagccttggtggtagagacctgcaggtgcatgatcaagagaatttctattttatgcttttggcatctacaagttcctactatccaatttctgttttttagcctccttgtttccacttgtcataagcagtaaaactggatctgatcctcagaaaaccaacccaccctagtccaacgtcatgaggagaaccctcttgccatattttgcacactttgagttactcttccaaattaaatgaggcatctcttccttcacagtttttctgccttacagtaggaaaactcaaatgcaaaaaccatgtagggcaaatatatttggaatgattatttgttttagaaggtttctctctaagcttccagtagagatttgccggatgcccttttacttatgatgtgatttgcaaaattgatttatatatgaatttgcaggcacctgtaagttgtgagtctagggcagcaatacatagcattttgaggtttgagcacttaaatactaaagtcttacttagaatcgtaggttatgaattatctagttcctttgtttcctcatgccaggtttacaaatgggaaagtttatttctgtagcaaactgacagcttctaagccaggaatttcgcctgcgttgaggagtaaacacataaaaacttcaaattttgaagacaaagccatctttgtaatacgacattccattctcactctctatttttcattcaagtcaagtttaaaaccatcaagataaaagcttattttagttgagttataaaggctagtcaagatgtctttcattatgaaatccactctagtggatttgagaatcacaacgtggaatttctaggtttttattttagtttggaaagtttgtacaattttttgcagatagattctggttagggttaaatcatgcaaccacagtgagggtttgtgaccagggttctgaaccactggataaaagtgagacttcacaatgtatggcctgaatgtctgcagtgaattgttcctttcacaaacactttattcatgacttaaagtactgtgctattataggcactacagagcttcaaaattattttaaaattgtcccttaccttcttgatataccattttctgctgtgttcaaagcagactccaggggtaggctggggacgagaaacccaattaggtctccagggctttaggcccagccacctgggggaagcctcccttaacagacagcaaaggcttacctgtcgtatccctggccggatgaaatctgcataggaggctttggctccactgagtccaactgttgccaaaacaattaatcatttaattgaaatgcacagttcagttaaccagactgcatggctggaagagtgagttcaggccgggcgcggtggctcacgcttgtaatcccagcactttgggaggccgaggcgggtggatcatgagatcaggagttcgagaccagcctaaccaacatggtgaaaccctgtctctaccaaaaatacaaaaattagccgggcgtggggtgcacatctgtaatccctgctactcaggaagctgaggcaggagaatcacttgaacccgggaggcagaggttgcagtgagctgagatcacaccaccgcactccggcctggatgacagaatgagactccatctcaaaaaagaaaaaaaaaaaaaaaaagttcggtccatatgattgaccttttagaccatctagaagattttaccaactggaaattttccaagtgttctcttctttgcatccattaagctttcagtcgcttcatctctttagattgtgaaatagtaggaaaatatctttgatcttatacagtgttctgcattattaatcctctatcacagctgaaaaatgcttttgcaaacatgtaaataaatccacttgaaacataccctgattcattgttgttttaatttctttagatgcagaggcaaatgccgtgtgtgaaattgtccatgtaaaatccgagtctgaagggaggccggagagggtctttcacttgtgctgcaggtgagcctgggcctgtaaagtcgaggccgtgttgacatttctgcagattggaacggtttggtgtcttacgttgtgttctggtgtttggtacgttgtttgtactgtaacatcactgagatgcagtaaatggagagtcagctgggaggagctgacagcttgtgaaggtgttatcgggattcctgatcatttggagcacatatggaggtcagcctgtgttgatcacctgcacgtcttgaggggaagctgggctcatgatgtgggcttctacttatttcttgttgtttttcttctaccctgccaccctcttttgcccttccttgtattctctccctccgccatgagaatttgaggtcttctcccatatgaaacctattcttttatttttctaaaaatacaagatagatgactccaacagatggcgtttaatatatttggctttaaatgtgcccgtattgaatcatgcttttatttatatatatatttatttatttatttattgaaacagagccttgctctgtcgcccaggctggagtgcagtggcatgatctcggctcactgcaacctctgcctcctgggttcatgccattctgctgcctcagcctcccgagtggctgggactacaggcatgtgccaccatgcccagctaattttttgtatttttatagagacggggtttcaccatgttagccaggatggtctcgatctcctgacatcgtggtctgcctgcctcggcctgccacagtgcttggattacaggcgtgagcaccacgtctggctaactttaatttaatcgtagatactcagtgatttactcagtaattacccagtacctcacacagtgagtactaatatactatggattacctacaaaagacaatagaatcaatattatgattattagcaatattttataatgttagtatggtaagaaggtacctttaccaagcatgaactatgctaaacaccttacattcattatttcatttagtcagaccaaggtattaggttggtacaaaaagaaactgcagtttttaccattaaaagtaattaaaagtgccattacttttaatggcaaaaactgcaattattttttgcaccaacctaatacaattcttactccagtttacaaatggggaagcaaggcttagagatggtacttagcctaaggccttatagagaatgaacactggtgctgggcatggtggctcatgcctgtaatcccagcactttgggaggccaaggcaggcggatcacttgaggtcaggagttcgaggccagcctggccaacatggcaaagccccgtctccactaaaaatacaaaagttagccatgcctggtggcaggtgcctttaatcccagctagttgggaggctgaggcaggacaatcacttgaacctgggaggtggaggttgcaatgagccaagatcataccactgcactccagcctgggcgacagagcgagactctgtgtcaaaaaaagaaagaaaaagaaaataaatggtgggtttaacctcaaaacccatgttttgtgttgctacatcagatctctctgtgttgggtgacagaggtcaacaaaaggcagatccccgggaagctgtcaggactataagtgaaatgttgtttgtataacctcgtggggtttgagcaccacctttaccgtctattttggctcatctgtttgtgattttgttggtaaggtccatggggtttagtagccctgcctacacggatgccgtatttattgttaatagggaataccaggtaaaacttacctgggtaaaaatattgggaatataataagaaaaataactcttcctaggaagcactttttttttttttttttaaccatgagaattaggacttgggaagattttatagttctttacagccttaatatatacatgttgaaatgtgtcatgggaaccattgatatttaccaggagggagctcagctctagaggacattaggacgttgagacgtcggcctttgggtgctctgcagagccgcaagaatcttgtggttcatttgccctcaaaaacattttataatgaaaaactctgccttgagtgccaggagcagaatttggcagcttcttggtacaaactcccactgtccatagatctgttcgttaatgggctactctgccccacatcagcgccaggagatagatcacaaagcatgaagggaaaggagttatgtgctctttatcactggcgtgaaatcaccgctcagcatagaaattggagtcaaggcctcagtctttagcctttggccctaagggatatttatttggttgcacctgataaccttagaagttccccatgtgttaagccctgattctctaacatctgtaaatcttcttttcctagctccccagagagccgaaaggatttcctaaaggctgtgcattcaatcctgcgtgataagcacagaagacagctcctcaaaaccgagagccttccctcatcccagcaatatgtcccttttggaggcaaaagattgtgtgcactgaagggggccaggccggccatgagcagggcaggtactgtggggattcggacgttcaagattcccgtcacccccactccgcagtagaactccagtgagcttgacctccttgttgagtgggggtgaggtgtggcctggtgggggctgatgtaggaggacggtttttccctggtgtgaggttccttgcccttgcctccttcccagtggctcctggggatccgccctgtatctacattcctcttgtcctccctcaagccttccctttgcctcccttctccttttggctggtgagctcctccctcatttgccaagtcgggttgcagacacatcctctttctggagaggctgtctcagcctgcttgcagaatgagagtcgctgctttgcatgacagccagctttgtctagcagaaagccgtgtgtcacatttcagcaaggtcacagccctctgttctgagaacatggtggcttcacggcctggcagcacagcaatgcctgctctcagtagtaaggattctaggtttggtagcccacatggcacttccagtttttatcctgaccttgtgcctgcaactttatttttagtctccatgttaatttggggaagcctcgagctattcttggaaacaagaatctagagtttaaatggtcccagcataaatattcttgtaggacttaatccattacagtggagcaatagagaaataaaataaatactgccacctgtcaatggtagcaaaatgtatctaggaagaaggctgttttaatacttagggacttaatgacatcaagatactaacatttttatcaaacctttcttaagaggcagcccagaattttgcagggaggatttcattaaaagaaggccccctttgcacttgccagaaaagtttctggcctttgtacccattaccatcctacctattgaagagggatggacagaagtgtgaatgcttgaaggttttcatagacaaaacctacctggcttgacatgggatattacattcttcaagcaccttaaatttaatttaggggactagttactgtaaacctcttctccaatcaattgataaatgtttgttgaaaacttagtgcagtgaacacccagcactttgctgagttttctgatgtatcctaagagtctttcatacgtccatatgcgcagtttcgcatggggtcgccatggaagaatagtttattggtcctttataactcactttagagatttttatcttggatttgtcttatctgcccctcttgtttgctagggaaatgtttaaaaaggtttgggaatatgtgtctcaacctcagggaactcaacctgtttcagttgttaatcaatgaacctaaattcagagctgcatttactttgaaactaagcatggttagtctgtcactcagaagttttcctgctgagatccatttggaaagaaaacaaaaccagcccacaatttaacaccatcgtccgtcatgattaccaagagaaagccttgatgtcatagcctgttggatttagctgattgaaagatctttctgcctgatggctcatttttggctgaagaaagtctgtatcactttgtttggaggcatctcactatcctcagaatcttcatgtcagaggattttaaaatggtgcctgagtagatcagcacagcatagctggtcagtcttaacagtgaccactggaaatagtcaaagattgcatccctgaaagactgggaagaacccaataatggtagccgggttcttaagcatactaggaacagatactcatgcttcattttgctttgtcttgaatactcaggtagtttatttctccctctgttctgtttggctaggatagtaaagccaaatactctgcttccatattcagcctaaagtactatacgtttgccaataacccaattaaaaatttttttctttgttctatctattttcttatgaaaatgtttaaacttatagaagagctgaaagaattcatacctaccatctatattctataatgtttttctatattctcattatcactcatctgttagaatccatctgtcatccatcacctcatcttatttttgacatatttcaaagatgtagacattaacacactttactcctagatacttcagcatgcaaatcattaacaaatatttccagtagctttgagttggggtagttctaatgtggtgattggagagagggatgctgtattttgctggtgctgagataaaagtgaacaagaatttttgtctcttctcaatagaagtcggagtttgtttgttttttttcctattttctattccctttttccattttgcctggaaatggcttttattcccatcctcaaccaacagtagtgtccatttgttccacagttttagatggcggaacactcaggaatagtgatggacacgcaggggtctgaagcagaggatggctgccatgagagccaattcagcccctcgttgaccactctaaccctgtgcctgctgggttcgaagtcaaggctgcatttggcagtaattgagacacgaggcatcttctagcagcactgaagcaattggatggttctggggcttaggtttcaggaaagcagctcccagttggcgttgagactcttcccctccactggaaagcccgtgttgcatttcaccttttcgtgtctaatgcaacaaccgcttcactctcgagggagaagcagaagccttccctgtgagcagtctcgtgtatgtgtgtggtgggattgttggcttgatcggatggtgtcttttgtttgcttgtttttaattctggcttcctagagggcagtaggtgaaagaatgaatttttcttaactggtagtcactttatacagcactttgttgatcaaactgcttggatgtcatcggttttttatttctcattccaatgaggcactgatatgttaattgctttggagaagaatgagtgatacacagactgtaattgggggagactaaggcacacatttgcttagcttcctagctcatgtgggactttgtcagaaagaagacagggaaataactgaagatcccatgtctttgagagccactctttttcataggctctctaagagtgacgtggtgcccttaatctaactgcagatcccaagaaatgttatgttccagttcccagaaaacaagtaacttacactggtgcttctgcctccttgatgcacattctacaaagacagcaaaaccatagatgcacccccacccttactaaagacctattccagctaaacaaccctgggacagccctggggatcttcatagcactgggccatgggacatggccaggattgaggacactaactcactaactgatccccaaatcagtggtctgtctacttgagagcagctgctgtctgtgttacccatctcttaggtgcacaggctagaacagtagattatttcagagggagttgagtgcccctttgcccataacctacaacctctcctgtgtgccccggttcccccttgcccttgcatcagttgctagaacatcctctaagtccagatacctcgacaaggtaaatgctccatgacagattggtgatatgtagactttaagccccaaaagacatcaaggcattcaatgcataccgttttggtttttattttctcctgtcctttgctttctggattttcatctcacgtaaagcatgtgggggttttatttttatatttttgtgtgtgtgtgcagtgtctgccccaagcaagtctcttgggaggaggaggcggcggctggctcgaaacaggtttaccattgattctgatgccgtctccgcaagcagcccggagaaagagtcccagcagccccccggtggtggggacactgaccgatgggtagaggagcagtttgatcttgctcagtatgaggagcaagatgacatcaaggagacagacatcctcagtgacgatgatgagttctgtgagtccgtgaagggtgcctcagtggacagagacctgcaggagcggcttcaggccacctccatcagtcagcgggaaagaggccggaaaaccctggatagtcacgcgtcccgcatggcacagctcaagaagcaagctgccctgtcggggatcaatggaggcctggagagcgcaagcgaggaagtcatttgggttaggcgtgaagactttgccccctccaggaaactgaacactgagatctgactgcgtcacctgccccgtagagaatgtgtgtagatacttcctgccctaactctgcccaccctcctgtaccgtcgacaagaatgtccccttaggtcgcgctcttgcacacacggttttggcagctgacttggttctgaagccatgtagccacccaactttgtcattttcaacaacatcagaaagaattgatcagaatcccaaataagcttgagtcctatcttctgtatattactaagggcttttatttattctcaataaatcagggcctgaacaattaaaagaaaaaagattctatagcactggaaagcaaatcaccccaggagttaacggatgtacaacagattaatttaagggatagtagcacacacacgatccttctatctgaaatcagtctcctagctggggaaacctctttcacacacaaaatgaaatgtgtacagcttgccgtgttctgactgtacccttccctcttccatgtctgagaatctccgtgtattttaagaatgtgtgaggagagggtggcgattcatgtttcaatgagcctctttttttttttccttcctgttttggtctatggctggtcttactctgtgtccatgttcggaagctctagttttgcatagaattatagagatgccaaactctttgaaaagagatccaaatttatcgcttgagagaaagaaaagaaacactattttttgtattttacctgagatacaggggcacaaatagatgagaattttacagtgttagtgtatgtatccctgagcctaaaaaatgaggatataaccttttacagagagagtgaggcgtggtggttttatatttatatatgaaaggccagcaagctcatgcgaaggatatacttttcttccaaaaagcggattttttttttttaatgtttgaatctatatttgagatgggagtttggttggattaaacatgacaccccggtgggcggtgtgtgtgtctgttgcacatggcagggaggggagcctccttctcatggggttgccatggtgatcattggtttttccatcaaaattgcatcttcatccatagattaccttccccttccctgacagtccataaccaaacctttaaacagaacaacctctttaaaaacttctcttgtgtttaacactttcttcatgccaacgaaacagggtaaacatgctcaaaacattaacagtctaaacagatatccaaatactaagaagaaaaacaagttatagcactttcaattttttttttttttttaaaaaaaggtttatagctttttcttttcccatgtcacaatgtccacttcctaagaagggtttaaaatactatgaaaactttctttttggggaaaatatctatttggtgtttgacacatcagtaggtactttaaagacctgaattttatagtagctttaggagttatattttataaaaatcagttatgactttatatttccagacaatagagagttcagtacatcatgctcttgtgcctctgcctgcttttcctgcgttcccaccctgtattccccccgcctttcgggtttccagggcttcgagcttgatcttttgaaagttttattctattaaatttttgctatatcttctggttttctgaaaaagctttagaatggtttctataccctttgtatcactgcatttttccatatcatctccggttcgatcgcgtccagatggaaaacggaagcagaggcttctaatcgtcgcatttactggctccagtgcaacacatccatctgaaaacactcggaagtctggtgcttggagagggtgccattgtctcttgtacataaggtcatgacgtgtctatgtcaaaagttcttatatatttcttttataagctgaaagaaggtctatttttatgtttttaggtctatgaatggaacgttgtaaatgcttgtcaaacaataaaaataacgaaaagtgtctgggcggttctatgcctttttggatgggaggatgagtatgaattgttggcgggagagcggccgtgggagaagattcctgggaatgccatttattgaaataactcgtgatcatcaggagaacgctgttgtagcgcttgaagttttaacaacaacaaaaggtgcattacagttgcatggcatcttgacctaacgttgcccctactgggcactgtttcttttccagtctcctgcctatcccgatgggagcaggctgggggggttcctgtgaaaatattggggtgaagtgcagagctctgactggcctgactgagctcttgaatcactccacattttatcaccgggggcctgctgcctgagtctttcacagaatcaccaaacaaggtaaatacagtcttgggctgcctttctcttcctgtcagagtccccagatctgagcctctcgagtcccttacaaaccttacccatcaatgttaccccatccatccctgccctcagtgaaaagattgtctcctgtcactagaagagcctctccctggcgcatggggagccctgtggtgtagctacttgctcctcacagtggaggtcctgacaccagcagcgtcggtgtcactgggagcttgttggaagtgcagaaaactgggaggcaggaggagcacttgaggctagaagttcgagaccagcctgggcaacatagtgagacccccatctctacgaaaaataaaatacttagctagtcgtggtggttcacacctttagtcccagctactcaggaggctgaggtgggaggtgagctcaggaatttgaggcttgcagtgaactgtgatcatactgttgcactcccgcctgggaaacagagaccctgtctcagaaaagaaaaatgcagaaacttgggccccacccagaggcactaaaccagaacttccatcttaacaggatcctctgatgactcatccatgttcatgtttgagtcacattcgtttggtagcctccaaacattctgatgttgagcagtgatttggagcacattcctctttattttaaatatattcaggcattacagcagcaatatgtacatctttaagacacaagatgtctctctgtagccagtgcatccgacttgggggatgactgaagccagctttaacacctgctccatgaagttattccagcagtttgtactctggtgtaaatgagatttagcagtttgggctgctttcctcaccaatagctgagcctgtgtgtgcagaggaaatgagtgctcaaagtcaactatagaggaacaatcatgcctttccccactagttttcatttattttcaggctcatctccctcccaccaggctggcagaaaacatcctcagttttcctctccctttcagttcttaaggtttgggggcggggtgcttccttctgcaaagataactgtagcagtgaccagtgtcctcatccatccacgagctccttcacgcgtgatggtgggctctctagtgtatccttttgctcacccaggattcttctgcagcctggtccccggtgttctgtctcctctctgggacgttgccaggatgcctcccccaagttctggtccctccccttccacagagctctcctgactgtatccccagccaggggctattgcctttttttttttttttttttgagagggagtctcacactgtcacccagggtggagtgcagtggcgtgatctcggctcactgcaacctccgcctcccaggttcaagggattctcctgcctcagcctcccgagtagatgggattatagtcgcccgccaccacgcctggctaatttttttgtatttttagtagagacaaggtttcactatgttggtcaggctggtctcgaatgcctgacctcgtgatccacccacctcagcctcccgaagtgctgggattacaggcatgagccatcgtgccctgctggctattgccttttctgtgtgtgtgtggttatggggatgaggacagtgaagctgggttgcagtggggagcccttaccttgtgtctttttgcaaattttttgttgatacccaagttttataggcagttctgctttttgatgcaaacctattctgggatagggaatccctgtgacagttgccttagaagggaggtgttgagcaggttggggggaagtcatgaaaatacaaggagagaaagaaatactcaaaatattcagccacttacgtagagaatgtgtgagatcaaaattgcagtgtcatggccggtgctgtggctcgcacctgtaatcccagcactttggggggccgaggcgggtggatcacttgaggtcaggagttcgagatcagcctggccaatgtggtgaaatcccacctttactaaaaatacaaaaattagccaggcgtggtggcacacatctgtaatcccagcaacttgggaggctgaggcagaagaatcacttgaacccgggaggtggggctgcagtgaactgagattgccgtgccgcactgcactccagcctgggcaacagagtaaaactccatctcaaaaaaaaaaaaggcagtgtcacaatccccctaggcttctctaaaggaagtcattgttggtagaaggaaaaaggagtattcagaacacaaatcatgaatgtgtaaggcttctgtaaacacatggagtatggatgctgttggcaagatactgtctcctgctgaacagtgcaggggtagaaaccctcccaggtcgtgttcctgggatcaccttgtttccattcttctgcctgtcatatgcctctccgcctccaccatgtaccaatagaatgcattgcatagaaaacctcattcgtcgacaatggagtttattctggtctattctttctacatcttgaagcaacctttagcccatacattctactgtttcagtaagtcaatttctgctgtcactgagtccaccacctcgactgtgttcctgagtgagatgtgagtcacgcacatcttcatgtcactgctgtcgaactgggctgacggcttctaacttgtgtgcagtagatcctctgctgttgtcacttgggatttatttctctctctctctctctctctgtctgtctatctctctctctctctttcttctcactctgtcacccaggttggagtgcagtggtgtgatctcggctcactgcaacctccgcctcccaggttcaagcagttgtccgtgcctcagcatcccaagtagctaggatcacttgcccagctaatttttgtatattttggtagagacagggtttcaccacgttggccagcctggtctcgaacatctgacctcaggtgagccacccgccttggcctcgcaaagtgctgtgattacaggcagtcccttgggattaaaaatgacaagggatttagactatgtgtgcacaccttgcactttctgtacagtcaactaccctcaggttggggaggtgtgacgcttttttaaaaaacccaaatccagggtccctaatatttttttaaaaattcaggaatcacataatccttcagaatttttttttccatgttcttcaacatacttcatacccaggtcaagccgaagttagatttttttagcccaagaggccctagtgggattactttcagctttctgggcaccagcttcatcgtttttaacttcgatacttagtttcttgtcttgaacaccacctggggcttcctgggctgttcccaagaatgatttggttacaggatgtcctgtgttctgttctgctgtactctgtgcttgggtgttccgcgtggtgccattaccttgtattttagacattaatggttggttaattataggcccctcactttcaatcaagatggtaacatttgattgtccttgattggtttgttgaatatatgcatggggtgtgcatgtgtgcacacacacacttaaaagtgagtttatattttattaacatacagttttgttaacctgatttttactcttaatgatacaagttgtagacattttcttgacattctaaaaaggtctgcgtcactgtaagtcatggccacatccatcataatagtcatagttcaccgtaatttacataaccaattccctgctgatgggcatgaaggattccaggggttttattttgttattaagaaaacatgatgaacacccatattggatatttctgtgcactggtccagttgcttcctgagggaatactgaagaggtagctttgggaacatttatatacattttaaagatcttgattgccatttctaaattctaagatgctgtattcctgtttggcttctggtgagatgtcaagatcctacttcctgtctagtgtgtccactttgtcacagaaatggcttttccacctgagtttgtatttcgattatttgggccggatatgcttggtgagctgggacttctcccactcctgtcctcctttctctgttcacactcagttttttgttttgttttgagatggagtctcgctctgtcgccaggctggagtgcaatggggcgatctcggctcactgcaaccgctgccacccaggttcaagcgattcccctgcctcagcctcccgagtagctgggactacaggcatgtgccaccacgcccggctaatttttttgtagagacagggtttcaccatgttggccaggatggtctcgatctcctgacctcgtgatccacccgcctcaacctcccagagtgctgggattacaggcacactcagttttactgttagtctttagggtattgggtgtttctggtgacaggagttgagcatccatgaactccccttcaaagtttcagagattttaaatattcccttacctcatacatgctgtctgatgtcttgcctccagatttaaatgaaggttgagttttttatgatattgatgaaatcagttttatatgacagacatggccattttgaggaataaggatttattgacttttttttttttaaggtttgaatagactcaatagttggaccagtgatgtcacaggactaggtctcaagtgaccataatcttacaattcactcctaaactccaggagatgggaaagtggtaattgctccaggaatagagttgtttagtttggggaatggacagaaagtcaaggtagggacggagtgtcattcacttgaaacaaatcttgataccttttactaagagcccttgcataaaagatgtgtttttgtggaaaactagggaaacagacaatgactggcaggtctcgtattaacctttcaagtctcagggagtttctcgccaccagctggagtaaggtgcatcagacccaatagagcaatgatccttgaaccaaaatgtgactttccaagggttcaagggtgcagatggtttaaggggaatccttatctagatactcaatgtcaaatgccctttcctaaaactgatctgcttgggaatgtgcttgtgataaactgcacattctcttccctccctcccttttgacagtcatcttgctcccattttattaaaaaaagagactcctctcagctgtcctggattgtacttagaggaagaacctctgggataccaaacaaatggtcacagagaagtggtgtgttcggaaagtaaatgacaccaccgaccaggaagctaatccttcggtaagccaggtggtttctaattatttgctcctaatcagtttgaagaaggacctaatcaagtcgtcaggtgataaatcattaattatagatgatatctctgatttggtgcagataattcaagaggtcagagaattgagtggcacataaaactgccgtaattaaacttctttcactcccagtagtcttcaaacaaggcttttctgtgcttgcatctacaaaaatgaaaagtagaaatagaattgatgcagaactctgtctagctaaaaataagatccactgactggatacatgaactaattgaaaaataaaaatatccatttcatttaagagattatttccagtgaaattttactctttatatttgatatttttatgtatctctctctctctctctctctctctctctctctctctatatatatatatatatatatatatacccatatataaactctctctctctctctctgtgtatatatatataaactccagcagatgggaaagtggtaatggctccaggaacagagttgtttagtttggggaatggatagaaagtcaaggtagggatggagtgtcattcacttgaaataaaccttggtaccttttactaaaatatatatatatatatacatacacttttttttttggcggtggagggggacagggccttgctctgtcacccaggctggagtgcaagagcgcaatcatagctcactgcagcctcaaatcggattcaggcgatcctcccacctcagcctcctgaacagctgagactacagacacatgccatgacccctggggctaatttttacattttttgtagagacaggatctccgtatgttgcccaagctggtctggaactcctggcttcaagcagttttcccaccttagcctcccaaagtgctgggatcacaggcatgagccactgtgcctagctgatatatttttatattggtcaatcgtctaccaataataattgcagtgataacacaatccataagtgattttttaaaaaaatagttggagctttatggtcataggaaatgccaaaacttttaacatagacatttatctagatctttgttctagagaagtttgatagggtaataggatataataggatattagaaaatggggctaaaagaaaaaaggaatgatgtgaaatttttgagtttttaaatgtatcctttgaatggatgatgagcattaaattgatttgggattttggatacactggatacattaaaactgacataatagttttatttgaaaatatcaaattttataatatgtaagtgtatcaattgctaggtaacaaaagcaccctaaggcttagtggcttaatacaacaagcacttatgctgttcatgaatctgggggtttagctgggtagttctggacttggctgggttggtggagctccgtggtcagctggcggttcagctcagctggggctgcatgttctcacaccctgtggcctcacgtatgtgtcagttggaaggctgcttggtctaggaacctcagccaggagagcttcacgtggtctctcttccaccggtagactagcataggcttccttacatggtgactgcaggttccaaagagtagcaggagcaagccccagaacacaagtgattttcaggcttcttcctgattcaccttttcataacccttggcaaaagcaagccgtgtgtccagttgggaaggaactctccagggtcatggatccagggaagtgtgactccttagggaccattactgcagtaatctaccatagccagacatagcatcctttgaaactacttaaattggtaataaaaacatttattatgacatttagctgtcagaaggaatatattttcaaaattatcttagggagtttctgagaagaaattggaaatttttacagagaagtcagagttattgtcgagggcagtccaggctttctcactcttcccctctgtattgagaacagggcgtctgaatggagaggaagtgcatgggctttggggtgggccccctgtgtgcttgaaccttgacatttctgttgaccagctgtgtgaacctgggcaaaacaccaatgcttctgtgtctctttctgcacctctgcagtggggataataatacctactttatcattgtgaccaattagtggtcaccacctgctgtgtctctctctccctcccgcagcccacatcgacaaagctgcagggcctcaatgttctcagtgttctgagatgatgagatggtgccaagttcgctttggaagcttctagctctggttttgacaaatcaagtgaaaattggcatttgtagagaacaagctggaaaatgcctttattctaattacagttttgtatccacttgtaaagttattcaccgccctgttaaatatataaaagttaatctagacttaaaagtgatctaagtgattagaataaaaataaacattttcatattgaattttaaataatggaaaagctaccttgaaagtgtgttcaatttttgtactggtttttttttttgttttttttttttgagacggagtctcactctgttgcccaggctggagtgcagtggcaccgtctcggctcaccgcaacctccgcttcccaggttcaagcgattctcctgcctcagcctcccaagtagctgggactacaggtgatgccaccatgcctggctaatttttgtatttttagtagggacggggtttcactatgttggccaggatggtctcgaactcctgacctcgtgatctgcctgcctcggcctcccaaagtgctggaattacaggggtgagccactgcgcccggcctgatttttaaagcaaatatggaagctgtaatcaaactagcaatttgtgggtgagccctgtgtcactgctgtattactcaataattcatgttcagatagctgagtctgaagtaccccagtttgggaattaaaaaagaattaaaacccataatctatatcttagctaagataggaaaaatttactaaaatatttttttctggttgaatttcagatttctcctataactctgcacaccagaaaaaaatctatagtacaaatacacatgaaattccatcaactgtttcatttttttttaatttttcttaatcttgttcagggcatacacaatttgttttacttaaaattatattattcactcaatttttataaggaacacacttgagaattctaccagagttttattgatactgctctttcttaagcagttgatcttgaaattctcttaaaaaattatatttgagttttaaaacttgtaattgcctgtgagaggaaaataatttttctttctatccttcttagtttttaactgggatctgtgtaacaaaagacagattattaaaagcaaacagaagctgattaacaagtatatttcatatacacatgggagaaaactcagagaaagagtaactgtcaaagaggtggctgagaactttgctgtatatagtacctttaacaaagagcagtacatctttagagaagtgacaagacaaggaaaaggaccttcagtctttaggggtggcaaattgtgggaaggcaaataaacagaaaggaaactaagggtggataaaggctagtttgtcatgtggattcctctggtgccatcttcaggttgataaggctgtaaagtcatctctttttggtaaagacgagaggagggaccctgatgtaaatctgttttgcttttaggcaaataggggaagggcagagagcttttctcctatctgcttcttctcaattgccttcatctcagaagaatccttatgtcggccgggcacagtggctcacgcctgtaatctcagcattttgggaagccaaggcgagcagatcacttgaggtcaggagttcgtgaccagcctgaccaacatgggaaaaccccgtctctactaaaaatacaaaaattagccagacgtgatggtgcatgcctgtaatcccagctacttaggaggctaaggcaggagaatcgcttgaacctgggaggcggaggttgcagtgaggcgagattgtgccactgcactccagcctgggcaacagagcaagatttggtctcaaaaaaaaataaaataaaataaaaaagaaaagaaaggttccttatgccaaagtgtcaaattttgaggtgttatatttgctacccttcagttgttattttcttttgctcatttttctgtaatagcccagaaaagttggtctgatttttatttattaagagctctcttatgaagacagcttgtccaggataattcttatgtttcagatctacagactccagcaatatcactaatcccgggagtgggatcccaggctgccactgccatgtggtggggcctcagaggggatccctctctgcca

SEQ ID NO: 39 - DNA, 7125 bp, Homo sapiens
gctttgaaggactttctaggggcatcaagggtagaatcactgtggactgagacccacctttctagacctgaagcccaggaggaggaagaggaggctggttggtaccatgggcataatgctctgaatcctagtctctcacctagtatgtgagcagtccctgcagatggcccatttggagatcttgacaaagcctcttctgtttccaatggggtttttggcgcattctcacagacttagatgaaactgtgatggccaccgcagggggcaggtgctgacatcgtccccagccctgtggctgttcatccggacatcatttccaacctcaatatctaaatgccacagtgctcttggagcaagttgggctggggaccactgttgccttttaagaccataaaaccatgggaaacgcagaaagtcaacatgtagagcacgagttttatggagaaaagcatgccagcctggggcgcaagcacacttcccgctccctgcgcctctcgcacaagacgcggaggaccaggcacgcttcctcggggaaggtgatccacaggaactccgaagtgagcacccgatccagcagcacccccagcatcccccagtccctggctgaaaatggcctggagcccttctcccaagatggtaccctagaagacttcgggagccccatctgggtggaccgagtggacatgggcttgagacctgtgtcttacactgactcttctgtcactcccagcgtagacagcagcatcgtcctcacagcagcctctgtgcagagcatgccagacactgaggagagcaggctttacggggatgacgctacatatttggctgagggaggcaggaggcagcattcctatacatccaatgggcccactttcatggagacggcgagctttaagaagaaacgctccaaatctgcagacatctggcgggaggacagcctggaattctcactctctgatctgagccaagaacatttaacaagcaacgaagaaatcttgggttccgccgaagagaaggactgcgaggaggctcgggggatggaaacgcgggcgagtccgcggcagctcagcacctgtcagagagccaattccttgggtgacttgtatgctcagaaaaactctggagtgacagcaaacggggggccggggagcaaatttgcaggctactgtcggaatttggtgtctgatattcccaatcttgcaaaccataagatgccaccagctgctgctgaagagactcctccgtacagtaattataacacacttccctgtaggaaatctcactgtctctctgaaggtgccaccaacccacaaattagccatagcaacagcatgcaaggcagaagagctaaaacaactcaggatgttaatgcaggcgagggcagtgagtttgcagacagtgggattgaaggggccactaccgacacggacctcctgtccaggcgatctaatgccaccaactccagctactcacccaccacaggccgggcctttgtgggcagcgacagcggcagcagctccaccggggatgcggctcgtcagggggtgtacgagaacttccggcgggagctggagatgagcaccaccaacagcgagagcctggaggaggccggctcggcgcacagcgatgagcagagcagcggcaccctgagctctccgggccagtcggacatcctgctgaccgccgcacagggcacggtgcgcaaggccggcgccctggccgtcaagaacttcctggtgcacaagaagaacaagaaggtggagtcagccacccggaggaagtggaagcactactgggtgtccctgaaaggatgcacgctatttttctacgagagcgacggcaggtctgggatagaccacaacagcatccccaaacacgccgtctgggtggagaacagcattgtgcaggcggtgcctgagcaccccaagaaggactttgtcttctgcctcagcaattccctgggtgatgccttcctttttcagaccactagccagacggagcttgaaaactggatcaccgccatccactctgcctgcgccactgcggtcgcgaggcaccaccacaaggaagacacgctccgactcctgaaatcagagatcaaaaaactggaacagaagattgacatggatgaaaagatgaagaaaatgggtgaaatgcagctgtcttcagtcactgactcaaagaaaaagaaaacaatattagatcagatctttgtctgggagcaaaatctcgagcagttccaaatggacctgtttcgtttccgctgttatttagccagccttcagggtggggagctgccaaaccccaaaaggcttctcgcttttgcaagtcgaccaacgaaagtggccatgggccgccttggaatcttttcggtatcatcgtttcatgccctggtggcagcacgcactggtgaaactggagtgagaagacgtactcaggccatgtccagatccgcgagcaagcgaaggagcaggttttcttctctgtggggtctggatactacctccaaaaagaagcagggacggccaagcatcaatcaggtgtttggagagggaaccgaagctgtaaagaaatctttagagggaatatttgatgacattgttccagatggcaagagggagaaagaagtggtcttacctaacgttcaccagcacaaccctgactgcgacatttgggtccacgagtatttcactccatcctggttctgtctgcccaataatcagcctgccctgacggtcgtccggccaggcgacactgcacgggacaccctggagctgatttgcaagacacatcaactggatcattctgctcattacctgcgcctgaaatttctaatagaaaacaaaatgcagctctatgttccacagcccgaggaagacatctatgagctgctgtacaaagaaattgaaatctgtccaaaagtcactcagagcatccacattgagaagtcagatacagctgctgatacttacgggttttcactttcttctgtggaagaagatggtattcgaaggctgtacgtgaatagtgtgaaggaaaccggtttagcttccaagaaaggcctgaaagcaggagatgagattcttgagatcaataatcgtgctgctgacgccctgaactcttctatgctcaaagatttcctctcacagccctcgctgggcctcctggtgaggacctaccccgagctggaggaaggagtggagctgctggaaagcccgccccaccgagtggacggccctgccgaccttggcgagagccccctcgcctttctcaccagcaacccagggcacagcctttgcagcgagcagggcagcagtgctgagaccgctccagaggagaccgaggggccagacttggaatcctcagatgagactgatcacagcagcaagagtacagaacaggtggccgcattttgccgcagtttgcatgagatgaacccctctgaccagagcccatctcctcaggactccacggggcctcagctggcgaccatgagacaactctcggatgcagataagctgcgcaaggtgatctgcgagctcctggagacggagcgcacctacgtgaaggatttaaactgtcttatggagagatacctaaagcctcttcaaaaagaaacttttctcacccaggatgagcttgacgtgctttttggaaatttaacggaaatggtagagtttcaagtagaattccttaaaactctagaagatggagtgagactggtacctgatttggaaaagcttgagaaggttgatcaatttaagaaagtgctgttctctctggggggatcattcctgtattatgctgaccgcttcaagctctacagtgccttctgcgccagccacacaaaagttcccaaggtcctggtgaaagccaagacagacacggctttcaaggcattcttggatgcccagaacccgaagcagcagcactcatccacgctggagtcgtacctcatcaagcccatccagaggatcctcaagtacccacttctgctcagggagctgttcgccctgaccgatgcggagagcgaggagcactaccacctggacgtggccatcaagaccatgaacaaggttgccagtcacatcaatgagatgcagaaaatccatgaagagtttggggctgtgtttgaccagctgattgctgaacagactggtgagaaaaaagaggttgcagatctgagcatgggagacctgcttttgcacactaccgtgatctggctgaacccgccggcctcgctgggcaagtggaaaaaggaaccagagttggcagcattcgtcttcaaaactgctgtggtccttgtgtataaagatggttccaaacagaagaagaaacttgtaggatctcacaggctttccatttatgaggactgggaccccttcagatttcgacacatgatccccacggaagcgctgcaggttcgagctttggcgagtgcagatgcagaggcaaatgccgtgtgtgaaattgtccatgtaaaatccgagtctgaagggaggccggagagggtctttcacttgtgctgcagctccccagagagccgaaaggatttcctaaaggctgtgcattcaatcctgcgtgataagcacagaagacagctcctcaaaaccgagagccttccctcatcccagcaatatgtcccttttggaggcaaaagattgtgtgcactgaagggggccaggccggccatgagcagggcagtgtctgccccaagcaagtctcttgggaggaggaggcggcggctggctcgaaacaggtttaccattgattctgatgccgtctccgcaagcagcccggagaaagagtcccagcagccccccggtggtggggacactgaccgatgggtagaggagcagtttgatcttgctcagtatgaggagcaagatgacatcaaggagacagacatcctcagtgacgatgatgagttctgtgagtccgtgaagggtgcctcagtggacagagacctgcaggagcggcttcaggccacctccatcagtcagcgggaaagaggccggaaaaccctggatagtcacgcgtcccgcatggcacagctcaagaagcaagctgccctgtcggggatcaatggaggcctggagagcgcaagcgaggaagtcatttgggttaggcgtgaagactttgccccctccaggaaactgaacactgagatctgactgcgtcacctgccccgtagagaatgtgtgtagatacttcctgccctaactctgcccaccctcctgtaccgtcgacaagaatgtccccttaggtcgcgctcttgcacacacggttttggcagctgacttggttctgaagccatgtagccacccaactttgtcattttcaacaacatcagaaagaattgatcagaatcccaaataagcttgagtcctatcttctgtatattactaagggcttttatttattctcaataaatcagggcctgaacaattaaaagaaaaaagattctatagcactggaaagcaaatcaccccaggagttaacggatgtacaacagattaatttaagggatagtagcacacacacgatccttctatctgaaatcagtctcctagctggggaaacctctttcacacacaaaatgaaatgtgtacagcttgccgtgttctgactgtacccttccctcttccatgtctgagaatctccgtgtattttaagaatgtgtgaggagagggtggcgattcatgtttcaatgagcctctttttttttttccttcctgttttggtctatggctggtcttactctgtgtccatgttcggaagctctagttttgcatagaattatagagatgccaaactctttgaaaagagatccaaatttatcgcttgagagaaagaaaagaaacactattttttgtattttacctgagatacaggggcacaaatagatgagaattttacagtgttagtgtatgtatccctgagcctaaaaaatgaggatataaccttttacagagagagtgaggcgtggtggttttatatttatatatgaaaggccagcaagctcatgcgaaggatatacttttcttccaaaaagcggattttttttttttaatgtttgaatctatatttgagatgggagtttggttggattaaacatgacaccccggtgggcggtgtgtgtgtctgttgcacatggcagggaggggagcctccttctcatggggttgccatggtgatcattggtttttccatcaaaattgcatcttcatccatagattaccttccccttccctgacagtccataaccaaacctttaaacagaacaacctctttaaaaacttctcttgtgtttaacactttcttcatgccaacgaaacagggtaaacatgctcaaaacattaacagtctaaacagatatccaaatactaagaagaaaaacaagttatagcactttcaattttttttttttttttaaaaaaaggtttatagctttttcttttcccatgtcacaatgtccacttcctaagaagggtttaaaatactatgaaaactttctttttggggaaaatatctatttggtgtttgacacatcagtaggtactttaaagacctgaattttatagtagctttaggagttatattttataaaaatcagttatgactttatatttccagacaatagagagttcagtacatcatgctcttgtgcctctgcctgcttttcctgcgttcccaccctgtattccccccgcctttcgggtttccagggcttcgagcttgatcttttgaaagttttattctattaaatttttgctatatcttctggttttctgaaaaagctttagaatggtttctataccctttgtatcactgcatttttccatatcatctccggttcgatcgcgtccagatggaaaacggaagcagaggcttctaatcgtcgcatttactggctccagtgcaacacatccatctgaaaacactcggaagtctggtgcttggagagggtgccattgtctcttgtacataaggtcatgacgtgtctatgtcaaaagttcttatatatttcttttataagctgaaagaaggtctatttttatgtttttaggtctatgaatggaacgttgtaaatgcttgtcaaacaataaaaataacgaaaagtgt

SEQ ID NO: 40 - protein, 1575 aa, Homo sapiens
MGNAESQHVEHEFYGEKHASLGRKHTSRSLRLSHKTRRTRHASSGKVIHRNSEVSTRSSSTPSIPQSLAENGLEPFSQDGTLEDFGSPIWVDRVDMGLRPVSYTDSSVTPSVDSSIVLTAASVQSMPDTEESRLYGDDATYLAEGGRRQHSYTSNGPTFMASFKKKRSKSADIWREDSLEFSLSDLSQEHLTSNEEILGSAEEKDCEERMRDRQLSTCQRANSLGDLYAQKNSGVTANGGPGSKFAGYCRNLVSDIPNLANHKMPPAAAEETPPYSNYNTLPCRKSHCLSEGATNPQISHSNSMQGRRAKTTQDVNAGEGSEFADSGIEGATTDTDLLSRRSNATNSSYSPTTGRAFVGSDSGSSSTGDAARQGVYENFRRELEMSTTNSESLEEAGSAHSDEQSSGTLSSPGQSDILLTAAQGTVRKAGAVKNFLVHKKNKKVESATRRKWKHYWVSLKGCTLFFYESDGRSGIDHNSIPKHAVWVENSIVQAVPEHPKKDFVFCLSNSLGDAFLFQTTSQTELENWITAIHSACATAVARHHHKEDTLRLLKSEIKKLEQKIDMDEKMKKMGEMQLSSVTDSKKKKTILDQIFVWEQNLEQFQMDLFRFRCYLASLQGGELPNPKRLLAFASRPTKVAMGRLGIFSVSSFHALVAARTGETGVRRRTQAMSRSASKRRSRFSSLWGLDTTSKKKQGRPSINQVFGEGTEAVKKSLEGIFDDIVPDGKREKEVVLPNVHQHNPDCDIWVHEYFTPSWFCLPNNQPALTVVRPGDTARDTLELICKTHQLDHSAHYLRLKFLIENKMQLYVPQPEEDIYELLYKEIEICPKVTQSIHIEKSDTAADTYGFSLSSVEEDGIRRLYVNSVKETGLASKKGLKAGDEIINNRAADALNSSMLKDFLSQPSLGLLVRTYPELEEGVELLESPPHRVDGPADLGESPLAFLTSNPGHSLCSEQGSSAETAPEETEGPDLESSDETDHSSKSTEQVAAFCRSLHEMNPSDQSPSPQDSTGPQLATMRQLSDADKLRKVICELLETERTYVKDLNCLMERYLKPLQKETFLTQDELDVLFGNLTEMVEFQVEFLKTLEDGVRLVPDLEKLEKVDQFKKVLFSLGGSFLYYADRFKKAFCASHTKVPKVLVKAKTDTAFKAFLDAQNPKQQHSSTLESYLIKPIQRILKYPLLLRELFALTDAESEEHYHLDVAIKTMNKVASHINEMQKIHEEFGAVFDQLIAEQTGEKKEVADLSMGDLLLHTTVIWLNPPASLGKWKKEPELAAFVFKTAVVLVYKDGSKQKKKLVGSHRLSIYEDWDPFRFRHMIPTEALQVRASADAEANAVCEIVHVKSESEGRPERVFHLCCSSPESRKDFLKAVHSILRDKHRRQLLKTESLPSSQQYVPFGGKRLCALKGARPAMSRAVSAPSKSLGRRRRRLARNRFTIDSDAVSASSPEKESQQPPGGGDTDRWVEEQFDLAQYEEQDDIKETDILSDDDEFCESVKGASVDRDLQERLQATSISQRERGRKTLDSHASRMAQLKKQAALSGINGGLESASEEVIWVRREDFAPSRKLNTEI

SEQ ID NO: 41 - DNA, 7095 bp, Homo sapiens
gtagaatcactgtggactgagacccacctttctagacctgaagcccaggaggaggaagaggaggctggttggtaccatgggcataatgctctgaatcctagtctctcacctagtatgtgagcagtccctgcagatggcccatttggagatcttgacaaagcctcttctgtttccaatggggtttttggcgcattctcacagacttagatgaaactgtgatggccaccgcagggggcaggtgctgacatcgtccccagccctgtggctgttcatccggacatcatttccaacctcaatatctaaatgccacagtgctcttggagcaagttgggctggggaccactgttgccttttaagaccataaaaccatgggaaacgcagaaagtcaacatgtagagcacgagttttatggagaaaagcatgccagcctggggcgcaagcacacttcccgctccctgcgcctctcgcacaagacgcggaggaccaggcacgcttcctcggggaaggtgatccacaggaactccgaagtgagcacccgatccagcagcacccccagcatcccccagtccctggctgaaaatggcctggagcccttctcccaagatggtaccctagaagacttcgggagccccatctgggtggaccgagtggacatgggcttgagacctgtgtcttacactgactcttctgtcactcccagcgtagacagcagcatcgtcctcacagcagcctctgtgcagagcatgccagacactgaggagagcaggctttacggggatgacgctacatatttggctgagggaggcaggaggcagcattcctatacatccaatgggcccactttcatggagacggcgagctttaagaagaaacgctccaaatctgcagacatctggcgggaggacagcctggaattctcactctctgatctgagccaagaacatttaacaagcaacgaagaaatcttgggttccgccgaagagaaggactgcgaggaggctcgggggatggaaacgcgggcgagtccgcggcagctcagcacctgtcagagagccaattccttgggtgacttgtatgctcagaaaaactctggagtgacagcaaacggggggccggggagcaaatttgcaggctactgtcggaatttggtgtctgatattcccaatcttgcaaaccataagatgccaccagctgctgctgaagagactcctccgtacagtaattataacacacttccctgtaggaaatctcactgtctctctgaaggtgccaccaacccacaaattagccatagcaacagcatgcaaggcagaagagctaaaacaactcaggatgttaatgcaggcgagggcagtgagtttgcagacagtgggattgaaggggccactaccgacacggacctcctgtccaggcgatctaatgccaccaactccagctactcacccaccacaggccgggcctttgtgggcagcgacagcggcagcagctccaccggggatgcggctcgtcagggggtgtacgagaacttccggcgggagctggagatgagcaccaccaacagcgagagcctggaggaggccggctcggcgcacagcgatgagcagagcagcggcaccctgagctctccgggccagtcggacatcctgctgaccgccgcacagggcacggtgcgcaaggccggcgccctggccgtcaagaacttcctggtgcacaagaagaacaagaaggtggagtcagccacccggaggaagtggaagcactactgggtgtccctgaaaggatgcacgctatttttctacgagagcgacggcaggtctgggatagaccacaacagcatccccaaacacgccgtctgggtggagaacagcattgtgcaggcggtgcctgagcaccccaagaaggactttgtcttctgcctcagcaattccctgggtgatgccttcctttttcagaccactagccagacggagcttgaaaactggatcaccgccatccactctgcctgcgccactgcggtcgcgaggcaccaccacaaggaagacacgctccgactcctgaaatcagagatcaaaaaactggaacagaagattgacatggatgaaaagatgaagaaaatgggtgaaatgcagctgtcttcagtcactgactcaaagaaaaagaaaacaatattagatcagatctttgtctgggagcaaaatctcgagcagttccaaatggacctgtttcgtttccgctgttatttagccagccttcagggtggggagctgccaaaccccaaaaggcttctcgcttttgcaagtcgaccaacgaaagtggccatgggccgccttggaatcttttcggtatcatcgtttcatgccctggtggcagcacgcactggtgaaactggagtgagaagacgtactcaggccatgtccagatccgcgagcaagcgaaggagcaggttttcttctctgtggggtctggatactacctccaaaaagaagcagggacggccaagcatcaatcaggtgtttggagagggaaccgaagctgtaaagaaatctttagagggaatatttgatgacattgttccagatggcaagagggagaaagaagtggtcttacctaacgttcaccagcacaaccctgactgcgacatttgggtccacgagtatttcactccatcctggttctgtctgcccaataatcagcctgccctgacggtcgtccggccaggcgacactgcacgggacaccctggagctgatttgcaagacacatcaactggatcattctgctcattacctgcgcctgaaatttctaatagaaaacaaaatgcagctctatgttccacagcccgaggaagacatctatgagctgctgtacaaagaaattgaaatctgtccaaaagtcactcagagcatccacattgagaagtcagatacagctgctgatacttacgggttttcactttcttctgtggaagaagatggtattcgaaggctgtacgtgaatagtgtgaaggaaaccggtttagcttccaagaaaggcctgaaagcaggagatgagattcttgagatcaataatcgtgctgctgacgccctgaactcttctatgctcaaagatttcctctcacagccctcgctgggcctcctggtgaggacctaccccgagctggaggaaggagtggagctgctggaaagcccgccccaccgagtggacggccctgccgaccttggcgagagccccctcgcctttctcaccagcaacccagggcacagcctttgcagcgagcagggcagcagtgctgagaccgctccagaggagaccgaggggccagacttggaatcctcagatgagactgatcacagcagcaagagtacagaacaggtggccgcattttgccgcagtttgcatgagatgaacccctctgaccagagcccatctcctcaggactccacggggcctcagctggcgaccatgagacaactctcggatgcagataagctgcgcaaggtgatctgcgagctcctggagacggagcgcacctacgtgaaggatttaaactgtcttatggagagatacctaaagcctcttcaaaaagaaacttttctcacccaggatgagcttgacgtgctttttggaaatttaacggaaatggtagagtttcaagtagaattccttaaaactctagaagatggagtgagactggtacctgatttggaaaagcttgagaaggttgatcaatttaagaaagtgctgttctctctggggggatcattcctgtattatgctgaccgcttcaagctctacagtgccttctgcgccagccacacaaaagttcccaaggtcctggtgaaagccaagacagacacggctttcaaggcattcttggatgcccagaacccgaagcagcagcactcatccacgctggagtcgtacctcatcaagcccatccagaggatcctcaagtacccacttctgctcagggagctgttcgccctgaccgatgcggagagcgaggagcactaccacctggacgtggccatcaagaccatgaacaaggttgccagtcacatcaatgagatgcagaaaatccatgaagagtttggggctgtgtttgaccagctgattgctgaacagactggtgagaaaaaagaggttgcagatctgagcatgggagacctgcttttgcacactaccgtgatctggctgaacccgccggcctcgctgggcaagtggaaaaaggaaccagagttggcagcattcgtcttcaaaactgctgtggtccttgtgtataaagatggttccaaacagaagaagaaacttgtaggatctcacaggctttccatttatgaggactgggaccccttcagatttcgacacatgatccccacggaagcgctgcaggttcgagctttggcgagtgcagatgcagaggcaaatgccgtgtgtgaaattgtccatgtaaaatccgagtctgaagggaggccggagagggtctttcacttgtgctgcagctccccagagagccgaaaggatttcctaaaggctgtgcattcaatcctgcgtgataagcacagaagacagctcctcaaaaccgagagccttccctcatcccagcaatatgtcccttttggaggcaaaagattgtgtgcactgaagggggccaggccggccatgagcagggcagtgtctgccccaagcaagtctcttgggaggaggaggcggcggctggctcgaaacaggtttaccattgattctgatgccgtctccgcaagcagcccggagaaagagtcccagcagccccccggtggtggggacactgaccgatgggtagaggagcagtttgatcttgctcagtatgaggagcaagatgacatcaaggagacagacatcctcagtgacgatgatgagttctgtgagtccgtgaagggtgcctcagtggacagagacctgcaggagcggcttcaggccacctccatcagtcagcgggaaagaggccggaaaaccctggatagtcacgcgtcccgcatggcacagctcaagaagcaagctgccctgtcggggatcaatggaggcctggagagcgcaagcgaggaagtcatttgggttaggcgtgaagactttgccccctccaggaaactgaacactgagatctgactgcgtcacctgccccgtagagaatgtgtgtagatacttcctgccctaactctgcccaccctcctgtaccgtcgacaagaatgtccccttaggtcgcgctcttgcacacacggttttggcagctgacttggttctgaagccatgtagccacccaactttgtcattttcaacaacatcagaaagaattgatcagaatcccaaataagcttgagtcctatcttctgtatattactaagggcttttatttattctcaataaatcagggcctgaacaattaaaagaaaaaagattctatagcactggaaagcaaatcaccccaggagttaacggatgtacaacagattaatttaagggatagtagcacacacacgatccttctatctgaaatcagtctcctagctggggaaacctctttcacacacaaaatgaaatgtgtacagcttgccgtgttctgactgtacccttccctcttccatgtctgagaatctccgtgtattttaagaatgtgtgaggagagggtggcgattcatgtttcaatgagcctctttttttttttccttcctgttttggtctatggctggtcttactctgtgtccatgttcggaagctctagttttgcatagaattatagagatgccaaactctttgaaaagagatccaaatttatcgcttgagagaaagaaaagaaacactattttttgtattttacctgagatacaggggcacaaatagatgagaattttacagtgttagtgtatgtatccctgagcctaaaaaatgaggatataaccttttacagagagagtgaggcgtggtggttttatatttatatatgaaaggccagcaagctcatgcgaaggatatacttttcttccaaaaagcggattttttttttttaatgtttgaatctatatttgagatgggagtttggttggattaaacatgacaccccggtgggcggtgtgtgtgtctgttgcacatggcagggaggggagcctccttctcatggggttgccatggtgatcattggtttttccatcaaaattgcatcttcatccatagattaccttccccttccctgacagtccataaccaaacctttaaacagaacaacctctttaaaaacttctcttgtgtttaacactttcttcatgccaacgaaacagggtaaacatgctcaaaacattaacagtctaaacagatatccaaatactaagaagaaaaacaagttatagcactttcaattttttttttttttttaaaaaaaggtttatagctttttcttttcccatgtcacaatgtccacttcctaagaagggtttaaaatactatgaaaactttctttttggggaaaatatctatttggtgtttgacacatcagtaggtactttaaagacctgaattttatagtagctttaggagttatattttataaaaatcagttatgactttatatttccagacaatagagagttcagtacatcatgctcttgtgcctctgcctgcttttcctgcgttcccaccctgtattccccccgcctttcgggtttccagggcttcgagcttgatcttttgaaagttttattctattaaatttttgctatatcttctggttttctgaaaaagctttagaatggtttctataccctttgtatcactgcatttttccatatcatctccggttcgatcgcgtccagatggaaaacggaagcagaggcttctaatcgtcgcatttactggctccagtgcaacacatccatctgaaaacactcggaagtctggtgcttggagagggtgccattgtctcttgtacataaggtcatgacgtgtctatgtcaaaagttcttatatatttcttttataagctgaaagaaggtctatttttatgtttttaggtctatgaatggaacgttgtaaatgcttgtcaaacaataaaaataacgaaaagtgt

SEQ ID NO: 42 - protein, 1575 aa, Homo sapiens; identical to SEQ ID NO: 40

SEQ ID NO: 43 - DNA, 156869 bp, Mus musculus
  misc_feature (1)...(156869): n = A,T,C or G
tccctgctgggcaccgagccgggcgtgcccggaggctggccggccggcggttccacgctcggaggtaggtggtgctgttgccgcgacgtcttcctcattggcgccgcgcggagaggcggaatgttcaactcctgactccggcggaagcgtgggagccgcgcgggccgccgtccccgacccccgccgccgctcgcgcccgatccgggagccaggtaagggctgtgggggacgggagaggcgggagggagctccgctggaggaccggcgggaccggggcctgcggggccggggcagcgcggctgcgggaggccggggctcggcgggcggctgtccttggctcgcccccggtgccctggagacccgtggtccccgagcccgcagaccccgagaccgcagcccctgagccctcagtcccttgccgctgggccgaggacggcttgggcatgtccgggccggtccagccgggcactcggtgcccggaagagtccggcctggcacagctcgcggcgatcccggggaacctgcggcggctgcccttcccgagcaccctcgccttccgtgggagcacacgcgggtgtcgcaggcgcggggatctacaccagggtgggcactgggtgacccgggccgcagccacgcctcgccccgcgcgtgacagatctcgggaaaaactttaattctaaactgcccagatgacattggaactgcctgaaaaaaaacaacaatggcacgtcattgttgggttgctgaaaatgtatgtttctcatgcgcctggagatcctgcataagcactgtttatggagaacataattactatttttgctagtttcgttaataatgaaagcacaccatttggtggcccgttccagcgatttcacaataagcagccttcattaataatgcgtgtgagaaccgtcttccagaatggattgaggacatctgagttcggatggttgttaaagtgagttcctgttttacccctaaagtggttgtagcgaatcttctggtcttcttgactgtagatgaaaccaactgccagcatttagtggatccaaacctaccaaaatatttaacgataaaaataaacaaatgattcaagaccagacttctttgtcatcggcctgtctctactctgaaatttcattctttttttatcttaaaaaaaagtgacggctgcattttaattatggttttgatcatttgtagagtctttgttttagatttctgctacaatagtgagagatttgggagattgtaaatgaacatgaatttagcttgtttagaaagagagaattaagagagaaaaatggtctttggagcactgtttattttagtcttttacaatgtaattttgacaaaaattttgggggatttttttttaaactggagaatgtgcaagtcagaagtttaagtgggaaacattttgttgtcttagaaagcaagtagctgattaatcttttaaaagtttttgttttgttttgttttaggggggatacataagaacacattaagaaaaataataaccaaatattaagcacacagatttagatctaaaaatggatggtcaaagatcttgggaactgagggaccttcttgccaaataaggaaacttggcaggctgcactgtgtattttaagttagggcagagtgagtgctattggcaatacattggctcagtgcctatctgggctctgcagtgaaactgagtctgataggcctgcggaattataggcaggagttacgaagggtgtggagtgaatcgctggatcatcagaggagacactggagaagttacagggacgttttgtaaaagaggtcagataaaactctgagtgtgtgtgcccagcagaagcagactacacagtgggtctcagaacttgacacagccagggaagagtcagtgttaagctgaggaaaggagtttgtggtaacacaggactgtcagaaccagaaagcctctgtgccctgaggtgttaggaagagaagtttggatcatttgctttccattttattctacccaggacagatgggacaaggtgggggactgttggatctaaagataatagctgagacaccttccgtcttactgtggggaagtttaggctacttcctttgtggctattgaccgtggtctatactacacataaaccagcatagttccagcactaaacaaaagattcttacctgtgcagggaggagagccatcaaccccagagcctcacagctggtcagataatacagggcctttgtctcagaccctcctagagacagctgaagcattgagtgacaggagttaaataatcccagcacagtaagagactgagaacagggagccatacatttgatacctaaccccattggcaccattgccaatagaaaattaaagcctccaatgtgtggacagtaagcaatccagccgttatggtaacaagaaatggatttgtttaaagaaaaaggggggagggagagattaggaggcagtaaatgatgaagtagaaaaaaataaaggtataccatggagggaaaggaggtgacccaagttgacttccggttgtgctgtttgtaaattaggctcggccaacttttataaccttggggggcagtactacctgtttccccaggaggggtctatgagacagtgtgtggaaatgcttaggctagtccctgaagctccacctgccgtgactgggtgcagagaggacttccccgcatttcccaagctgcgtgcttgcctctcccagccaagacttgcctacagtattttgccttgttgctctcatactaagtatgcacgctgagattagattgggtggggggctccctagccactcctcccttgagaataagggtttccaaatcgactctgtatgtggctttgtaaaactatgttttggggaagaatctgaaaattaatacacttaagtatatagatgaaggattttgaagttaggggaacacaggcaggctatgacaagaagcctggactaagatcccttgggaccatttgtaaggctcatcttgagtagctcctgtgttcagggtctgccactcttttctggatctatctgtgaacaccttaaaagagaaggaacacatttatctctaggtcatggagtaaatattacttattaacctttttcttacaaggtaccctactgtgagggagagggagtgtgtacccttaaaggtctgcagatatgcccataagcacttctggtgtaggcaaacatttgctttaaaaaaaatttttttcatttaatcttaaaaacccatgtggacttttcggtctcttcttctcattcttgtcttactcaaaccaatataaacagacacatttattcctccagatcttaaagtcagattatgctgtaggactcacctaccttccctgcagtgctgtctactgcacacatgggagtaagcccacgggatgatgggattggtcctgttagcctcccccctcccccaatctaatggaagaggtcatgtgattctattttgctagggaaagtcttgaatcagagcatcatcccaagagtatgtacagtctgtggttatccttatggtcaagagctctttgcttcggggagaggagagacgtatacaagacaagcgttggaatgtagacctccctagccatgtgagaagaatttcaagagggtggcccaaggacttttattattttattactcagagatatagatcttctcatgtttactgccaggtgcgtgactgcatctccagtaaaggaagaccggcagccagcacttcatgctcgcctggttagtcatcatgctaggaaggctgaagtgaaccttccagacgcatcctttcttgtctcggtgatgcaggtctccgctcctcgcccccccccccccttctgttgagtacacagggatgtgtcattcactacggagagggcagaatatcttcttctggggctaccagccattctgtaatttgtagcctctgataattttgcctctcactcagcacaacatcatacaggtcttgctcttggctaactttttttttttttttttaaagatttatttatttattatatgtaagtacactgtagctgtcttcagacactccagaagagggagtcagatctcgttacggatggttgtgagccaccatgtggttgctgggatttgaactcctgaccttcggaagagcagtcgggtgctcttacccgctgagccatctcaccagcccttggctaactttaatatcctggtgtctgtcttctccttcattgtccttcagacgaccccgatctgacctgcatgtttaaccttgtaaggaagcattccttgtaggtaaccagtctggggctgtcccttgtttgtcagaagtcaggctggttgggtatttcctatttgacaaggacagttctgtggcagagaactgtgcagcagatcaccaggatgggtgggaggctggtttaggaagtagacatcttcttcctcagatatacagcacccaggcacttgggcactcttctaggcagcccctcttcctgttccccctttactggatctctatcctctcctctcttcccacaagaacccacccgcccatctcccgtggtgcaggacatggatgccctgggtcttgtttcctagttgggcactatttgagcacaggctcattccacacggtatcgctccaccaaccacttcccggttcctacttcttttacttctgctaacagcatttctggcaaggaagcctgccaaggaggttgattttcatttattggaatattagtaagaatgtttcatttaactagcttgttttttattttaacctttgctctggctagagaatcatactacttatatggtaaagcacagatagagcggggattgtctgttctcatttcgactcctatttaaagctggatttttctcagatgccatgccggaagaagtcccacatccggggcccaggctatcttatgtcaggtctgcttttctgagagcagttttgaaggaaatagcaacacggacacagttctagttagttttattcataaacttagtcttgtggcttttgtcactaatgacaattgtggctttttgtcttttttaaaaagaaggacacagagcagtctgttcaggaattgtctctttaaatctctgatcctgattatgaagaaatacatcaaaccgaagtttttcctattctttaaaaaacaaagcaaaacaaaacaaaactcagagttgttttttaaaaaatgcatggcctaattccgaacagtaaagcggatacgaggttttgattcttttatttactgagctgtgtgaagaaatacaagcaaggcttgttagagggtgagggtgcttttcagaagtcatctttaagtttctttaagtttcatgtgtgtacaatgcatggcggtcaggggacaacccatgggagtnnnnnnnnnnnnnnnnnnnnctcccagcatccacttgtctctgccccccagggcctccacctcacgtgttgggattacaggtatgcattgccatgcctgacttttacatacgtgcctgggattcgaactcaggttctcctgtttgcacagcaagcaatcttacccaccgagccctctcttcagcctgagaaatctgtttgaaagtttatcttgatcataatgacacaaatttgtttttcttcttatgttgtgccagaattaaacctataactacgtttgtgaagacaaaaggaaagtataaattatggatggaaaaagaggaagtatgtaagtcagaaatatccaaaagagaaaaacccagagaaattccaaaatccttatttgtagagttaatttatataaaaaacaaactgttttcattatgctgtggaggcattcaataaagcaggttagagttctcttgagttaggtgcccttgtgtaatgagcagagaatatcaggaagaagacagtggtcctgtggaaggcagactctctgggacactgccaaagcaagtgctatgactgaataaatacatcctagaaattctagtgtctaaaaagtgcaaaaggaaaataatgtcttttagtaacttaaataggactcatctctatgaaaaacattttgaaagggaaaaaaattaaaactatagctagacatgctggtgtctctctttgactttagcccttgggaagctgaggcagggggatcacaagtttaaggctagcctggacaacatagcaaggccttatctcagaaataaataagtaatcctcactagtaagatagatctcgcaaaatgacccaacccccccaatagagagaaaacaaaagtgagagaagaaattaagacacataacacagatgaaaaggacttaggagtcaaggggtcatttatttgttaatgtttgtgtagtaaaagtgattgaaatagaaaagaaagcaattttgaaaatgaggaaacatacctgattgtgagggctgaactctttggctaagcaagggctcagagtcatggcggcaggtagagagccatactttccacctgttatgtgcaaattccttgcgggattctaggtgaggcctttcgacatcttctctgcttccctgggcagggcaggccttgggggagactgggaagtcagagttgccagggacctggtcgggacctggtcctccgcccgagctcagacagcttgcttgtactttggatctgctactctcttgctaaaggtgcgacaagctgtgcttagaagtaagactttccagtgacgttggatcaaaccctgcacacgtgaccactttggggctatcaaacggaagtgactttcaacttcttatttatgaggttagacatgtagtaattggaggaaaagtgattgtttccagagaggtggaagcagaattcagctcagtctcacctaatttaacagttttgctgtttagatgttagcagttcaagtagtcctgttgctgctgttgttgttattttaaatctgtgacagaaatcgagtaggacacacagacaggtgacttgaaatcaataacaatttgaaaaagcaaagagccaaataaagacctatgagttgtgatcctagccccctttttgaaaagataaaaaacttttaaaaataaaaaaatgctccatttaatgtctttctgtctgtatatagcttttataattaatgatattatatatgctcttatcagttcagttcatagttaaacttatccttgtacttctaatttagggacattttaaaatgttttggctactgcccaaataagctgatgattgcgttgagcaaacttgctattgttccaatctgtgacccccttatgttttgttttctgtgatattcctgttctgagtccacctgcagtgttgtgtgattgcctatattgtgtaaaagcctgtcttcaaacacagtgggttgaaaacattggatgtgatctttgtaagcagatgtgtatagatggctccctcttctatagatggttccactggtctagacagtagagatacttctgaaaagctggggtataatctgatcaggtcttgatgctgtacgcgatcagcatcttgccctagatgctccgaaacaacttctactcttcatccttctactcttaagttgatcttctttaaatagtgacttaaagagaaagggaaaacaatttacatatatagtcacacacacacacacacatatatatatatacacacacacacatatacatacatatatatacattcatacatacatacacatgtgtgcatatccatgagcaaacacacatgcatgtgtgcacataaatacatatgcatgtgtgtgtgtgtgtgtgtgtgtgtgtgtgtgtgtgtgtgtgtgtatgggggnnnnnnnnnnnnnnnnnnnnnnnnnnnnnnnnnnnnnnnnnnnnnnnnnnnnnnnnnnnnnnnnnnnnnnnnnnnttaaaacctgtactgagcacattgaaattgttcatctctttggaaaggatacagttttttacattgtcattaaaatgtccaagtaactacatagttcattcctatagaaccagttcccaaatggcaaggtatattgcaacacgggtaactgatctggaagaatgtgccttgttgcccatcatcacgggtggtggtcacggccaagttactggccagtcagttcaggttaatatttattgatctcatcttccactgtttggaaagggtttctctacccctctcctagttcaacccaaaccgagaggcacccagtcctggaggtgccaaggttcccaagaagcttgcagaattctcaagacaggattgggtttagaatcctctttggggacttgtgggggaaaaaatggcaaggctgactgagttgaattgaaatctttgtagctgtaggaactataatggaaaaagtaacttaaaaccattaatggaacaaacagtttggagtagaggagatgtgtactgtgtgtttggttatatgcgaggtgctgaaaaatccagatatgagataccaaggaattttgggtttaggagtttgtattctggtgggaatttgatgggagtagataaaggtgctgtaggagagagcagtttctcatatgggcttcacaatcgtggttagggaggtttgctggctggagatggagatctggagcaggtatatccctggccccaagcatggagatgtgggcaaggtcagcacagaaggggacccgcaggcagtgcttcatgcatgtgtgagaaataagacctgaaatgaatgagactggagtcctaaaggaacaccactagacagctgcgattcaaagatgtgagctaaaggttgggactgagtgtcctaccagtgaatgaaagaaatcatctctaagaacactctaataaaaaaaaagggcaagattctacagataaagaaatgattctaaaagccctcagggatatatatatatatatatatatatatatatatatatatatatatatatatcggtttaggcatcagagtagcatcacactgctccatagcaacattagaaatgaggagaggtgctaaagagatggctcggcgatgaaggttatttgttatcttttagagaacatgggttcaattccctgtacccatgtggttactaacaactgtctataattaattccagatgatctgacttcttcatgctgcaggcaccaggcctgtacgtggtgcacagtcaacacacacaggcaaacactcatacacataaaaaaaagttttcttctagaaaaaaagaaaggagtcagctgaggggatcggagagatggctcagcagttaaaagcactggctgctcatccagaagtcatgagttcgtttcccacatccacacagtggcctctgctcagggagccactgggagatgcgtgttgtcaaggtgcagaagtaaaccaagaaagagaagctgaagatccaggggcagggttttcctcagagggtgaaagagaaggaaggtctttgaatagcagaggagatgaaattccaatgacagtcaggcctgggggcgcaaccatttcagccagactgaatcaagaggaagtgtttagaaagaacgtcttgatgaaaaccaaggtgctcctccctctggggatcagaggataaaggcaagaagaagctggtgtttgttgctttgttgggagctttgtagttcctggggggactggtggagttgggtaagtttatcaggagtgtaaaaagctaaacagacaacagaagacagaagcagggcaactaataactccaggagaaacaaaaagctatccaagtaaaatgtaaccattgctgcatggcggtgctggaaatggtcttgattttgcaagactactttctataaaccgtgaatattgtcttagccaatggttcaggttgtaaacagaggttagaccagtgtggcccctgaagatgtgtggaggtgaaggatggtgtaagaaccgaatccctcttccacagggaatggttgatgacaagatctaaagtagggaaatcaaaaagcaacagtgttcaaatacatggcttagaaatgtgatcaagccggacgaggtggcgcacgcctttaatctcagcacttgggaggcagaggcaggcagatttctgagtttgaggccagcctggtctacagagtgagttccaggacagccagggctacacagagaaaccttgtctcgaaaaaccaaaaaaaaaaaaaagaaatgtgatcaagacaaggagatagatgcttgaaggagctgttactagttgctctctcagagttgagtgggcacagccaggcagtggatctgcaaggtcttataagcttcgtggccgtatttcaattcttacacttggataaaattaattacaaaagcatagacttacccatcctctgctgcggagatctagcatatagtgtttgacgtttgttgtgcgagcttttttgcctcgcacacgctgtctgtgtttgtctggcacattctcctatattttctataaaccttctttactaaagttagcgggattgcagtgagtctgtctggaaaatcactgaattaaacgcagccacagagtgcgtctgtgttcctcacagccggtctcctccctctgttttcttgtcaacgcagccctctaaacattacaagctctaaacagtagaggataaacaaattgcttcgtttctctttcttgccttctccccaaagtggagcagacttggactttgcaataagaaatcaacattcttcagtgagccgatgttccgaaaatggaatggctgagccagctgcgccctgagttctcggagctccctgtgcgagcatgtctcctcgaagctccgagtagttgatggagaaactgaacttacaatgacccagacagctcccttctaccttttattttggaataataataaaaaataaaatccaggcttcatagaaaatggccaggatagtaaaaagcccatgcccctttctgatttgtggctctcaactctgtcacggtgctttctccctctcacacacttgcatcctaaccccctctctcatgtgcatttgggggtggtgtcaaaatcatcaagtgagttgcaagtgccatgtttccatgtgcctaaatatttacagaggatcaaggcagaaagtgatcgtacattgtgtttcatcctggatgccctcaagttcttacagagttcgttttcttgttatttgttaagtgtttcatgatggtgaccatccgaagcatgaaccagctgcttgagagagagtcctctaatatagataggttcctcattttgctccatgattacaatattgtggtttacagttccagaaaggatgcccagagagattcctttatgtaccgcctgtagcttcttacacttgctcaagagttacacttcaccagttgtgcgtttcaggttttgtttttcctgataatttaaagtctgggatagaggattaagagtgaacgcttacctgcggaagagtaaggatgagtcaaccatagacaacccccctgcggtaatctcgggaggggtcatctgtccccctggaaacaagcataatattttttaaaacaactttggcagtattccttggctgacttaatctactgtaatcaggggcaatgtctcttagaaagtcaattcttctatggagtgcagtctagtgagacacatgtggaaacccttgggtagcttttccttcaccccaagtgaagtcttgtttggagtctaaacactgcatatgtgtttactctgcagcgtcctggctgcagccgtgccaggatcctcaggggcttaggctgtgtatgtttcctgtgaggcaagggcagcccggagagccggcgtgccgcacatgccagaggaactatgcaagcttgctgttgaaggcatggtttctgtgtgtcaggccttcctggtaggagacctggtgacacagtagcctttaggcagagctccggaggatctgtaggaagcactgtggcaggtttcgttggggggagaaatctgagccatttccaagcctgggcaagccgactgccagccagggtgagtgctttcatttcgacttgtttgtcttgcttctctttctgaactcatcgggcctttctagaagtttcacaggacttgttataaatatctagagcacgactcgaattgatctgtgattcggcatttcttctctttcccctctccagattttgtggacgtttactactttgtcattatgagatgtcgtctctcggagcctcctttgtgcaaattaagttcgacgacttgcagttttttgaaaactgcggtggaggaagttttgggagtgtgtatcgagccaaatggatatcacaggacaaggaggtggctgtaaagaagttactcaaaatagagaaagaggtaagatctgctcccagaggctctcacaccagctcttatataagccttccagcctagcggagttagagggtcacagagctggaaggatctggcaagtcctttggggctggtccatgaggctccttcccaattcccattctgggaaccccataaatagaaaatattgcactgtgtgctttagggtcgagctctactaagggacatgtgaagctagaggatttctttccatggtaagccggtgttctctgagctggctggcctacagaaacaggcgggtttgagcttttcacttcttcaggggaaccaggagggggcagtaaagagtaagaggtaacattttcattgctccctattttcaccccttgcattgggagtggtccctcttggtgcctttggaaaataagagtatttgttttcaactgaactaagcagtgctagcttcttaggtttcacctctacaagttcacagtggtgcattttgtgcaatatagaagtaggttccagatagagttgtcttaccttgtaaaaatcagaataaggtcttggctttgagagtcgggaacttgtgttgaagtatatgagccctgaactcttaagttcttcatcgtttannnnnnnnnnnnnnnnnnnntcttcatcgtttataggaatgtccccgtccccatcccccccgtccccccccccacacacacacaaactgatgccaccactatattaagtttggtacctcaagagtcaaatgattcgtatagctggtccgtgagagttaagcctttgtaaccctgtaaagtacttttaaaaatttatgagccatctatgagccatgttaatgtttcaatacatgtatgcattgtgtgcttaagtcattatatccattgcctcgtttaacatttcttttacaacgtaaacattcaaacgcctttcctttggctctttgagattacagtatattaccactatctgtaattgccctgctggtggcctttaataccttcctctcatgctcaccttggtcattgttttatatccagttttcactaagtattgttcctttcaagacaacctatagatagatatacactcttctccccaagcgatcttgttatcattaattgccaccagtgaaccaccctggctgatgagagatgagaacccagggtcagccttgcaggtctcctctcagcagtgtgccatggatggagctcatcagcccactcacccagtgttgaaaccatgaccctggctctgtggtgtctctgccgtgggctgtctttgtgttttacgtgaagcagaagggtactaagtaaagatcagctcttgcattagaaccacttctgacaccaaactctttgatttggtaagatgacattattgtccccattttatagactgggaaacagaacactgagaaatgtattagccactccagcagggacagatagaattcaggaggctgggcttcttgttcttcagtattttactgggagacttctagttgaccaggtaggaatagaaaataagccaattccatctacttatgtaagaatggtaaaggcaggccatggggcttggatacttatatggcttcttctatggttactggatgagactggaaactgatttgaagcagagcattccatttagcccgctcacttcctacctctccagcatatgtgcataggatgtgccttttccatggtttgatagggcaggaaaatgacacgggaaagcacagggtgagtgcaagagctggacgctgccaaatcctgcttttgtattgcaagagcgtaactcataaactataagtcggaaagagtagaaggtgcatttcatttagaggactgttgctgtcagagacagtctttattcatccccgtgccaggtaccccacactgctcatcccacaggagtttagtgtgaaagtccaatgaggcagtgagggtaattggagaggaagtatgcaccccttgcgaagttgtatttataagatgtgagttggccactggctaggcacttttcaagtgctaagataaaggtaatgaactctagagtctttcccccatttgtacactcaatcctatgcctcttggtcgttatttttccaatgagtcttagaagagacggaccccgtaatgaagtgcctgtaactcacttcgtgggacgctgagaatggcctgacatctgactaaatgtttgttctgtgaacttggtcatatgtggagaatatatgtgacaaatatattgtcacagcctatgtgactacttgcttgcacttcccttgtgactcctcgtgtagtgaggtatgatgtgtcccttgtgactcctcgtgtagtgaggtatgatgtgtccctctgttttacaaagtatgtgtttccttcctactgaaaagaacaaagagtggcacttgcttaaaatgttttctaaaaatgatttaaagcaaacaccaagaaaaattataagactatcacgacctctataataccacttaagtctaccacatagtgacattttgtgacatctgccttttctctttagtgacttatgtgcagttacaattattttgtttttcatgactatgagagtaaattacagatgctatatgtgtttattcaaagcatttaagcatctcctaaaaacccaattaacaaggtaaggaaattgaatggttatattattttattggatcatccatcttcagatttgtccatttgtcccaagagacgtttatgggattttttccctacgcaggatacactccaggatgacaaatggctgtatgtctgtttagcctgttttattctggaatagttaccctgcctttctttgccgtttaagacttttccagttttgatgagccgagaacacttatgttgcagagtgccctttgttttggccttgcgcttttcccctcatgtggctcatgtggctgtggtggggatgttatagtggttgtgtgtccttggtgactcttggtgtggtgtgatgggtatctcttgtctgccttaggtttggtaatgttacttttgagcccttccctggttactagaccactcaattcctctgtggtgaaaaatacctatttccccttttgtaattaagtgttgggagctacttcgaggctgtgtaaatatgtcttctgagctcaagcatcccttggtgactctgtcttagatgtgtcattatcatgatagtccattgtgccaaggtcagaggttccctcctgacctgttccccaggctgctttctctctccctgtatttacactgcccaatttgtttatctgtttatagacattaaatccttttacaattcaaagtgacgcaatccattacgtcatacacgtttgtgcctgtattatgtccagcttggcaagagctccttcagagtggcttctgtggcttttgaccacaccgttcatctgggatgctttccttacttctggacacagaaagttacccaactcactcaactcccgtccccactgctgggccagccatttctttaggaggtcctgagtcagcttccgacttggagttggtatctcagagccaaaataaccaaaatgggagtattaggggtgcctattttagactttttgaaaaagaacccttgcttttttttaatttttattttataagagtgtttaaattttaaactcaaacctctggctagacagaggtctgcctttctggagaagagtttagaagtatgtagcacactgacgctggtctccaaatagttgctttctgtgggtcagaggttgtgcttctgggactttctacgtcagctgttagaggggtcagatagggagtcaggtaagctagcggtggagacacgtggagagggtactgtgctgcctctgcagtggcaaagtgctcaacatttaccggaagtgaagcgaggaggacagcttgtaaaacacgtatatgcttggtatctgtgtgctgctttttttttctcttgaatatctgtggttttctatgatttcatgttttctttcaatattttattgtgaaaaaatttcaaacataaagtaaattttacagtgaatgtctatagacaacatatggaatatatagttagcaagaatacgtgtgaccacctgtatggccagctctccacgtcttactcatccgtccgtcggtctgtccgatgcatttcaccccagcatcattgtctttctcttaaacatgtcattgtgcatattactgtctgagctcagctgtagttagttttatttttttccccctgtggtagaaatatgtgtcgctccgtttttagaagtgtggcttgactatgacatatatttacatttctaataagaaaaatacaatttaagaagtatagtttttgacaatctgtagcactgcctctgcaatctcaagtgaaccaagcttcataaactgtgagtggatcatataacactaatgccccaggttcactgtatgtctccgaaacgtgggacattgcctgtcacgctgctgtcccaaggcagtgtccccagacctcaggacttggctgtttacagttttacagctgtacttacagtgcactgtttctttctgtttaataaaatattttcatggaggagggaacaatacaatcttaagaatgtttaccaaaagtacggaaagaagccatgagcctgtcttctcagaacttgctgattgacttgggggaaactggcctgctcaggcagaagtttagcaaggagtggaagcgccagagaaagccattgtaatcccagtgtctgctctaccaccactggcctagtgagccatccccccacaagcaagagttcaccagactcacaatgtgaacctttgaaaaggattaaacacagcagcttagatttgatatgttgacacagatgtgtcttcatgtggctcgtccctctgtctggtggagatggcaacctgtaagcctttgtgttcactgcttgctgctattcccaaatacctgggcgaacaactgggagggaagactcactttgcttatggttttagtgcataattttccatggcccggaaggcctggtggaacaggggaactcacagggaaggagcgaagggactgcagagagggaggaaacaggcatgtggacgggagaaaggagagagaagggaggagtgaggaagagagggagggagggaggggagagggagaaggaagtacagattgggagtatggccatgttagctggctttcctcttcctccattttctcccagcctataggatggtactgcccacactccggatacttcttcctcccaagttctttaccaatcacctgggcgtgcctcaaggcaaccgagatgatattaaccatcactgcctttatgttaccttgaagcctggcaatgcacaacagtgttcacacgccacggtgaaatactaggaatgaaggaaacatcactttctattcaactaccaccaacccctaaactgaaagagggaagaatccccaagaaggaaaatagaatcttttctttcctggccttggtttatgcaactccctatgcttaaggggaaaaaattaatcctgtcatgttttggaaatgttgaaagccagataagtttttagatttaagaactgatctgcactgtacacacttatgatcagaagacacctgagtgtcaactggtcacagtaataggggctgttagtaatttctctgtagagaaaagatatctgtatcaattagaaagtagactattgggactgacctagaactcagataaaaataaaagctttgctattcctggtacatcagagcaatggtatttacacttgggaaaagctagtttaatacgagtacttcttagccctaggggagctcacttcctgtctgtgcaattctgcagcatttttcttagtggattctctgtttttaattgtaggattgtggttttaatgctttctctgtccccgaacataacaaaaaataagaactcgacacccaccttctctgtaagtccttttggtatataaatatgttgacacgtccagcagaaatgaaacttcaatgctgcagattcccaacagcgctgctgaatgtgtggtttctgtgacaacttgtgttaagaacttgctgattagtgttactaggctctggcctacccttaacctctccggatgtggacaagctcctgtacccaatcccaagggctgacttaggaacacagatgaaacaaagccctcagggccgcagccttgctcagctcagctcctcacctctggcgctagcctactttgcttgtcatcttctggcctgagcgcctcagcctgtcagtccttctgtcctgctttctcagaatgtatctgcccacattctttcctttacctgtaatgccattgtttcctctccctgggcagggccttacacagttttcaggtttaatttcttcctttttcatgaacattctcagttccatagtaatttttcttctgaatttctaccatttagcatccaagcctctaatttgacataggattacaactgccctgtgatgctaacattcctgtaaggaatggtcacttaactttccatgtgtgcatgctgtggcttctcagctaaaaagtggggctgtttatagtatcccagtcatagggctgtttgaaaggataaaatgagataatacatgtcaactatgtggaggagcactggatacaagggaagacctaggtacccgtcatcatcagtttatcttcagctaaactccaaagtgatagcagggaggtatcatctcttaggaggattccaatgaatccatacctaggatctcacactgggcagggagcacgtgctccatttgtaaccaacaggaaagagagacttggcaaggcccagttaatagtgtgtgggcaagcacatgtgtggtgaggtggttagtgttaattttcaacatggcaggagtgagagttacctaggagatgagctgctggacatatctgtggggattatcttgattacatcaactgaggtgagaaaacttgcccactgtgggtggcaccattccctaggcagtgcatcttggactatagagagcagagttggggctaatcactacagtgcatacatttatagttctcatctgaccatgcacacagtgtgacttctgtcgtgatgaactatgacttgaataagccctttctcccttgaattgcttgtcaaagtgtttcatcacagccacaagatgcttggcatcctggctgcaatgtttctgaaggctgaggctatctcttcagctgatactgtcaccctcttgattgtcaccaatgtacccaacacagttgccacagttactgctctctgcttcttcacagtcaccctgcaggatcatgctgtatctgacacaccggatgtaaggctaaacaagctcgccaagccacctagcatatacacatagcctctttcatgtgggttttccttgctaagccccatggggctgggacctgtgcattgctcacagtaagttggaacgtttgtcctgatgtttggcatcatgctacagaggacttccctctccctgctgcccatcttagcgagggatcgtatattgatgtgcacatgtgttcttgatctgctctgctttcagctgtgactacagtataacacgcccgtctgtactcatcactgtgaatacagtaacaggcttatgttcagtgacacggtcgctgggctcttggctttgcttgtggtctgatgtttgaatgtaagggctctggattatgccttttaggctgacaagccatttctgtcccagaactttcaaacacttcatagtatttaactttgactacactctgcattgtaaaaaaaaatcattgctttgaaccaaactttaaccagcttaaactaatgaatcactttattgatgattgatggcccctttccagaagcactgaccgaacaacttctctcagtcagctttccgccgtgaggcaatcctgttaccaggagctcataagcaacaactctccgaggtgaaccgcaataaaagagatagggaaaattggccgcatgttgaacaaatatatagattaaatgagtgaccatgtactgtcaatacatccgaagataacttgaaccttaagggagccatcagtaaggaaccaccacagaatggcctccccggggccatgatgacttacaaatgcatgaagatgcagaccgtgatgggttacttttgagatcactgagaggacgatagagatactttatttgctagcaaaagcccctgtctttattgtgctacttattcttttaaaagttgaaaagtccttccatcactctgccagggctccatatttactgtatgtggagactactttcatttgtcacagaaggaacatgattgtaacggttatatcagtttctcattaaggtattattgatcttcgtatattaagcaataaacatttcagttagttaatgtttatttttcagccatgctctaaatattgtggtgaaatcaaaccaattaatgtatcccagtaaaagtggtgtgtccagactaaccgattttacataaagtcaggctcttgctacagaagaaaaatagcatgcaccatgactccagcgcccgagaaagccaacgctgaataaaatacagttagacaatggaaaaagtagaagagagagatgcctgggaacatttccaaaagtttcggaaagctccctgcaagcatggtgcagtagggggtgatcggccagtgagatggctcagagggtgaaggcacttctgaccacccgagtcctatcgctgacccacatgtaggaggagagaacaggtgccccaagttgacctctgacctccacatgcacttcctggcacaaatgcgcgcgctctctctccccctccctccctccctctctagataaataaataaataaataaataaataggagatagacaggtagatatagaatttaaaatagatatgattggttttagtcttcaaaaacagattttttttcacttgggtgttaaaagtgcctgtgacttcttgctctttggtgtagagaagaagtcattatcatcgtggcacctgggcatccaggccacattaccaagtgttttctattgatgcccgactctcacccctcaacaggacatcatccagttgctttttgagcatggtcgtcaatgtcgtatttggtgactgttgcagttttagagtatttcagttccctgaaagttcctcacagtggaacttctgggattggcactggcccctgcctttgggactgcgtaggcttctttcagacgacagcctcctgagggcaggagctgtgtcttcttcatcattgtctctagactgcatggagtgactttcccaccgtaggacagtcagtcggtgtagcaaggagtaaatgaagtgatgcacgcagatctcagctcagccttggcttgtgaaatgtataggaaggctggactggttcttaatctacagccaaggatccagcttgcctctcggtctacctgtccctttccacgtgtggttgatcttttttttttttttctcttgataagttgctttgtctttgaatgaaaggctgttctgtagccaggaggaatgctttttcacggccatggttctttatttgtttaggtttgggttgtatttgcacatgttctttcttggccccatgaacgtcttttaatgatttttaaaatatataatttttatatattaattttattatgtattaattctataatgtattaattatatattaattttatgtattaattttatgtattaattttattgtatattaaatatatagtttttatatattaattttatatgttaatggttttaaatatatataatttctttggtcgttcaggaaaaaagtccttgataaaattagataggtcaccctgaagagcgggaatctgtggtgatgagcattttgcagtctgtcagagagcgaggagacaagttgttatgtctgccagaggactttgttcagcagctaatacacaaagtctgtttaagtcactgctttaaatttttgttcataattatttatcgtgtgtgtggtgtgtgtgtgtgtgtgtgtgtgtgtgtgtgtgtgtacaggcaagaagccagaggacaactgtgggggttcgattctttccttctacacttaggtcctgggaattggactcaggtggtcaggcttggcagcaggtgctgttactgagtcatctcgatgactgtaactcagtacatttttaaagcaggcagggcagtctgtcctttggtgggaacggaattgcttctgtaattggaatgcagagtttactttaagaaatacagactccttttaatcactggatatgcatttttaaatatgattcagcgttttattaacatctgctgctggaaaaaaaaaactttgctttttaaagcgcagtctctatgtattttagactgaccttgaactcaccatcctcctgtctcagcctcctgagtgctgctactacaggcttgtaccaccatgccatcaaaaggagtaatgagagaatatggtggtaggtgctaaaatcattcagaaatgaaagtgagcctgttggtgcacactggaggccagtggctggttccagttgatggtagaagacttagccttatagaggtgaggatcacgcctgaatcggtgatgctgaacttgacctgggatcacatgccaagagtcagagtagcagctgccaagaggcctgccccggggaccagcttctgtctgagaagaggaggagctgtgttcaggctcagggtgtgtagctgatgacagagtgtgggtatgcagcggaaggagaatggaaaggcaggcaatcagggccagctagcaaatgtgtggccacataagaattaattaatgggcagagggccagggttgcttggccatttagtggtgattgtgcaagcagggagaaacaggaactgcaaggtggccctggagtgatcaggtggatggtgtgggggtcagcttaggacagggtagtgtcagggttctctggacgtgagaactctgtcacaagtgtatggactgaaaaatctctccaaagacaagaattcccttactccaaatgcagcgatttgtgtgatctgagttttcagcaatagtcagcaataactaagaacgaggtaattattgagaagctgggatatgtgaaccccaaaagatcttgtctatatgttcataataagaaattgctccattggcaaagagaggcaacacatatttataaaaactgcagattgaattccacttacacattttgaaatagaacatactttaaaaatagtatctcccaccttttgtcgaaaacatagtcgccaaagtcctagggcgctgtgtagcatggtgtttgagagcttagggcctgacttcagtcaatggatattcagatcccagctcccgagcttgtttggcacgtagacaggttaagcaagcctcagttttctctgctataaaatgcagataataatggggttggcttcctaaagatgctgtgaggaccagttaaggcaatccatgtgagtacatgctcctggctcctggcacctagtcagcactcatgtatgggacaactgttactgctgttatttcagcagcctgacgtctgaacacacccatcgttcctccgtgacttgttagcacacatcaccgtgggtctttcccttccagggctttaaaataacaagctatttgcatcatcctgttgtatagtcttcctaaactgagaaactccatagtcccagtgatgactcttttgatcgtattctttctttttctctctctctctctctctctttctttctttctttctttctttgtttctttctttgtttctttctgtttgattttaccagcgaacaacattttgtcattgacttgctgcatttcatattacaaaccatggtgctttaaagcgccctcactatacatgtctcttgtcccctggaaattgagtctccttgtacttgagagtcagtcatgtaggacgttctgtggaatagaacgtgtgagctgggcagaagtgtccaagaacagtgtgactcttagagctgcgggggatgacagcacagcccgtgctgaatctcagatggaacccggaagggtgagagactcacagacaaatcaaaagacaatggttcgtgaccaccaccctccctgtaggaacttcttgttggggggggggggaactaatctatgtgagtggtaagagttgttgattgtcgcaaattggaaacagtatggaaatcctttttgtgtggatgtgttcctagtttacacatatgtggagagcgaggggaggtatgttggccaaggggcagatgcccggtgtctttctcagtcactttccactttaattttttgaggtagggtttcctcagtgaagctggagttcgctgacttactaagctgtctgatcagtgggtccctggatcgccctatctttgtgtacccactgggagtacaggcacaacctcactcttggcttttttatgtgggtgtggtgggcccaaacccaggaccttatgcttgcagtgcaagctgtctaccgcaaagccatctccccagccctgtgtgttcttttacaatcataagaaagaaagaaagaaagaaagagagaaagaaagaaagaaagaaagaaagaaagaaagaaagagagagagaaagaaagataggaaaggaaggaaggaaggagggaaggaaagaaggagggaaggaaggagggagggaaggaaagaaggagggaaggaaggagggagggagggaaggaaggagagaaggaaggaaggaaggaaggaagggaggaaaataagccaaatacatgccatctagcagaatagaaactaccaaaggaaatcaagcaactgtgcttgctggtgtgtacagatgggcattcaacctcctgtttagttttaacccatgcagaatgccttgcacatagacatctgtgcttcgggtgtttcctccttcagttctcctagaatgtcggtgatgcccagagttctgacctcctaccccctacgccctccagtatctttgccatcatgaaggcctgcctatgtgtcgccaagagtcaacggggtctgagtaagttcctgtcggtcttagtggcttgctgaggaaacactggagatcttagctgtgcctttagcatttgtctgggcaccgggtgcttctcttctcctgccctttaggagtgcagcccatgcttttgtttactagcaagtagggctctggggtctgcctttgtgattgcttcagatcagaatctgtatgtgctctgcaggcgaagcagagagagcgtagcctgcgcttgggcatgacttcggtcagtctttttcccttttctatgacccccgccctcgcacatcccctgtttgtgttagcagacctataaaaagcttggaatgtttttccacagccacttgtcagggtgagcaggatgaagttttccttttgaagtattcaatagagagaagcgcacacctgtctagttaagcatggtccacagaggcaggctctccataaactcctgtgctcagaatttaggaaagagaagaaagcccgacgcctgactcttctgggtaagagcgcaatggccaagggaggattgtatctaaggacacagccttccctccctcaggtctcctttctcgtgcagagccacctgtgcagctccttcagttctctagctggagtgtgacattatagggtcttcctataatgtattttctgggaataggaatagggctttaaaaccttttctttttaattaaacgctaccttccagttttggaacccacttgactctgcagatgtttctcttatcctggtatgtttggaagtccacagaggtaggctgacagggctggattttccaggggaatgggtgagggtcctcctccattttagccaagaatttaattcaatagaaagtaagatatgaataaaattggtatactttcaatttttaaagaggaaattattttattttaattgacagttaaaaacaatactatccctttttgaaatatgcgcctatagagccggatccagctatttaccagaggtgttagcttacatacttatttgtggtgagaatatttaaaaactactttcagaacaggctggctatggtcactatgaggtgcatagcttgaacatgcacttaagtagaattttgatcagtatctgatcatcgtcaccaaagttaatttcacataacttctaaatgaaaatgaatgatgtcatctttggctgagtccatttgttaaccatcaaacaattaatcccttacgtgtttgttttctacatccccttgtccctgtctgtgcatgcttatgccgtatcacacaagtggaggtcagacaacaacgtatgggagtcagttctcgccttttaccatgtgggtcccagggatcaaactcagaccagcgggcttggcacactgggtcatctctgtggctatccttgagagttatcaaaatactttagctgcaaccttgttgcttcattttgcaatcagctttgacttcagtacctaaatagttttgttcatcacagagtggacttactgttcactgtcacgatctctgccccgctgcagagcttcaccaccaatacaccacttacgttcaaccacttgatggaaagagctgtcaccactctgccttcaaatgagcagcttctgcaccccgcctttatttatccacctactcactttcccgcagctaagcctcctcctcatcatggcctccagccttcttctgggcttcctcaccttcacacctggatgtttcccatcttgcacttgtttcagtgcttacaaatactacttgtctctttcaccttctgtgccccaaaggcaaacacggtatcatgtgcgcctctgagctccgtgttctcttctttcccccaaagcaaaataagactttacatgttcacaggttcggttttagtaactgtcatctttgtcaaattagactcaccatccgacaaatgttgcagcattgagaagttcaagaattggaatttcaatcttaatgaggacgataggctccagagtctccatgcaacagagttaaagggtaaagccagccaagcattgcacaagaggcggacaggaattgtgggaaagggcagagggcactgtgactgcgcacagctttgggctggtccgttgtttacgtagggtgagccgctgctgcaggcacatctgcactgtgcactgtcagtgtgctactctgaacgtgcatcccggattttcaaaaattagatgattctgcattaaaccccaggttgctggtctgcttgaaacaaaagcaggtcgggtctcttttcttgagtggttctactgaaattgctcttgacagcagcaagaactgtctggagatagcgggtctaagtagtttccagaagaatgtccctcgtctctaattacaggtcatttaatagggtatattttcattagaacttaacagtgtagacagtgtggtcaagaaaaagttcctttaaaatgtatctataatacatctgaaagattgagaagtgtttcagttaaatttcttaagaaagaagatggtgagatggctcactgggtaaaggtgcttgccaccaagcctgaccacctcagttcgatccccagagccccacactgaagggagaggaccagttcctgaaagtgttctttaactccacagtgtgccctgcccatgcacatccacacagtacacatccatgtatctacctccacacgaataaattatcgtaattttaaaaattaaacccaagtccagtgtggtggcgcacacttttagtcccaacactcaggaggcagagacaggtggatctctttgatttgaggccagcctggtctgcagagtgagttccaggacaactagggctacacagagaaatcttgtttcaaataaactcttaaaaattttttttaaaaagccaaatacaaattcccatgtttcttttccagcacagttaaacaaaccaaaacaaacaagatatgtcaggagtttttttttttttttcttataaacttttaaacttcctcacttatgtttttcttaataaagtataacaaactttactcttaattgcataaggagaattggctaataattcccaaggctccacaaaacagagtggggtgctctaacagagagctcttccagacagtgcgtctgactgagacagatacaaaccacgcttgtgattcatctcctgcacttcatagcagactttcccccactgttgtatgaagacatctaagttataccaaagcccttccctatctcagggtgtgatgtgcctgtcattctacacactgtggggggagagcaggggtggtggatgcttgcagaggtggtacatggaatggcatgaccagattcctgcatctaaaccttctttctgcagaagacctagcccaggagggttctggtatttgtgtaatggtcatcaggaaattctgagcccaaatgcatgttgtctacagcctgctgttgcttctggcatctcacagagaactcggatatagttcggccttaagattaagtatgtttcatcatagtgtgatgacagtgtctcatgcagtggtcagttcacagtgtaagcccaggatgactttcaactcctcacctctgctgctgtttgtttggttttgtttgtttctccccgaccccacgccacccctgctgcccccggcaaccctggctgtcctggagaccaggttaaccttgtactaagagatctgcctgcctctgcctcccaagtgccccctcacccccaacctggctctctgctgctggttttttttttttaaataaacatcacacacaggcttctagaatgagatctgaattttgtaacattaatgaatttagttgtgggaacaagaactaggcataggcattcattctcgggccaagttcatgttttgtgaggcttccctgaattttgtctttctgttccaaaaagatggtatggtcaagcatctcttgtaaacaaaaactgttttctatcattctgattggttaataaagagctgatcagcctatgactgggcaggaaacagagtacgatctatttgtcacagaggatcaacttagcgaaaaaaatcaacagggtaaaaaaaaaaaatgcagttattttatgtgttggctacagaagtcttgaaccctagggagccacagtcacatgcacagaggggcaagttctgagtgcaatgactttacagtgttaggtaaagcctgggctgcagaacgtaactgacaagggttccttgatggtgacagagctcttaatggccaggctcaacctagccatcaatagtgattatgatagttcaccatcatttttttaaaagatttatttatttgttttatgcatatgagtacaccaccattgctgtcttcagacacaccagaagagggcattggatcccattatagatggttgtgagccaccatgtggttgctgggaattgaactcaggttctctggaagagcagttggtgctcttaaccgttgagccatctctccagccagttcaccatcatttttgtatttacatcatcgtagcacattcaacttgatttttctcaccttttagtcaaggaattatatcctctcctgttctttacttaaaatattttaaaattaatagtcctaaaaagctgtaattacggtttgggcatctactgtctcacttgtatagtctgtccaatgactaataccgtgatacagtaggcccttcagtacagaagtagtatcagagtcccaattaggaaacagtaaatagttaactgctaaaagactgctatagtaatactgggggggggnnnnnnnnnnnnnnnnnnnnnnnnnnnnnnnnnnnnnnnnnnnnnnnnnnnnnnnnnnnnnnnnnnnnnnnnnnnnnnnnnnnnnnnnnnnnnnnnnnnnnnnnnnnnnnnnnnnnnnnnnnnnnnnnnnnnnnnnnnnnnnnnnnnnnnnnnnnnnnnnnnnnnnnnnnnnnnnnnnnnnnnnnnnnnnnnnnnnnnnnnnnnnnnnnnnnnnnnnnnnnnnnnnnnnnnnnnnnnnnnnnnnnnnnnnnnnnnnnnnnnnnnnnnnnnnnnnnnnnnnnnnnnnnnnnnnnnnnnnnnnnnnnnnnnnnnnnnnnnnnnnnnnnnnnnnnnnnnnnnnnnnnnnnnnnnnnnnnnnnnnnnnnnnnnnnnnnnnnnnnnnnnnnnnnnnnnnnnnnnnnnnnnnnnnnnnnnnnnnnnnnnnnnnnnnnnnnnnnnnnnnnnnnnnnnnnnnnnnnnnnnnnnnnnnnnnnnnnnnnnnnnnnnnnnnnnnnnnnnnnnnnnnnnnnnnnnnnnnnnnnnnnnnnnnnnnnnnnnnnnnnnnnnnnnnnnnnnnnnnnnnnnnnnnnnnnnnnnnnnnnnnnnnnnnnnnnnnnnnnnnnnnnnnnnnnnnnnnnnnnnnnnnnnnnnnnnnnnnnnnnnnnnnnnnnnnnnnnnnnnnnnnnnnnnnnnnnnnnnnnnnnnnnnnnnnnnnnnnngaagaggaggaggaggaggaagaagaggaggaagaggaggtatgtgtcatatcatgttccctcttctgcccctgaaatctgggttttatctggtgggatgaggtacagctcactgggtggcaggaggctttgctgtgtatcacactgaagttttcagctgcctggcacatggggtgtttccttctacatctgttgttggctactggagggaaaactaccacacaagaagtatttcatcctttgcttgtgccttgcggtgtcttcagcaccatttattgacataggctaacatggtgccatttgccagaaagaaaattacccataaagctattataaaacagggcaagagatgttgaatgcaatgtggtgtcttcctctactcagcctctgcacacacccagcacatacattggaacttccacataactaggagacaagtctgtgctctcacctatggagactagctgtcctttgcacaagggaagttcccatcagtccccaaaatgagatgcacagtcctaagagtgacttcatccaccgcaggcttcattaacttctgctcagattccactacagtgcactgactattattacctaaagcctgagttataaacccaacagcttaagtgtggcatcataaggggaagaaaggttgagaaggccttaccatacacatccaaagaacaacaaagtgaaatgctggaagctactaccgtcctctttcaatagtcatttcgtatttctgttttccctcagcctaaacctcagcaggcttggaggacttcacccagtgaggggacttgaactgttattcttgaaggttctcagtccctatgactcctgttttacttggacccttgtatgttttactaacatttattattgggtatggatctcctacaacactcctgcaaaatttcctgtatttcagacataggattcttttctggtttgtgtcttgcttgtcctccaaaggctacaagctaaggcttggccactacctcgtgctgctgcctggagcaggtgagaactttcagagtagacctagcaggcggaagttaggtctcaggtggtatgtctctgagggggatcttggaaccctaccccttcctttctttcccttcttgtttcctggcacccatgaggtgaatggttttgtggcatcacgtgctcttgctatgatgttaccaaaacaccagagccaaccacccatgcatcaaagttataaaaccaagggccaaagcaaacccttctttttggggaattctctcaggaattctgtcccagagacaaaagctgatcacgtaacttccttgcagtagcccagttctccctcagtaattcagtctccagtcaggagtagaaacttttttttttaactgtttgtaagtttagtagtagacaagaactttaaaatagccaagtggcattctcatattttaattcagtaggatcattatgtcccctagcaggatcatttttacattctatacttggaaccgaaagtctctgaatgtcattgtccccatgtaaagtccccgaatgtcagaggccattgttactgagataattattagacgtggaagtgatagggaccaccctcaccttcagtccagatccatgtgcgtagaggagacagtggttggggctgagggtatataattcatcccgtaaatgttgcagctgttgtccctcagctgctcctgtaactgagtctccagtgggctgctctgcttttctgctagtcagttgctgcttaaggggagggctgtgtggtgagtttggcttagttaatcccaccactgctatgagacgattgcttcacttcctggactgtgagtggtttccttcagcagcagctgacagtggaatactaacatggtgaaaaaggccttctgtgaggcagtggatgaagaagctgtcagcagcattgcagctggggatggcaaattcttatccaggagatgtgtttatggaggaagatgaattcctccccgaactccagtgccctcaatctgtcctctttggaatggtgacagttgggctcagagtctcttattagcagatctgatatatacttaccagaaccagcagacagttcagccttgttaaggggaagttgtgtttattagccctacatatggtccccagccttacaatcatagccaccttgttctcaggctcaatgagcatgccctgggatagctagaaaagagttcaagtggcttccacagaggaaacagtattgtatgcctaaacactcctctgcagtggacgcccgttacagagtttcctgtggggcacggtctgcccaggttgaaaggtctgtctacacacatctttgtccctggtctccagtgtttacatatcagaattcctaatcatccagccaaagggtatctagtcagctattaggatagattcatagtttgggtcattgcacattccaaaccaagtgagtcaccaaataaattgtcgaaagttttgccctctgggagcattttcctgaaatgctattctttgggtttggggtcattcctagtggggatagaacacttaagcgctctcatccatttgctactaacgtatcacacagaaccacttataatttgagctcatgttttattttacctcaatctgttgtagggatgtagggaatgtggaggcaattcaaggctagtggttagtaatccttgaaattctgagtagttccccatcttgtactttctgtctaataaatggcagcatttggtgacacgtggaggatttgtggcatacccctgggtgatgtcatggacttctcctcaaagaagtctggcattcctttccatcaaagggtttgtggtcttacagttggtctatgcctagaaaatgaatattacactgattccccacagaggtgacttaatgaccatcagacatttcaggggtctttttctttctattatgaagctaataccaccttctaaaggttccacactgactattcctggggaattgggataaattaactcccagtggagattgctatgggctataaagcatttggttagtataaccttgccgtctttgatggtaaacataccaaccatgtctttggtaacctgcactgttcctgatataatcagtcatgactaaggaaataatgaagccgctagagtgtttgttggcatatcctctggtcatatctggtctataaaagagaataacaagaaaatttgagagatgcagtgccctgtgacaaatgtgctcttcagggtcttcatgtaggaggtgcctttgatccttctcaggagtataattttgagatagcagttgaggtggtaacataggctggtttcctgttgctgtcatgacataccctgacacaatcagcctggggaaaccttctagctcacaagtccaggttatggtccatcataactgaaaaagtcacagtgtcaggaatttgatggagttggtcatatcatgaccataatcgggtacagagcaatgaatgcatgcatgcttgcgctctgctccctttttcactcttccacagttcacggtcttgcttagggaatggtgacacccacagtgggtagatattcccaccttgattaatgtaatcaacacaatcatttacagacatgcccataggccaatctgatgtggacaatccctcatggagactctcttcccttggattctagattatgtcaagttaataaaactgaccataagaggtagatacatatgtagtttatacatgattaaccacttcaacaggcatatatccctaagcctgtgtatttcctcctcaatattatgccaggggaagtctggcatctcaatctcatgatatgttggctacactgagctcaagtttcagtcaactagccatacaaactgtttgagacactttagtttctagagcaacacattttactttaactctggaatctgatatgtgttcttagccatgaaagcagcttcatctgctgtccatccccaccggtctctttttaacaccacagctgcttcctaagcatactgccagggtttgtgggtttggagggttttgtggtggtggtgtttgtttgttttgggggttggggtttttttggtnnnnnnnnnnnnnnnnnnnnttggtgtttgttttggcgtatgagttacttcccttctgggtgatactatgtgccccctggaacatgttgaattacaggccatagtgagcagcccaatgtgagtactagaaaccaaaatacaaaccctctgtaggagtgataagtgctctaaccactgggccccaccagttgttttccttaggtaaatgcttctttgcactcaaaaggattcattccaaccacgtttcctgtcataataatcaagggcagaagcttttttgactctggtacttgattgcagttcatcacagctgataacttgatggatttaattctactctgaagcatttcatgtcccatcggcagggagctggttcttcattctagccaaagctgatagccaaactaatcccgagttctttttcagggtctctgggatcatctaaataccagtcagcattgctcaggttgagtcagaaatgttagtatataaagaattatcaactagtaaaggtaactaactaccaaatgggacaaaagagactgagaagtccaggggtaacatataaagagcagctgtaaactctagcatcaatgaagaatatgcaaagatgagcagatgtcagagagggcctgaacccaggctgtgacggagactcttaaagagactgtagcagtgaatgggtggtaaaggagtttgttagggttgcatgagcagggatggctcacaagctaccggctagggtgctgctgacgtttgctgtaaggccccagttggagttaaacacaaagccacctaactggagtacagtggtctcaagctatagacagaacagtacccatcaggctgtgacatgtagccggtatccaagaatccagcagctaaggagtcagaaagatgtgctagactagctccccttcacacggttggcagcagtgctaaaagagaaggaagaggcagcagggagcagagattaaatctctctcatgacctcccatgcagtggtaacaaagcctgcgatcacaccagcaacaggaacaaatgttcacagggtccagctcaggtaccacataggaggacaaggtggagattcgtaactgaagggcaaataattcattactggcacattttgtaaagtagaagaaattaatatattgaaaaattgctgtgtagtcatcttatatattctatggaagatagatgtgtttaatccactctgaaaaaaataatatcccttgtggaatgccacttcctcggcgcaagacattctcgtctggtatttctgtctctattagtgtggctacaaacccctagactgagctgtcgcggagctcctactgtggcgagtcccccttgtcaccacagcaaggcaaggagctcagcccctccagcagcctccctcgattgtgtcttctgcttagccctctttatcttgcacttaaatgtcatgccggctccttgcaaatagaaccttatgctatggaatacactgtcaagcactaaaaacaaaacaaaacaaaacaaaataaaacaaaaaacgtcagtatgtccaggaatggaaggggagatgcatttcattccagaagggtttctcagaaagtcctgtctttgtctccttttcatttattaaattgaagggcgtatacttcccaatactattttttcagtgctctgtccattaaaagagcaggaaattataccactagaatgatcaagggtgaatgcgttgaagcattataattacatttctttatacttaacgcaaagaaaggggcattgtttcaaaatatatatacttaaaaagcacttagtgtgatgattttgccaatggcacttagtaggatttatataaattagagtgggtacaggaaattgagagtttcgtgcgagatagctgggtcagagaaaggaatgttaagtataaggggtaacatgcatggtcatccggctgtgacacagggcaggtgctgtctacgctcacaaagagtggggctttgtgagaatgctcagtcctgttttatggtcagtttcaagcaaagaggcagaggaagtgtttgggttgcagaatgatcttacaggctgtctgggcaggctttgaagagcaggagagctgtttagatgggcagcgcccaaccagctcaggccaatgatgacctgcagccacaccccaggtcatttgggttctctagatctcagatggtggcgcagagctcaagggccattctcactgtgaccgtcacgtggctgtagaatggacacttatttccttaccaaaccacaatcctgtttggttcggttttgtggttttcttccaacacacaacaggaagtagggaactagcattctggccacgctgtaaatataaggatgatggttacaaaaagaataaagcagtcatcagaaagcaactttctactggagaggaccacccagcggccatctgcctctctggttaccacaggaagtctaggaaggcggagccagatgaagggtaccggccgagaaccctccagaggctggagcaccgctcaccccctctgtgtcctacttcacttaagaaatctatttaattagtaatttaaacatttaattaacaatttattgcttccttgggcctctttctaagatttgccaggctgaagacgggagggagagagatgtcatgtccctctctgaggctccagaagcaacgattttgcttccctgaggattctgttaaaaagatgatatttcaaatgtaggacctcagttaaaaccaaacctggtttcatttctgaagagcttttggtgaggaaggaagatgatgagaagcagctggcgtgtgaggtgagaaaaagctgaagtgcaccacattcccagtgaaccagaccaggttggcggggattttccttcttaatattcagatcaccaaattccaaaatgacatgggagtggagctggaaagggaaatgctaattcgagaatttgtgtgttggttgcaaactcattggtaagatttactctaaatgagagcggaaagagtaacagataaaatcagtaccctggagtgtgcatatacaaacgaatattaatatgattgtcccttcagcctttgctgatctcttcctgcatgtccggcttgtgctgagtgtctgtgcataggggacaggcaccctctgtgagtttacagatgacaaaatgcagggcagctaacttgtgacccaaagtcctatggtcaacacatggtcagtctagaaccccaatggtgttcgcttgcctcttgcccatgtatgtattctctctccaccgagacactcctggcctttgcccgtgtcttgtgccagttggtgcctcccatgccctgttaacatatttctttgtgactagaaaactgaatacaatgactgtacgttaaggcaaaagcatcatggagatgatgaaataaatgtaattttccctcatgtccctttcagatcctgttcctgcctggatgctatctctattatttttttcagtgatggtttttctattttgtctcccaagaaatgatgttgagttatgcagctgcagaagattgtacgactgagcagcgcacggaaaacattacggtcgagtcgaccttaatcaaaagttctcacgctgttctttgtattatttctcccacaactgctggggggcggtgcttcagatcctggcgctgggatgctgtggagagcggattctttcctggaagtgcagaataatagatcacttcctgctcaaacagaattccctttagattgctttaaataatatcctgtcgtatccatggtaatctgaaaatggagaaaattcaagtgtgttaggttaaaacctaggaaccaaattttgcaaatctttaaacactgaaatcaaactgtagagttttataagctacatgaataaggtcgtgtgggcatgtactgagttcatttccttgtagtacagttctgtgaggtgggcactggcctgttctatggaatccagggtggctttgcattgaaatggctgtcattgtgagtaccactaagaatctcaaacatcgccagtgcaaacggtaggctccctagttaccatacagaataatttcagcaacaccagaagaaacacacactatagaatctgtagtacagcgacactaaaatggttttacatgcaaagaacccaggattgaagacatcagtaactcatcaaagttcttgggcaacagagccgggctctaagcctgattctctggctacagttagatttgtgctttcagagacaaaatccctttagttaaagtgatgtggagaaatttaggaatgaagcttcattagataggttatttatattcgaaatattgaaagcatatagaaattgccttttttaggatctgaagttataatcaagacccactttactaaagtggggagcacagggataaatgcactattataaaaatgaaagcggacgtgaaggaacacttcacaaaagaatagagtgttcactgttaatacagagagaacaaatacagctaatatcaaccaggcctgggaaacagacactctcttcattgtggtatgatcacaaattgacattcctggcgtatatgaattatctattgaaatgttcatacctcttgacctgagcgtttcacagttaattatatatcatagtcatgggcaaacaagttcacctgggaaatgaagagcaaagttcatataattatttttgtaaaaaaaaaaatattcatcacaacctaagtgtcttcaggattgagtaaataaattcaggtgtcctccatcctggaacagtagccaggtacaggaaacagtggttcagaccgatatctactggcctggaataatgccggatgcatattttataaaacagcttgtagatggtgtacaatactttagagaagggctgctctgagatgggatccgcttcagttctcagcaaggacagtgagcaggtgagcatggcagtgtctttaagctgtcacggaacaggactgttcacttcagttctcagcaaggacagtgagcaggtgagcatggcagtgtctttaagctgtcacagaacaggactgttcacttctgaccctatactctgaaataagtcacctctcccgtctggctctttcatctgtaaaatgagacaattatgattaaaatctttctggttctaaatgtaaatgcagatttacaaatgtgcagaatggagtaggacagagactgcccatcctgtgtgtgtgccatttaactgcaggtacgggaatgtcagggtgttatcagactaggacaagtgctagagacctccctgggaaagtgctctttcaagaacagattgtgtttctgtcctgttccgtttttgtcctggctgctggtggttactgccacacgagtatcactgtgtcattataaagccagaactttaataacagcaggattcagaatatgtcaaggctttcaaatctaccaaagtctaccgaaacaaatagttttaatgacacaagcacaaagcttctaaaaacagattttgacgtgtttatgggcacagctctcaagacaatataattattccatggagtagtaacatttgtgttttgtgcagataaaaaccttgcccccgtcttctgactcggtaaaacagcagacacagccgcagccccagatcttaaatcatcccggtgcatgctctcattttgtttttctgctctggcttttctccactagaggggataatgctttgtctccagggagtcagagactgcctgcctgccttagagaatataaaggagattaagtaacacacacacacataaagttatatgtatagtaattgacattaggtgctccattaaacaatgaaatgccacagtataccagttcttcaggacttgttgccatggatacccagtgtgatggagatggggaaagagttgcttagaaattcggcaatttcattttgaggtgatgcgaaaaataaaccatccagaggtaggagccattaaaccattcctatatgcgtgcaattttcaaaataaagtgtaaatgtttcaaagtgaatattaattttttggcatttccttatattgtttattgttttataagccaaagggtggggcagtttttacttagctagaaaactatgtgacatatttggaaagcaatattttagtcaaaggtgagtaaaatccagcaaatattgtagaaccacggaaggatggcagttgatcaggcagcagtagtcccttaggtacacgtagtagcctctgaatggataacaaagcaaaccctgggatggagccgatgtaagacaactgtaatgttacacagggtgggagctagggccaggaagacggcaactggcaatgtgctttctgggcaagcaagaggacctgggtttggattcccacacccttcatattgaatcgtaatctggaactgggaggtggagccaggatgacccacatggcttgaggccagccagctaatctgaattgctaagtttggggttcagtgagagaccctgtctcgaaaataagctggagagtgattggggagaacaggtaccattgacctctggtgcacacacatgtgagcacacatgcacgtgggcacacatgaggtcagctaactactttgatgttagttcgtattttcctagttctatgggtagtttgcagccagtattcgatgtctgatgctatgaaatatccctgatctcacccccaaaccatcccagtagaaattcagtggattctgtatcaaaggctgtggggaggaaacgtgatctgcttgggctgcctgtcacccctttggtctgcaaggttaatttggataattggactgactagtcagtatccccttccctcattcctccgagtgtccctcttgtagctatatgcttggctgaggaggatggcctttcctaataaagagggctgtttcttggtcaaggatatatacgtagtccactcctgtgttagaaccttcaagctctcaaagatagtctctagggatgaaaagagctctattttaggacacctaaaggaatgggagtttatctagcagtattccccaccatgcatgctttgtcaataatggagacaatttaaaagttagtattgatccatctgccatgtgaacaccaaatttacaatagatggaaaccagatccagccatgcccatctggaccggacctatgacgactctcagtgtctcagaaaaaactccccaaccctgcaccaggcatttatgcctttaaaaggtcaacccacagcaacatgtctccttctctgctcctgcccctcatccgggtgagggtgcagttcaggtgaggacaggacacaccccagacaggtggagtgtgttctacctgctccctgactgccggaagttgcctttgcaacacctctttttcatagctgtgttgcttgctgttttatcctcctgacaccagagatggctatctgaaaagagaaaaccccagtccaaaaaaaaaaaaaaaaaaaaaaatcccttcaagtttggcttgtagacaagtctgtgggccatattcttgattaatgattgatgtgggaagggcccagcccactgtagggtgtcatccctgggcccatggtcctggtttaagaaagctggctgaacaagccatggagagcaagctggtaagcaacgttctttgtggtctctgtttaagttcctcccacaaggtgcttgccccagagttcctgcctttgggcttcccctgatgatggttgtaagctgtaagccacttaaaccctttctgccccaacttgcttttggtcatggtgtttgtaagagcattagagagcaagctgaaagaacagctgccctgccctctctttcccgcagcagagggacattttcccagtgtgttttcatcgtgttcatccctccacacagccctcgtcttgggtacttttgtgtgcctctgacccaacctgacccttcccggtgagatgcccactgttgtgttacaagaccagaatcccaggtggttgtcctgtaccacttcaccagccttgtgacccatggccagttagttacttagccattaaatctcacgttctacaacatggacatgttagtagaattgtataggcttattaagggaactaagctagtacccaagaggcattaacacagtgcctgccacataggaatattaagtaatattcatatatatgtgtatatatacatatatatatacacacatatatacatacacacacacacacacacacacatatatatatgtgtatatatatatatatatatatatatatatatatatatccctacaagctgaggatctagggacttgtgtgtgcaaggttatccctttatcacgctgccaccctttttttcctggcctctttgtgcttccaaactgcctacagtattatattttacagatagtaataaaaatatttattgactttaaaatgcggtttatttatttccaaccttaaataagtgtttctctattaagttggtaatggagacaaacacagtttagggatgttgtgtttttagagactgtctctctttgtagcctaggatggctctcagcccttacttcttctgtctctgccacaataactgtcttagggaacaaccttttttaatactttgtctaatgcccccctccatattttaaagatgagggattgattgattttatttcattctataaatttataaggcagtacagtaacaaagcactgttcatttttaggctcttttaccactagaagctgatatggagtgttcttatctatgggattaagcacaggtatggtctgaaagctgatgaagtgacagggagaggggatgagcaatgcggggactgccacttccaaactgatgcgtctggaagagcttccctcctggtacctgcaactgaaggcgcagtaaaacgagaggccagagtttagcaccgagggcgagtcgttcaggctagggtgtgagaatttaaacctaagagacagccgagaaccagctttgtagactatagtcttagagcctacaagggcctcagaagatcagttttcttaactacatatcaaaatgacctggtgggcttatgaaaatattctacaaggattctcattaactcaattcagagtggagcctctgtgtgtgtgtgtttgtgtgtgtgttcatttcccccacttatgagcagtcatgtctcatgcatcaggggaatggacaggcatttaggagccactgagacaagagactctaggtatgacagtgattgcttgctaggtcctttggttatctggacccttgaattacttctgcttatgggaacttcctattaagacatcctttcttcttttgaattgttctctttgaatggccttatatggtttgcctatagtatttgcttcaacttggttctgtctattggttctagtctgtctgttacactacataaattagacctgctacctcctccctctggcagcccttaaacactgtctctgaaggcagccatgatgctcccctttaactttattatttcggctgcagagacctctgcatccttattgtactaaccccaggttaattcagaaggcaaccactaagtgatgaatatattctagacgtgtgcggaagttggaagactcacaggaaccaaacagctggcaagataaattcttaagtgttcttaaaacaggcgaggctctaaaatgtcagctatagacttagaggcctgctttgaaatccccagatcgtccacttgactaggtaagtctgtaggcatgttgtctgacagccttgccttggatttcttattctgaaggtacaagccatctcagtacaatgtttagttcatagtaagtgctcagtatattttatcattacttttaaatgctgaactttatgaccgtgatgggagcaaaaaagtttggattactatttgaaaggtaaaatttatctggtcctaaaattcaaatacagaaataaagtttttaataaacaaattagttgatttgcaagtaaattttccagtgcataaagaacacttactttttatataattaagtaatcttgctcagtgtcctgttgcatgcctctgctgataagttagttcatgtctgcttctctctgctgctatggcaagaggaccagtggctgcgttaccagattcactatgaacccggaaaaaaatgtcagcaggtctgagcaagagctcaggcagtggagacaggaacaaacaagaacaatggaaagacgaaacagctcgtgtagaatctggaaaagtaagtgtaggtagagtaatgaggaagatgtggctgggcgggacggttcactgttggcttacaacgttaaaacgtgaggtgtttgccagagagcttcctgtggttttagaactgcagtagacatttgaacagggccaggacaactgcccctcttctctgttccagatctatatctgtttgcacttgtcagctgaggtagctggctcacgtgaactcatgtaacggatctaattccgggccagtaaaacccttgagtttatggtgaagtgcggtaaacatggtggcagtcttgttactctagctgacttcgtcacattcactcactagcttctgtgcacattgaattcctatgaacggaaactttaattaaaatctcaaggattgcagcagatagatggctgttaaatttgctttgcattctgtaggaatgtcaccgctggagcgcatggtcaacagtgagttttctgacagaagcaattgtgataactgaccaccgtgctttagaaagttgtactggaaacattagaaacatcagtgcaaaactggcggtaacaagatcagtgtaagagctgcgttgagtgagcccgtgttgcacatacagagagaaaggataccctaggagtaaggaaaagaacaaagtgccctatttggtgatggtaacatgtgactttatctatctgtctgtgtatctgtctatctgcctgtctatatatctgtctatctctctccttattcagtgttataatggcaaacattccaagtataaaaatcaatatcctgaagatgactgtttttctaaccatgtttggaaactaagcatgaacattcgaagccgtttgcacacaacatgacagtttccaccagccttaaattggcatcttgggatggtgtgcgctgcaacacctgaagagccttctagaggaggaaagaggcagaaggtgaggctgagagggggattctaatgacgatcttttgaatagtgccagttcaatccctaaaacaaaaagccagatctttttttcccctaaataatgtgctctccagcctcacctctcatcctgagaaacatgaaagaggaagtgaaagaggtgacccaaatcacagagtgcctttgataggagggattcggctgttttgaacacttacaatcaaaggaagtgctttccctaattacgtgaactatgtgagatctctcagaatagctcttcctccccaggattccttgcactttagaagtttgcataaaagctcacatggagaatcagatgcaaagtgtttgattcagattttattaggcagaagtgtgcccacgtccctccagcagcttggcagctgcttaggtgtaggaccactctacctggttttgatgtggctggctttcagacctgcgacactaggatctttgttccatctttttcttgcaagaagcaccagtttttagggatagtagttacgaaatatccagaggattgtggtcttgccacttgcctcccccaacctgaaaaggggcttagaggttccatgcacaaacttggcatgggaatgcatgatgtcttatgtttgctgatgcagaatgtcagaatgcttggttttattatgctctcctgtctatctttcatacattttaaatataagagtaacttactgtgaaatgtactacagaattcttttttttttcactctcagaatctagactaggaatcttccagaatccttataataatagaggttacagctgtgttaactttttacattgggagagtatccttggtgttgaggtatagcatgatatacatgtaaggagatgatccctcctctgtttgggaaggcgggcagccatatcatgggccaagaaaaaaaaaaggcatttcttttcactcacctgtcaggctgagatgttttttctgtataagcaagtttatatatgaaggagattgtctggtaatcatatttaatagtgagaagtgttttctgtcagccagtcagtatgtggctgttactgtattttataaattactcaggtgaaagtctgtgtgatctaaaggagaggaaaggagcagcccccaagcagaaggagaaacttctactttattcagtattgaaagcactagctggaactgtagcctgtacagcatttcctaatatgcttggctcttgagcaacgggatgtaacataaagggaattaaaaatgttcttcagccagccaacctacacagggctatcaagcagtttctgtctgctttcataatcctcattggccgcaggtatgtggcttatttcaaagacatttagaaagttgaacgtgatagattgcacccttaatctagcattcaggaagtcaagacaggaagattcctgcagctacctacatagacttgtcataaaagagaaggttgaatattactgaatgataggcatttaaaatacttaagcagttacaggcaaaacccatctgccttctttctgatattttgagccactagggaccttgtgccccataaatcacaattcagctttttgttcgagatcaagaatttatctaagtcactctagatagtgagaattatatatttgttgctaaaattccacgggctccctacaaaatgagttctataatccttaccatccagaagttctccttagtggttggcttatgtaacttctattaagacattaacctaggatgccttgtgccattcccaatgctgagtgacattactcagatggtgttctgtcacttacagagctctgtggctacaatctcccctctaacagatgatgggagaggttctgtcgttcccagcatcacactggaaaaaacagaacttgatctgaagttctctgcccatggcccagtgctctttggccttggtaggttctgggtgccggagaagcccttgcttgactgtgttttctcatgcctgggtggactctcgagcaccctgccacaaatgggcatttcgagtctgttggaatcctggcgactaacgatgggaactgagtgacctcctgggacagccatttcatctttggaaaactctaatgttagatagctctctgctattctgagcttccgaacatgccgcctaagagctctttttgggtcaaggagaaaagaattattgtaataccgtaatgtgatttttttaaaaccgacattaaaattagactccatggaaacacttataaaagtacacatgctgtgtgcccatttgtcccctaattcttatttataaggagaagaactacatttactttagctttttagcttttctgcaggttttttcagtctttttactttttagaatcactctcagaaactaaaagtgacagcttcttggtccaggaggttaatgtgcatgtaacaggaatagagaagcagattcccgggtaatgtgcttgccgtcggagatnnnnnnnnnnnnnnnnnnnntagtataacagggccctttttattacttgttcatggtgactgtgatggtcacgacctcatctgtccatgtcatgtgcatcttccaggttcttatgttaagaggtgacaacattgtggtaaaagtctgctcaaacctacatgttaaactcactagcttgtggcattctagaattgctttgcttttctttcactgggtttgtaactatactgttaccttttcccacaacaacagaggctttgaaaagagtgctaccaggtaactgtgtgatctggtctggaacctgaccatggtggccgccaccaaatatacacatgtaacaaagggtgcaggacacaaaccagtgcctgggatctcgatggactcgcccagggtcagtggactttatcaaccgtctgaaaataggttgtgttgtttctgactatagtaatccacagttatcttaaaacaaaacaaatgagatcataatatttcatatacacagacactctacctgtatagtttgagtttcagacttaggataggacagcatcttttcatgtgctctatgtagaactacctcattccagttttaaaataactttcaattttttacttacatactatctgcttgccttattttacaaaattatattcctgtccattatataataaataatagacacatgaaattgcatttatcatagtcttcagatcagtttctatcaatgttcaagaatataacgagaaatgtagttaaaataagaggccagtgtggaattcaactatgcagctaccatatataaaatgtgacttctactgaattggtcttagtagctgattggggacagtgagaggaatgctaaatacacatgaggacaataatggaaacaattacatctgaggaattcatgagaaaagatggggggtcaggggggacagatattccaacactcagtttcagcacactcctgtaatcctgtaaaggctgaggcagaaggatcataggttggaggccagtctgagctacataggaaaacccatctcaacaaaataaaacaagcaggagagagagagagagagagagagagagagagagagagagagagagaattaagttacatattggatatatcattctaattaatatatgattggagataaattgaaggaagaggcaagaagggaggggtaagagagaaagagaagatgggcagtaaaaatattgaaaaataaatgatgacttgagattccctcactctggtgaaaagcacacagctagttcaaacaagctcagaaaaccccaggcaacgttaagtttaaagcaaaaagtaaaaatgtcgtacccagttatcttaagagttatgccatgcccagttactgccaagctaaatttataagaaataaatttaaagagaaacataaagagaaaatgaaatttaaagagaagacataaaaacctgctgagggaggaaaatgacacattacgtcaaagaagaccatgcagatcactggtaactgctcatcagaaccagtggaggccagaggcagtggaggaccagctgccaaaaggaagacaggggctgccaatcagaattctatatccagctaggatatcctggaaaatgagggtgagatgtgagacaggcttttttttttttgataaaatctgagaatttactgccagcatgtcttcactacaagaaatgacgaagtgtggtgtgtttgagggtaattataaatatattttttatctcattaaaaagaacactaactgcttgaaagaatatttgtagtattatagtaggagttttagaatgcacatccatcagaatatataacaggaagccacaaagtatggagaggttctacatttacaaaattaagtcttatagcagctaccgaacaacctcccaaagcaagtagaaagcaaagagacagaactacgaagccagtaaaaatgaaatgttaaaaaacaaaacaacaaaacaaacaagaaacaacaaggaaaaccaggtaaaacaaatgaaaaaaacaagatcatggccttaaaccaaacaacacagagatctgtgttaagtgctttagatcacagggcagagactctggaatgaatccagctatatattgtccataggaggagttagttataagacacagattgctagaaagtacagaggtacacggatagaaagcatggtgaagggtcacacatagcctctcaaccaccaagagccaagagtttcatcagcgatgccatggatgatgttacttatgaaatatagtaaccattgatgtctaatagcagaacttctaaaccaagtaaacaaacgtaatggaactcagcaagaagcagacagccccacagttgcatttgtgagctgctttctgctgtatttacttgttatcaatctgcataggccttgctatgtcatccagattagtctctagctccaagactcatgtgacacccctcccctctcctcagactcccgagtaactggaaccacagagataggacaccatgcctggtttatatttgtaaattttaactgtctccctttgagcaactggaacattatcctcaacacctataagatacacattcttattaggtacacatgaaatattcttcaagatagaccatagaatggtctaataagtttcaataatttccaatcttctgtatggcatcaaccacagaacctatatagtcaacattttctcctggaagtgaaattctgaatgttttttctctctaagatcaagactaagtcaaggccatgtgtcctctccatctctgttcagggtagtagaagaggttttagtgcaccgaaatcaaagaaatcaaaggcgtaaagactagaggggccaaagtaaaattgtatttgcagactaactcattgtgcctgtgtagaaaaacatcttgagaaagtctgtaaacggttctataggtcatccgtttcctttctcgttggtatcttctcaagcccaacactttaaagtttgtgaaagtccaatcttttcctttttccttatcctttgtgtgatatctaagaagaccttgcctaactcaggtcatcaagagttagtgttaaattaggtttatttaaggaatgggttcaaccccactccatatttatacacacgtgtgtgtgtgtgtgtgtgtgtgtgtgtgtgtgtgtgtgtgtgtgtgtaaaaagtagcttcaatgtctgggatgtagtttttttttaaagatttttttatttttattttatgtgtatgggcatttttgcctgcatgcatatctgtatgccctgtgtgtgtgcagtgcccacagaggccagaagatggcattagaatacgtggaaccaaatttacagagacttgtgagcaaccacgagagggctgggaattgaacccatgtcttctggaagaggagtactctgttctaaaccattgagccatctcttcagccttggatatgaaatttttgtttggtgctattcgtaccccaaactcaacataatgagcaacacagcatgtacagctatatgtcatgcattgtcttaacctttctgaaacattaatctgacctaaagacatcttctctcattagttcaaaagggactatggaatatttcattaacatgattttaccttaacctctaaaaatataaacttaatcaggaagcatccagggctgttgagatgactgtgacgtcatctaaaggtactagctgccaagccagccctaccaagacagaaccctgagttctttctccagggcttacagaatggaggggtgaatcagatcctgaaagttgtcctctgaccttcccatatgtagcccccaacacacacataataaataaatataacaaaaattcttttgaagtggtatttataagtagccttacaaaaattaagactttttaaaagttttttttttcttttgagtcttgggatgtaactcattgcagagcacattcttgcacatacaaggcccagttttggctcttagacacagaaaatagttttgtttttgtttttgttttttcatttaataaattattttcccaaaaataatgctgaaaactaaaagacaattatatttgttataattttaacattttcgctcatcatttcatctgttccatttaagtccttccccttgatgcccacttgctaactcctgtcgcttgttaacattgtgcgttatctagtgggcttgccaaacttaccctaaagtggacatgttggctgctctactcagaagcaatttcgagtcctccctaccttctgggtcataaagacttctgagaactttctgttaaaaatgctatgctgcaagaggcagggtgccaagtggctttggtacaacaggcttgggtacaaagccttctctgaattttactgttccaaaggaatgaagaactgggctttctattccccactgctcaggtgtgcaatgtgggtagccctttaaggtctatgctgaggatgaagagaagcaaaacctccctctcactccaagccatcttttctatcctgctggtgggacttggatgctgtgtgcacatggttggtaagaaatgcatcagtttcgtcgatctccgtgggttatcactgcttttatctcatgcattgtcaagtttgcctgagtgcttaatgtctttggataacactgggacatcttatcagaattttgtgcaacaaccattagaaataattcttaagcaattccctcaagctgccattgatcattatatggataatgttttgttggatgattctgacaaagatgttttagagaatatgtttaaggtaacacagagaattctgccatgctgggggttacagattgctccagaaaataaatacaaagaggagattcacttagttatttgggttataaaatcaatcaacaaaaaattctactgcaaaaggtatagattcgtagagaacaattgaaagcacttaacaattttcaaaatttaataggagatattaactgactggggcttacaattggattaattacatttgagttaagtaatttgtttcagatatcataagaagattcaaatttaaacaatccaagatatctaacaagtgaagcagaaaaagagttaattcctggggaacaaagactacatatgatgcatagacaagatgcatatgtggatggaattaatcctaaatttgattgtattttgatcattttgtcttcaactcagtctccttccaggcttattatgtaaagacaagatagtattatggaatgaatttttccctagctcaaagacaaagtaataaatagaagacatatatagaaaagacttctgagttaattataaaaggtagaatacaattacattgattgtcaggagcagatctggctgaaattgtagtatctcttacaaatgctgagattatatcattatgggtattcaatacttgggtgaaattaataacaaatatctgaaaagcaaagtatacagtttataaaaaaaactaattacgttcttccacatatcataaagagaacaccaattccagagaccaacattctatataaatgcaaataagatgggaatggcaggttataaatcagacaaaataagtaaggtgctcaaaagtccatatatctcagttcaaaagttagaattatatgcagtccttaggtattatattatcctgaatctcttaatataatcactgattctttttatgcagaaagagttgttttgtatatagagactactgaatttgtacctgataactcagcattaactttattatttataaaattgcaacaagccatcagcagtagaaactatcctattgtatgttactcatagtcagtctcatgcaggttgtccccatccattagctcaaggaaatgaggaaattgaccaattactaggaaatgtgtaagaagccttaaaacttcatgaaaaacattatattaatgggtgaggcttaaagaaaacattttccatcacttggcaataagccaaagaaataattttttaaaaaatgtcgtatgtgttctctatacaaccaaattccattacctgctggtagtaacgctgggtaccaaaataaatgacatctggcaggtgtatgtgttccattttgcagaatttggaaagcaaaggcgtatacaccataccattgacatagtctcaggatttcaatgggcaactgctttaagttctgaaaagactgattgtataattacacacttaatggagataatggcaattatggggataactgcacaaattaaaactgataatgctcccacatatgtatccaataagatgaaaattctttgtatattacaatataaagcatgttactggtataccacatagtcccacagtacaagcagttatagaaagagccaatcatgccttaaaagagaggctaattaaacaaaaaggaagagtaaaagccccccaggaacagaccgaataatgctttgttaactcgaaattttcttcatgttggagaaaaaggaataacagcagctgattgggttaccgaaaaaactgaggaagtaggccaaccaatatactataaggatgtgttgacattagaatggaaacttgcaatagttttaagatggggatgttgtcatggtaatgtgtctacagggaatgagaaaatatggttattgacagacttacaaagattagatctgaccaggggaaaccttttatcagctaagacatgaatgtcttcacaaagcaagaggcccaatgattcattctcacagactgtctcagttactggtttctccaatatatgcatgtaaatcaacttgaaaagggttatcccaaatggtgaatcacagaaaagactgtatggacaatacatagtcttgacggacagcacaaagactagataacaaatgctacagatagcttttttcaggacaaccaatttttttttctcttgggcccaaacaaaaattcttcacctcaattcagtagaaagtaattataagaggatcatcatccgaatcccttaaattgggatgagtggttttggttgtttgatgtgttatggttattatcatctggagtggtaggttgttttgcttaattattgtatactgataggaatttaaggtcattttgtttttactgtatattaatagacatttaaggttgtattataagttgtctatttaaaatacaatataacattctggttttatggctcttataattatttttattgtatgtagattattaatcttatgggggaaaaggcaacttttaaacaaaaaggggtatgaagtggaaatttctggttctgtcatgtgttatagacttgtgtgatattttcctaaagcaagacccatgagaggacatgtgatgtttggagagagtataagtaggactcaacagacagggacagggcacttgcataggtagacttgcaatgcttcagtggtcttgtgtcttcgctgatcttcactttgttgagagatgcacaccagagaacttctgaaggccgcctggctggttctggttgctcccattgactcatgcagacttgggggaagcctggcagtttctgctggatcgtgcacactgctgatttgtgtttggtattctaacactactgaactgagctgttggtatcctgacaacagagatcgccccaaagacccaaagaactacttctaaacaggtccatatcccctgtcctttttatcatgtcttctctacttttggacactgggctagaagggagtttttgacggttttgaaaaatccaagcctacatatagaagtaggtacaatataggaataaatatgtatctttgttcttgcttattaggttgagtgtgatcaacatatatcagcgttttctggtactttgcatgcttgaacttatttcatgtttaaaaacaggaagtcacgttcttggtgtgcatcatactttaaaaagtgttttcacatccatttaaacttattaaaactttcaattatgaagatagaggacacaaagaatatatgactgctagaaggatcctggaacacaaagaaaacatttaaggaaacattgttaaaaatctcaactaagaggctgaagtaatagaacccttgccttagcatgcatgcctagcaaggccctgagtttgattccgagaactgccagaaagtctaaataaagcctgaacgtcaatttatagtaatgttctatagtggcagaagatgcaacagtgtgggaattgagtggtaaggataagaggactgtcttagtcagggtttctattcctgcacaaacatcatgaccaagaagcaagttggggaggaaagggtttattctgcttacacttccatactgctgttcatcaccaaaggaagtcaggactggaactcaaacaggtcaggaagcaggagctgatgcagaggccatggaaggatgttctttactggcttgcttccactggcttgctcagcctgctctcttatagaacccaagactaccagcccagagatggcaccacccacaaggggcctttcccccttgatcactaattgaggaaatgccttacagttggatctcatggaggcatttcctcaaatgaagctcctttctctgtgataactccagctgtgtcaagttgacacaaaactagccagtacaaggactaaaacttctactaaaaaaaaatgatttaaaaattatgatctaaggagaacaagttttagtgtcctcattctgtgcattagattccacagtgtagagaaaggctgactgtctcggttggtgtctggtctaccccagaggtgaccactcttccatgaccattgactctgccttcattagacacatgcatcctgtgcactgttttattgcatgtccctatggcttctgggggttaattatattttctctgggctggtaaaataacccaatcagtaaagtgcttgtgagcacctgggtttgattctcagaccccacaaaaaggaactccgagctctggtggcacttgtaatctcagcactagagaaacaaaaacccatgaatctcacagtcttgctggctggccagcctagcctggtctacttggtgagcttcaggcccatgagagaccctgtctcaaaagatgtagatgttgcctgttaagtaatacctaaggttattaccatctggctttcactccacatgtgcatctgcacacatatgctggcacacaaagagatcatttagtttgagactgggtctcatgtagcctaggctggccctgaacaaactcactacgtagatgaggtgggccttgaactcttgatccgtctgcccccacctcgcaacgtctcactgtccctggcttatcttatgctttaattgttatttatggggtacagtgtgatcatttcatacatatatgtgtaatgagcaaaccgtggtgattagtgtttccatatccctaaacatttatcatttcatgatgaataagagctcataactcatagtcacaactggaaaaaaataactcaaagatatatttcttgttgactttaaatcagaagcccttgcatatttgaatgcataatatacttattttaggaacccatttgatcaaaccaatgcaacagaaacctcactcagtagcacatagagaagatactgtgcatcttagttatacttctattactgtaataaaacactgtgactcaaaagagcttgagaaagaaagggtttatttcacattacagtccgttggggtgagttggggtgggaaccctgaggcaggcacagatggacgaccatggatgaacactgacttgctcctcctgacctgctcagttttctttttcatatacactccctgactaccggaccaagatggcaccacccacctacaggccagtctgaagggggaatatttttattagagattacctcttctcagatgaccctagcttgtgtcaagttcacaaaatagcagccaacagaatggacccttggctaactttacacacaggtacataactatttaactatatcctttcctttctcatttgtttccatgacataatattgacatcacagtataaattacaacctaaattttaaagtacatctttaaaattttaagtactttaaaagtttaattcatttttttaataacccaaaatctctctaaaaatctaaagtctcttaactaggctcctgtaaaatgaagaacaagtcacatacttcttatttcaaaacaaagaggaaccagggtacagtcacaatcaggtgaggcaaaaccaatgcccaatagtgtaaatcaaatccccagggtctttcatctggaacttcctcacaatcctctgggctccaaagggcttggacagctccatctctttggctcagccatctgcagcaaacacaacgtgtctcctagatttcacactggaaagctccactctacacttgccactgtccttggtggtcactccctagccttggcatctccagtatacagtaagctctgtaaggtttatcttcatcattagcttcctggtctcttcagggattctaatcctgcctcatggttcagtgagcttgattttaagcaatttgtagttctagctgatgttatgtctgagttcagttctatacatttttgggaggttttctcttttcactgttgataacagctaatattaaggagaaggtatacctacatgaagttcacatgtgagtttggtacagttgtttcaagctgatagtggctttcttgtttcccacagaaagagcaaagttgtgttgttaaagatagcaagatgtattattgattgagtggaagtttagcccaaagacctttccaactccagagcaactaactaggctgcagtccagtggctctaagtcctggctgcatatcagactcacctggtgagcatccaagatgccccgactattaccaaataaatcagactgaagtcagaatatcagtgtgaggacactttaggtcgttcactctgtccttgcctaaacaccacagccataatgagaaagttgcctctcgatccttactctgcagtgcttttcatccagacccagtcaatgagccagaggtttctgccatccaagaccttgatatgtgcggaaccacgggggagtttgtttactctctttgttgtagaaatgtgtgggcccagcatctatgtgactttcagagtctgtactcacggtttgtagctctgaggccagaccatctggttgagtcttggtctccttgtgttttaaccatctggccatgggcaggttgtttatccctttgttactattttcttggtgataaactgaagatgatgatacttaagtcatggctcaaacaagttaatgcattcagaatggtttgatcatgctcatacaaaggaaatgtcccacacatgatagctactgtaatggacaaggaagaatgaattcagcttacaacttctgaaactcagtagttcctacatttgaggattgcagaaggattagagtaatgagactgtgattgggtccatatgtgtcaaatgccatagcatatctctgtaggctcttagcagactctatattctcctgcattacagccgaccatcttcctgggctcatgttgaacttttacaacctagctcatttcagtctcttctgtatattttcctaaatgtctcaggttgtctgaatgtatgtgaagaagggttagtatgttacatcagttattctctggttatattcccacagcagtccctatgtcttgagagccagatgcagtcaataagcagtcgtacagatgaccttggtccatggatacatgataaaacatacccatgaggctcagtagactttgtagatgttggcaacaagcttctgtttaaccttcccagcaaccaacctgaattgtgtagcacaatgtttgttaaaatagtcactgaagcaatgagataaaaacaaactaatgatccaggacaatcacaaatgctattttttttctgagatcattatgttaaagttataactttacatatgatctaattaaagaatgcccactgtattagccacggttccctgttaatggagttgacctatggaggccgtaggtgaagactggggagggaaagattggaagctatctaatctcctttatccttaagattctatttatttcattagaggtaggtctaaaggtagcatacaaaatactaggttttattatgaccccttcatacatggctcatcacactttgctcacattcaccatttccttatccctttcttgatccctttctccccaaatagtcacccttctactttcatagatatgtgcataccctctctatacatctatatgtcatataggtctatgctctgcataggagagaatgtaacaccattgtctttcttccccattaccgtgattgttcctctcttcttctgttctccagaccttccttcacacacacacacactcacatgtgtgcacacttttctatttcatattatgtgcttttgaaaatctagactcctcatataagacttgtgaacatgtgtggcacaggttgagtccagaggggctgtttttcctcaggatctatccaccttgttgctgtttgtatttcgtttgttttgagataggatctctctctggggactgtttggtcaccagttacgctaggtgggctagccaacgaacccaagaaatctgcccttctgcctcctgggtgcctgtatgatgcataccaccacacccagttcttctcatgggttccagagaccaaacgcaaattctgatgctacaagcacttgactggctaagctacctccccctccggtatccattcaccccatttaaaaatatttatttttatgcatatgtgtgtttgcctacagcatgtatgcatgctacaaacctggtgcccacaaaggccagggaaggatctcagatccccaggaactagagttgcaggtggctgtgagttgtcttgtgagtagtgggaatagaattcagcaagtgctcctaaccactgagcaatctccccccgccccccgcccctgcccacacccggtccccattcacctcctgatagtctttcatattacatatcttggtctttgtgagtagtgccacaataaacatagatatgcaagtatctctgtgtgctgacttggattcacttggatacatttatttcctggagatatgctgcatatagctgggtgatacgattgttctatttttagctcttgtgagaccctcctccaggctgattcccataggagctgaactagtttacatcccccgcccggcagtgcgtaagagtttcttacctctcaagcatttcatgtgattaattttcttcatgatagtcactctgactggcgtgagatggagtctaatatacatttgatattcatttctctgatggctaaggatgctgaacatttccccatacatttatttgtcctttgtattcctcttgcatctgtgtatatgcccatggatgtggagatcagaagtcgacactggttttcttcttcctcaatcacttcttgaatttaattttggggttagggcatctcgctaaacccagaactcagcagctgatctaaactgcaagcaagccccagagattcttatgtctctgtttcaccagccagggattgcagggatacctctctatgcaggctctttcatctaggtcagtgaagatccaaactcaagtcttgagctttgcataaaaagcactttacccaggagccatcttcctagctcctgagtttcctctcttgagaacagttcagttcatttgcccattgattgattgattggataattgggtgatttcattaatgtttaagtttttgatttctttcaatattctagatattaatctgctgtcggctagttggcagaagttttctcctattctgttgattgcctctttactgcgttaattgttctctgtgctttgcaaaagcctttgaatctcacagattccttcctgccagttcttgcaattatttcctgagccgttgaagtccttttctacaagcctttgccagtgcctatgtctcgaagtgatttcttatacaagttgcaaagttttgggcttcattccattgtttgtgcatatgtgtgtggatcttcttggtgcagggtgagagatggaggggtctgacatcattcttctctttgtggaaacccagtttccccagaattattcattgaagaggttgtcctccctccaatatatggttttgtcacctttataggaagtcaggttgctggagtggggtgtgtggatttctgggtcctctattggttggcacatctgtctgttggtcctgtgatgttttgtagagctctttaaaccctgtaataacagattatacgtgcaggattcggtgctgttgttttccagtgaataaaggcatgctttcacctttagttactgagtctaatattagaacatcaaaagagtaaaatcactattaatttagcggaaatatccagatattcaagatactgtctaattggagtgtaaaagatgttaagggacttcacacactattttaaaattaaatttgcctaaactcttctaagtgattttgtagatttccataataaatgtggcaaacatttctcttatgggatgtaaataatcaaactctgttgcactgtagagtaatattataaagcacttagctaatcagattgtgaagttgctcaaaattcctaccatgtaatttttgcatagagagaggctgcctcttgctgtgcaattaacgggttttattagccataaatttggttgttgccggctggccttatgccctggcgcctggggagaattagatctcgctttctgacctgatcttacgcagtcaaatgtcaagaaggtgtgaatatgttgcagtagagacagtggcccagcctctgagagcttccttgcatttttgtaactaggagggctctggaattttccatccctgttgtaatgtctgggtgtcctgtaaactcatattcctttctgttctcaaatctggtttgtaggcaaagcactatggtttgctgaatataagtggggctctgaggtcacatgacttgtgttaaaagtctggctttgccattcactgtgtcctcaatgagttttaaattgtctccttgcttaggtttcttcccctgtaggaagcatgatagtagagattagtccatggtttgtggtgagaaaatgaaaggttagtctagttcataataggcactccatcaaaaaatgttaccctttgatatgggagactctaaaaattcatatccatttgagcaaggcagttcttaataaatatgtttatcttaataaatgtttaaatgttttattcgtttaggtttgtggttggttggtttgtgtttgagacagggcctcatgcagtctaagctgaccttgaactgtctcgatagcactggattacagatgtataacaccaagctaagacagacaattttaccagacattctttaagaagatcaaggactagaaatatacctgaaagagacagaagtgagagacctgggatcagattttattattaatatttattaggcccctgacaagtgagcccatctaagacccagtttccacaacatttaaatacactaaagtgtctccttaatgagaaaatataaatgctttggaaatgtattgtatttaggtaaaatcttaaacatagaaaaacaaatgtaagtatatgaaaataatcaggcaactcatgccagcggaatccaccaccagtagggatagggatggattcattgattcctgatgacggatggaccataaagaatcaggaaagaggcctgagaagacactggcattagtcaagcacctggttttgctggaactggggagggacttcctgtccccgtgtcgcaagtgagaagaatgggtctcagggtcttcatttcttcaaagtcctcgtgtgtccactttctgttactgtaacaaacaccgaagacaaacctgcttaatctgggggaaaggttagcttgactcacagtttgaaagggttcagtccatgactaactattgcctggagcaccacagcgtatggcaggaatggctggtagaggatgctgctgtcatttatggctgggtacaaaagcaatgaatgggatgagactgaggccccatcttctttctcaggagcaagactcccctctcagccccacctcttaaagatttcttcatctcctggtagtacatgctagagactaagcctttatttaccacgtggagctttggtggcattaaaaatggaactttgccagtccccagttaagtgtcagagccagactcccactacagagggggaggtcctaacacaccgtgtccagttcactgagcagttattggtagtttcctccatgagaaaattatattagtaatccattcattatcatcagaaattaacagacattgcaactaaaggaactgggaaatgtgtccacccaagtcactttctaggaagaaagcaagacccaaggctttgtttgggaataaactttttcttttcaataatttagcacaatatggccaactctttgaccaagttaagtaacttgtgatcaaaagccagatttttacatgtgttttggtcatccaaatttgaatacgggttgttttaatactttttttttcatgttaacctatgacacccagttacaggcacaatgaatgtaaatctcttagcaatcttgtggtttgagacatttctttagtctcaggccttcacactgtttgtttcattaggttcttgccattcccctgttcagccaggttagactctcctcagcctgagttaagcatggactaaaatagagggcccaggcccatcccctgataatgagtcagctgtagcacccacccaggaaaaccattgagcaaccacagacttcccaattctgctgacacggctgatgaaagctttgtgtgacgtcatgtcagctttccagaaacatgaggagaacgagttgtctagctttccttcgcatctgtaactagttttctaaagagagaaaaaagagagaggagtctctatgatgccaaatctctttaggaatataggattcctattatggtgccggaatgtggttcatttagccatccttatttccctgagtacctggggagcctcactggaaagagaatctatagaaccatagagctcactgcttgtcagtttgtgagcccaaagtgactcaaaaatgtgacccgtgcctgacactcgggtgatcaaatcccccttcctgctttgttagtcattcttgtaacgtagactttccaatgccaaggggctagattcccattttaccgtcatgtatgaatcactttttacaaaggttgatttggggaaaatgctccaaccatgaatccagtcaggcaagcagcgtgcttctgcgctggatccattcaggcccctgggaacttgactcacgcagaccttataagaattctacttcatttgccttggtggtcagactgcaatagttagcagggaagggattggaagggaagatctgtctacgcctggcctgaaggaagtaggcagcctggcctcatagctctctacgtactgctgtagtagttactttaaggtctattgttctttgcctttccactctcctactaagggcaatagttgtgggtaatgtggtcaagaaagtgagtggaactctgtgctgagaaaccagggatcctcctggataagcttctctctggtggagggctgggtgcatcgtggcatacacacatgctgctggccaagtgtaggaagggcagcctgcatgaggaggccccactgcagagagctggggctccatcccagtgcgtggtagaggggcagcagcctcagcagcatgaaggacattatgcagctctcctgaagaagggtttctggacagagagacagacagaggacagggatcaaggggaaggcttaaagctgactaagcatctatcttcttatcactttttcttaatttttgaaattataatgtactttcatttctcccattttttgcctccaaactttcccacattcctctctcagctctccttcaaattcatggctgtttcccatgaacgattattgcgtgtgtatatgtataaacatgtctattcctaaatatagcctgttcagtccacataatgttacttatatggggttgaccatttggcactggacaaccaattgatgtgcccttccctggtgaaggccatctctcctgcttcctcagttgcctgcagttctttgtatagggttgtgcctcatgacctttcctcacccactttggcatgtctgttgttgttcttgtttggttcatggttaggcagtcattgggtgtgagatttgctggttgtggcttctggcataactagaagatacaatcttacagccaactccctgagcctctggctcttccagtctttctgccccctatcctgcagttacctgagctgaggtttgaaggcttttgaagatgtatcccctgggaccaggctccacaattctgcattttgatgggttgtgtttttctggagtggtctctgttacaaagtttccctggtaaggggtgaagactgcactaatctacgggcataaggacaaatatttacagatggttgccagggaagatgctggtttagaacactggtgtttgaagctccccctcccatgaccatgatgtcactagctctgagtagctaggtttccagaagaagaacctgaaaggttcattgcaaggcccagggcatggtcacagagtgaagagtgagcaagggctctctaacaaaggtgccggcttctcttggacagtgatggagttgaagcaccactgtcaaatcctctctctcaagagtttacatcaacagggagctgaagaacctccgggtggttagacagtcattcttttgaaatctagcccaagttactctttcaggtagctcaggtaaaagaagagattggctactcaagcaagcatgaacggtctggtcttttattcttgcctgtattaactcagtaccaacccccaaacctctatttcctacccagttgctagtcacagagtgtgtttttaatgaaatagcaactcttactgtatgggaataaatgtttcacaaaacccacactaattcacagtgtgcggattccaccagggccttttctgacttttttcttgatatcccctgtctaagctggaaaactaaaaatgcattttctggttgccaatagtaagcggtataattgaaatattaaaccttttctgtatttaacttatgcctccttacatttcaaatttcttgattaaccatagcttattccataaagtagtgagactttaatatatgtgatttctataacaatgtcctagttagttctggtatcttaaccatggccagctcctcagccccagctaccagaaccacagaatcccaattcaaaataacaaaatggccctaatagtctttaaactttcctttgagacttcatagtccaggcaggctcccagccaccacattgccctcaatattcccatctttcaaattctcgcacagcagctcacaagcattgaacactcaatggctctcctatccaaagtccctccacatacacaccccacaaacaaacaaacaaaaaccccaacgtggtcaggtctgtcacaggaataacccacaatcctagtaccaatttatgtcctatttagggtgattatcactgtaatgaagcaccatgaccaaagcagcttggggaggaaagggtttatttcatcttacacttctagaccacagtccatcactgagagaagtcaaggcaggaactcacatagggcacaaacctggagatgggagctgatgctgcagccgtggaggggtgctgcttgctggcttgctccctatgcttgctcagcctgctttcctatagaacccaggaataccagtccagggatggccccactcacagtgggctgggcactcccccatcaaacaccaattaagaaaatgccctacagctgaatctcatagaagcacatttttcagttgagattccctcctttcagataactgtagcttgtatcaagtaaaactatccagcacacacaatatccttttttagctattaacaagtatttactatggcatttttttttaaatcttaaaagttaaatttaataaatgtaacttttttttttgccatgccactcttgggacgctttctagtattaatgtatctcaaactgtaacatacatcaggaatctatttttccatggaaggacagcaataatgtatttctaattacttattggaaaatcactctaaaagggggatgatataaataacagaatgtaagcaaatctataacatcagtaacacagttctcaacctatgggtcatgacccctttggaggtcacacatcaggtatcctgcatatcaaatatttatattatgattcataacagtagcaaaattacagttatgaagtagcaacaaaataattatgtgcttggggggtctccacaacatgaggaactgtgttaaagggtcgcagcttagggaggctgagaatcacttccttagtacttgaatgcctctagatgaattttgactctcaactgataaaagcctaggctttctgcacctctgcccacaaagagatattatacagaaaaaaatatatgtatatatatttagctactagaaaaagggctttcattgaaaataaatatcctgtctacatctctggcctccaccaccgtcacgtggtcttactttggggcgtggttccgcaggcagtgttgtcagcatcacttgcttgttgagtgcgaacatgtctcagtaactgtaagaggagggaaagtgaatctgaagcctacctagtgacactttacacattttgcatttgattttcgtacaggcagaaatcctgagcgtcctcagtcacagaaacatcatccagttttatggagtgattctggaacctcccaactatggcatcgtcacaggtaggagctcaccgttggactgtcttcctccccagttgcccggcttccgattccttcagatgcgaaaatgcttaccattcggttctgttgtgtgctactgtcaggcgtcacttctgttgccataaagcattaataaaactgattatatcaatataattaagaatggtgtttccacctctacccatgtttaattgtggctaattatacctgtgtggatgctgttcaaatgcacctgcagctgcattgccaatacgtaaggtgccatttaactaaaatttcatttaattagttgaagtgagagatgttttttgtaactctgtgaccttttgtaaattaagatttcttgagatgttcatgctgtaattcttgcagtccgttctactccccttagagccctctcttcaggtctcttatgtgacgaccgtatttttcaggtctggtcatctgcactaataacgaccttgagctaagttatcacgcaattttgagcaggagtttttagctgatggaaataccctttctgaaaatgaaaatgaacaggtgaaaattttcgccacaagaaactaaaaagacacagattttaaaacactttacacttagatttgtacctcccagtggggaaaggttaggtccactgcctctctgcagtgctagattttacagggacaactctggtcaggtcctttattgtggcaactctttgactccaatgaaaactgtaaggaaaccttcagagatatgccctcttttcctgcactataatggcagagatttagattgtctttagagaaaaaaaaaacaacaacaaaacactcataatagaaagaactctgtgggtgcttataaaattcttatttaaaaaaaatcctgcaaagtaaacaataattctatcttataagacagaggctgaagctcttcagtttacctttgctccgtggtccccggcaggcagcagaggcagagtgccacagacacctcacgtggttcttgtccaagtgctcctcctgcctgcaagccagttttggaagggtcactggttcttcgcagggtcaggttgcgttgatgtcttgatgtccgtcctctagtggtttgatgtgctctttcttcgtagcttttttttacattctcgttaggtggagggatttgtatccccagtctgcagcctctggtctgtaccaaaatgggcacttggcaatgcttatcttgaacgtgtgcgccatataatgtgcagaccccagaacagctctgctgttatgagtgaaccatgccacacttttgctgccaggattctggttcaatgttaagtttgtatctgactcagtctccagtcagctccctttcccaagtgcactgcactgaagttttgactagttatgatcaccataggtctgaatccagttttctgaccctagcttgtggctgacatttgtaacaagcatctattattcctgtctactaatgggattagaaatggcactttctctttttcctttgaagtttaacacatggagaaggggagcttaactgggcttgccttggttccattgctgtgataaacaccatgaccaagagaacttggagaggagaggatttgctttacctttaagattagagttcatcatgcagagaagtcagggcgggaacctggaggcaggaactgaggcagaggccatggaaggctgatgtttgatttgcttctcattgcttattcagtttgctttcttataaaccctaagacaacctgtccaggggtggcactgccacagctatggactgagcctgcacaaatcagtcatcaaggaaatgctctacagacttgcctacatatgatcttattggggcattttctcaactgagaatcctcttcccagataaataattctaggttatgacaaaacaataaacagacagacagacaaacaccctaactagcacagggttactcggatgagtttttccagtttcccgaggtgaagataaagagatatgaatccctttccacgattttacggtccgtgcccaggaaagtgtgaagtgtggcaagctgtcttgccagtctgagccactgcatcggatagagccatcagtcctgaggtggtttgattttatttgcatgcttatctgattggccaggctttgttctgtgtctcccttctgcaggtgtttctccttataacctcataaccttacctactcaaattctttggttagagaggtctgttccctcatgtatttatgtcttaaagacaataagtaagcaactgttaacatcaaatacttctttaaaataagtttcagaatcatgacataatagaaaaatcatatatttctagctttcatattgaacccgtgaggttgattactggagaccacttcgcccattttgttgcttgaaagcattatcaccttaatacagttatctttatgcctagagatccagtttcagctaaacatttgtttattcaagccatttaaaccaaacttccacagtcttaggatgaagcctactcagtgtgtaggtggcagcatggaccagctatgccttgctggggctaactcatcacttgtgtgaacctcatggtgtttcagatgttggagcctctgagggaagaagtttgaatggcttgagttcattcagcttgagatttttgttaattcaaaaggttgttagggcaggcaactgctgtcacttacacttgaaaggatggtttaccagggatagagaaggcagtactgcagtgcacactggaagataggagaacttgttccaacgctaatgaagcagagttgggaaaatcactgagtccatgcgcacacttctgcatgtatttttgtgggacactttcacatagatttacaggactgcttatgaggaaattaagggcaactgtcaatttttttcctttaaggagaaattaacatctcccaggaaatctataaaacaatggaacatctagacacttagattccaaggtcaaaagaaaagatacaataatggtttggggggtttttgtttggttggttgttttttgtttggttggttggttttgtttttgtttttttgttcttggaaacctctttgtgtttccttggatctagagtcacagacagttgtgagctgccatgtgggtgctgggaattgaacctgagtcctctggaagagcagccagtgctcttaacttctgagccatctctccagccccattggaaacccattaatactctaacatatgtagacccctgagacaggaatgcagagtgattaggtgctagaccacatgactcattcatgccaagccatatcagaggaacattccattgaagggtctagtaatctaagagtgatggaagggtatcagacttggtcccagtgttccagagaaaacatgacttggaatcccaaaagtatagagaattgcatctttgggctcagtggctgattgcacctcttgtttattatgtatcacttcgtcctgcatcatgcatcaagagaatatactaattctgcatggtttgttatcaggtctaagtcctcattctattcaaccacagaatattaagtacccaaactcatttcctttaacttgattttgatttacttcaataatagacacatctaatttgcatattctgatactggctggttaaagtaagccagttaaagacaaatgtcacgttttataacagattgcagacatttacccaaattcatttgttctgctggtcataatctaaactgaggttcatcttgatggtactttattataaagaaatctcatgataatgatatttgtttcaacaacagaacactgggacctccacgtgcaaacattcaccattcatgaatttaactaactaaggagagaaagaaagagatggaaatggggtgggggggtgatagaaagcaatgtaatataaactctctattcacagagtacccacaactgtatttgctagtgtgagtgtctagggctgattctaagtacagatgttcctctccctacaatgggttcattctcagtaggcccaccataaattgtcagtatcccagacaaacgtggagttagtgcacctaacctattaaacatcatagcttagcaacacagtacaccatagaacatgagaggttccctttgtgaccctcatgactgagtggagggcatggtttactgttgctattgttcagtatggcaagagagtacaaaaactgccatgttgcatatgattagcaagaagggaccatagctcaaagtgtattttctaatgaatgtgtgtcaattttataccatctgtaattttaaaatatttcaatttaaaaaacacatttgtttacagaacagggcgtgtgtgtgtgtgtgtgtgtgctctcttatagaagagacctaagcatccatacatttaagtgcctggatgggggactcagtcccctgagggttctaagggataactgtatataattgcattttcagagcctgctatcattaccataaaactacaaaaaaaaaagccttagaaaacaaaggatatatttgcttaatgtattgacgactttttaaaaaaaagatctgctttctgtgccaatgttgctcctgtgaccatggcgaacgtttctaaggcccgctggacactgtggcaagcagggaccctgcggagtgacacagtatcataagggcaaggattctgagtgccatggaaaactgtgtaaggacaggaaacagagtggctacagaggtcatactaagcctgcttctgcaaaacggttgaaatgacaaagacggctgtgctgagacttgagtgtgctaagcccagtgtggagctaagagaaggccagctagtgagaaatgtaaactttttaactaggagtcgataagaagagagaaagggccatgtgactcaggtctaagctggctttgttatgaagacaataaaatcaggagctttactctctcacactgacacaaaagaattaaaacaaatactttacactgacactcaataagctacctgcttgggaaacattaagtgattgacaggtgtagagccatatggtgagacttcagttcccagtgagacacccagaaaggcagacgaggtcactcccttgacgtagaagttaagatactagctttgctgcccgcagatttaaagctatctaacgtgaactatacaagagctcacacccaaacctggtcagaccattgagaagacaaagagaaagtcatggatgcagtcaggggaaaatggctcacctccatataagggacaatataatcagtgttgactcccatgttcagtaaataaaataatatgtacctgctgaaagaaaagattgtatcaagcaaaggaaaaagtcttttaacactgacataactataaagatattattagacagagaatgagtgagcttatagcaggcagaattgctttataagacataacaaggcatagggagggaatagctcagaacatgtagttagcaaaaagggcttcagtgtaaaccttactgaggaaacaagcaaccgttgaaagccatattaatgaaaagtccttatgctgacagaagtaactcagtgataaaaatttaaggaaagaattcatgggtagaggagaaatggtaaaaaaaaatgtgacataaatattctttaaatatattttcatttctcttctataacatgcttaaaaacaattttatagaccaataaatgtttcattgagatttatacagatttatcacattacaataatagtataagatcagggagaaatggtcatggtggagaaaagcatataaaagattttatatctcagattagtaatctgaagttattgggctataaaatgtgtttcatcatcccttgagtgaccaggaaaaaagtcactcaaaaaactaaaaacacattaatcagaaggtggcaggaatctctgatttcagggcacaagaagctgaagcataccattatgaatctgagaccagcctgagctgtatagggagaccctatttaaagaaaaactcaagagtgctgtagagagatagttcagcagttaagagcctggtgtggcgatgcagggctttaatcccagcactcaataggctaggcaggcggatctctgtgaatgtgaggccagcctgtgagcttgaggccagccaaggttacataatgagagcctgtataaaaagaacatgcatactactcacactggggatttgagttcagctcccagcacccatgtcagatggctcataatgacctgtagcttcagctcctggattgtatctaacacctctggcctcttcacgcatacatatccacacaaaggcatgcacacacaaacacacacacacacacacacaactttgaaaataactctctaaagaaatcaaggaagtaaaataaaacattaggacacagtaaggaaggaacacctgactgaggacaggagagaaagaaaagatgtttgatgtcaacccaattgtgtcattcattaaactaaatatgcatagtcttaatattccaataaaaggcagagatttctcaggtaagatgacaaagcagggttgaagtatacactgcctacaatacacatatcttagcatcaaagacacaggtcgaaatgagaagaaagagagggatattctataccagttatacccattagaaaactggagtttctatactaatttcatacaatatagacttcatataatacaagaaacaaatgatgccattgtataatgataaaggtgtcaatatattaatatagcaataaaataataattcaacactaattaatttcagtaattagtagaatatctaaacagaattggcagaggtatagagaagttgaagaacatcctcaaccaactcaccctaacttgcatatacatagcacaccatctaacggaggcataagtcaggccactaaataatagtaattttatcaaaactaattgatactatttaacgcatgttctccaatcatgcaatatattagagatgggtgaccaaagaacatggtgaaaagcagcatgaagtatttgaaaactaaataacatgcttctaaatgcctactagagccccaaagaaatcacaatggatcttaagcatttgaactagaagaaaataaagtgtaaacgtgccagaactatagagtgtggcactgagcagggaccatgtagtctctggaagcctaaagtccgaagtatgccatgggaaagaaaagatgagatgttagaacagtgcagtgaaacagaagatgaaaatggcaaggggactcagcagaagtcttggttttcaacagttagtcaaactgatcaattcttagccagatcgactaagaaaaagagaagaaagacatcggcaaagccatggatggagagaagaaaacactgtggttcgtaaggggccttcagaagattgtagtgggtgatctaagcctctgtgctaataaatgagactgtgtgtatatagtcagccatctcctaatgtgatacagagatctaaactgacttcaagagctgggcttttgtaatgatgtcagcacttagagatgcaaggaggaatatcaagaattcaaggctagcttcagctacatagcaagtttgagtctagcctggtctgcccgaggccctgtctcaaataaacaaaataaaacaacaacaacaacaacaaaactcacttcaaaaaaaaatctggttgtatgtataagaaaaacttaggtttttagttttagtttaaaatatttccatagagaaaagacaattaatttgccttgggaattctgtcatatacttacagaagaaataatatcaacccttcttctccatactctttctgaagacagaggtcagaaggctataaggcccatattatttctatcccaaagccatgactaggaaactacaggtcagtttccctcacgcatgcaatgtaaactccatagccatagtagcatgaagaacccagtcacttattaatagagtgtactccatgacagggctgctcaagcaagacccaaacaactccaacaacagcagacactgcaagggagatggggaaaacctccctggatgaagagcttcaagcagttaatggctgctgagggagggagacttggtctttcccagggatgagtcattgattggttagctagtaagagtggccagcactattgtacttctatgtttattaacttagatgtatatagagcagtggttagaggagagagagctatgagtttgggagaaaggttagacatgagaagggtagaagggaggtgagaagaaatgctgtcattttattttaattaaattgtaaatatcaataaaagattgtactccatgaccaatgggataattttcagaaatacaaggtgttgacataacatctgaaatcagttaatataaggtacaataacagtaataaaggaagagactaaaacttgaaatatgactatttcagaaggtacagaagaagcctttgattcttgtgtttctgtgtaacaggactgcacacaggtcctccgggtgtgctagcagtaccctgtctctgagcgatatcccgatccttagagaaagcccttgagagactatgacacccactgataagataaatctctgcagactagaagtagaaaggaattttctcaataaacagcatctacaaaagtctgtagctaacatcatacttaatgattggaaagctctgtttccccaaggctgggcacaagacaagttctgtgctcaccatagtatccagcaacgtacaaaggctgctgaccgttcactcgggcaagagaaagaaataagcatcaagttggagaaacagaataaacctgctttagtcactgttctgttactgtgaggagacactgaccaaggcggcacttacgtaatcgtaacatcttaagttcgttaacatgtttaacgtgtagagtctggtttctgaaacacaactaatcgtgcactcattccttttaaaacagaatatgcttccctgggctccctgtatgattacattaacagcaacaggagtgaagagatggacatggaacacatcatgacctgggccactgacgtagccaaaggtaacgctgcttgctgtgagccctcagaggtgggcagtgtcttcccactctgacctgagagactctctcggaagtcttctattctgtgtctgcagacattctttttgcagatcaaatttagtaaaaatatttcaactcactgtacaaatattttaggttattgccttcccattactaagttccctttgtctttctctgttttcttaatcaacccccaaaatcaagttttacaaagtcagaaagtttcaggccagagatttttttttttttttttttttttttttggtgatactgtaattaacaaactcactcaccatattaaatggaaaacttgtggttctgttgtcctgaaagtctctccgtaggtgtctaaaatgtgacttatggtaggattgggcctgttttgaatgcataataatgtactaaaatagcaaccacaggcctgcatgcaaggtagctcagactttattttatatgtagtagaacttgaatatccccccttgaaacttattattctaagtatataaaatcccaagccaggttcctgattcttcctcctacccagaaattcctgcaaaggtgaagccattcagatcctattaatttttctcctcttttgcactttcctaccggggaactttgaggttttagtcagagctatttgaattgccttacaagcgcctttctctaagaactggctgtggttgtcacagttgtggtctgggatcttctgggcagaagtggttggcactttagctgggtggttaacacctttgcattggaacactctcttcctacaaaggtctcttacaaagcaaatatatagtcacttaccattcaataagggaagccgcttatattttgctttcatggcaaaggtaaagattagctagcacccaccaaattcctcaaacaggaaaagtaaaagaaagcaaactaagttttaaaccaatgctgccagtcgctacctgtaagatggttggatgggatagttaattcttgagctgtgatgatgaacttagctatgaattcattcatcggacatcataaacttgtcttaacattccatgttcttaagatgctttcatgtaatatcactgtcacgtctctgcaggaccataggacacagggagcacctgtgagtgcccatagcacacagggagcacctgtgagtgtccatagcccacatggagcacctgtgagtaggcaaagagacatgctgacactggcagttgcctgagcattgtggaaacgcacctacacagatggaaacagccctcacagctctttactgacgtacgtcttgggtgctcagctaattacactcctgttattacttaatggtacttagggtggatagatagcaaacaaatcaagtgacagcttccagctgtgctctcgattccttagtgttcctgttctagctgcagcacccactctgtcgactgtcacatggtcctatctgagagccaaacctcttggctccagagtaacgctgtcactctcccaagagagctgcctctctgctaaagaagagtggggaggagaaggaacagatttgagtagcagattggaagcagagttgccggagaaggaaggttggaagagcaaaagtccacaaagctaatgagatccctcttgcctgattagagaactaattccctacgacaaattcttatgtgttcgccctcagaaaatgggcccttttgctcatattcctaagtgatatgtaatatgtgggaattatctcagatggtctgcaaaaggaaaaaggaatcaagactttacgactgatttcaaccctttcccctccagtgacatataaacattaaataggaaaacttgactcttgtttctccttcaaatccagcctgtacgcttctggtttgaccgtgattgaagtcactgaagcaataatatgttgagacattagagaatgaataattcattctgagatttgactcatgcgtttggaaataggtattgctcaacgtctttgctgttgagagctgccctcaaagctgcaaggatcctcttcctgatgaggagggggaggagggaagcaagaacttctgcaattgtatacagcagacaattaaagcaggccagcttgagtcccacctcagtccaaagctctcccaaacctccacagtgggactggtcagatattaataattcacaaatacttgaagcaggagagagcatttttcaattcttctcggtggtttgaaataaaaacaaagcagaagactccataaaaaacagattgaatggaattttgtgattacagcacgtagatgcacatcaagttttcagagctgggtacaactcaccgcgcaccattaatttatagtacttttgcttctgataatttgactcagagtcaggcagtgtctacattgtaaggttttatcgtcgaatattcccttttgaaatctttgtcagcaagtacaaaaaccatctagtcttgcttcaagtcatagtcaaatagaccatacctgaaaattatttggaaatttgagtttaaagcaaggaagacataactatgaaattcagtcacgtagactactaagtaccatgtaagcagcagccattgagctgcacagcttgaatatggagaacttgctattaaatgagaccctttatcccagttacatcacttaaggtcatttaagttgctactacttctgttaacttgactctcttcagtgatatcattaagtaacaagagttaaaacctttttgttattttctttgttcttttgattcctcaatatataataaccagagtagttgagggagagttgctattaataaattctcctcataaaattgtagtgttctatgtacttaaagagaaaccaaggacacttactaaattactttggtgggcatctcataaaaaacaatggggatcctgttggctttggtgtgaggaaggactgttccctccactgtttgagaaagaggacatgagatgaaaggaagtactgcgtagaaatatgtttttcctatattctgtctttgcctggaacagaaaagactgaacacttttaaggagtaaccatgaaatatatcttaaagtatagtttctcattcaaatcaatagaattatctacatctgatgcacccagtagatagagtacattaactcatatcatacatttatcagagtaaatttggcattttattcttctgagaagaaaaaatgttttgtaagtattgcacatctattagaggatcgcaatgcctttgctcatcagtggaccagctgcacaccacacagttctgtcctctcccaggcccggcggaaaagtgacagtgctgcagctagctcagtggccacagatatccaagttgagcaccacagagcctaagcctgggcggacagcacatgcacttggtagtggatgctcaggggccattatggtcaatctgtgctctgtgcatgagtttgagaaaatcacggtgtccttgttagctactgtaagaagtgaggtcctgtatcagcttagctaaagatattgttactaatgtagacatatgcgatttttcttttatcacgcatggaagagcagaacatacagatttgttttcctggtatggatttctgagtggtcttactgatgccgtaccactaaccactaacgctctctccctccttacaaaagggatgcattacttacacatggaagctcctgtcaaggtgatccacagagacctcaagtcaagaaacggtgagttagcacacctttcagtctcactgtctcaccgcagtccgcacggacctgcggataaagccagcacagcgctttcctctgtttgtgtgactcatcgctaggttcacgcaccaccatgaaaacattttcactgtctataaatatcaaaatctgtctgtcatttgagggagctgcatagtgttctactgtgtgagtctaacccaggatggagacaactggattggttaattttttttttttttctaaaataagaaatgtttagttaaatgccttctggccaagtctctcaacacatctctaattatttccttagagatcttttctaaaattggcatagccaggtcaaagtgtatggtcatgtatttttaagtctcctatttttagatgctgctttctgccagcaattttgaattttatttccgaattacatggtatacatcttttggtcatgcatacctatagtacctggaatagtgcccaaaaatgaccagcatgcttgggcattcagaacataagggcattcggctttcttttttcctttctcctcttttgtacattcctaaactttataagcctatatttatcatttggaaaatgagcgttttaaaatagcatgccgggttcgacactaccttcttccattatgtcacgtcagagttgtcagaaaggcactaggattagttagctttggtggacctagctaagtaaacaccggagtttgccgctcaaggcaggaaacagtccttgctatcagttatttctacatttttagcggctctcggcagggagaaggaaagcgtttatttttagaactcttaagaccacagaagctagaacttgaatttgccaacagtgtgatccttggaatgggtggtgactgcgggtgggcaggaggagcctgggcaggccccaggtgctctgctcacacccaggacctgcaggccttggtctgacaggtggagagcaggaaagacaggaagttgtaggcagctgctctcctgagagtccaccctggcctctccttaacccagtcagctggctcagcaaactgtcccaccctctcctactctttttggctcttctgagacagaatcttgtgatatagagcaggctaacaggaagtcattagaaaataatctaatcccctccgggatgaagtgacagagttatgtgactacaatttcagtttgtgctattagttttgatataaacaagttatctgatgttttaaaacctatgtagttagcatgaaaatgatatttaacaatggagaatttctcattttaaaaaaactacaacttatgtagttaaaaggaaagaatatacattaatatcaaaagaataccagcctaactttggcaatttgtttttactgggaagtggagtgagattttgtcttctgtaatatttttgaaaactttagttctgggctggcaagatggctcagtgggtaaaggcacttgccactaagcctgacaacttgagcttaatccccaaaaaccacatgacagaaagagagaaccaactcccacaagttgttcatgatctccatgtgtataccatggcctgtatgcctcaacactgtgtacacacacaaaatgaataaataaaatgtaataacaataaacccgtattgtgtgtgtgtctgtgtgtgtgtgtgtgtgtgtgtgtgtgtgtgtgtgtggtgtgtttgtgggcatacatgtgctatgatatgctcttggaagtcagagagccacactgtggggttggttgtctcttcccacctttatatgggtctctggatctgtctcccgtcaccaggctctcatgacaagtgcttctaaacccaccgaaccatctctccagcccccatattaagttttttattgtttttttttttaataagcacttgctaatattatgtcaggaaaaaggaacagggagataatctaagaccaactgaatacaacagtagtatttatttgcatttttgtttgccacaagcatgtagctcatttcttgccagcccacatttactttgagactatttatatgtattagatcacacaggatattttctccagttaccgaacccactagtaacatctgctgtactgatcatccaccatgctcaaggcacagagtggcttactacacaagtcccggacaccctccctaggcttctgtccttggccttccctctgaccatcccactccatgtctctctcagaccacagccacccacatgcacagcccgctccttgcctcttgttctgtgctgttatgcaggccgtcagccccctgaagtctccctcctgcccatcttccatgtcacattctttgtggccttccatcccccacaagacctcttcttggattggcttctgtcttctagaatgcctgcacctttaccctgcacctgaatgtttcgtggatgaaactcctcgccctcccaggctcccctcttcctgtcatcaagtcttagtataagcatccatccccgccagagacctcatccaacctccccaggcttaggtggtcctcttggttggttctttattaactctttctctcatcatacaacttacccccacttcattgtggatgtttaatggtctctctgatgcactgaagacttcgggagaggagaggagaggagaagagaggagaggagagaagaggagaggagaggccgcagtgacctttgaccccagtgggtactcaacactgttgtcaagcacatggatgcataagtgttgttttcacctttcagaaaatgaatcttcaactgtgaagaacacacacacatacacacacactcatacagagacagacagacagacagacagacttagagaaagacacacacacacagagacagagacaaagacaggattttatatcataaaacataaaatgaagatatctagagaattggtgagttccttcctattaggcagatagcattttttttaaaagcttaactccatgaggtactgtacctgttttatacaaatgcgcgcatttggaacagggtcttcttatgtatccctggcaggtttagttcctgctgtgcagcctaggctcacctcaaactcgtggtagtcctcctgcctcagcctgggattctgggtacacaccaccacgcccagcttatatcgtgaagttagaaatgtagtggtttcaacgttagaaacatgacgccatacttttctttggtgctaaggtgattcaaacagaaatgattatcatactttctctccattttcttccagttgttatcgctgctgacggagtgctgaaggtaggactgtttcttatcatttgaagagagttgtccatttctgatgatggctttgtgactaacagtctcccgtcagcactgggtagaaagttgacattggttcctctgtcctcagatctgtgacttcggtgcctcgcggttccataaccacacaacacacatgtccttggttggaactttcccatggatggctccagaagttatccagagtctccctgtgtctgaaacctgtgacacgtattcctatggtgtggtgagtacgtttctcatttcctgcttaccaaaggacataggaagggacaacagcttagagaagaaaatggccacagtttagcttccttgtgcctgagacagttgggtcatccacagtggaagcattagggaggggctttccagctgtcacaatgtatgctttgatcacttatgaccccgagctaatctgtcctacaacaagaagaaccatcactgcttccgagaaacaaataatgcagagcctgaccagcgcgaggcctgccgggcacgctgtcgagctgggtggaagcaccactgtagagccgctgtgcagttcactgatattgcgaaaatctcttggaatatgcttgcttataatagatgcccacatggcgtgtgacagacaggagctgccaagcgagctaaacttgtacatttccgaaactacaaaagaacatgttgttagaccagatagccttgcccaggtctgctgtaaatgcttcgaaaacaagtggtgaagttaaggggttaaagcaggtggatgccagcaggcagaagcaagcctagagtcgagggaggagccagctaaggatcatttgggaggaagtagcctctggtagggcatttcctgctgctggaaggaatcctttgtggctccttgtttgaagatggttctccccctgaagtgttgaatatccctttaaagaccagagcatcatgggcaattctgagtctctgggtctcattgccctctgtgctgtgtacaccacctctgctttacacattacctcgcaaaaggacactactgctgtaagaaacagctcacccccccccttttcctgaggtagggggaggtggctggaaaggaccacacgtcaagtgcacccctctccctcttcagtccacacccgggctggcgtccttatatgtggggcttttccactgggccagtgctccctaaaccgtggcacctcttatggacgagtgaatcctgatggcgattggaaacaatttcaaaaatggattgtatatttttagctaaagtctagggtcttaaaggggctagatggtaacagtagcaacagcattaaatatctaattcctcttaattctgaatgtttgtaagaatggaaacttcattaatatggagaacaaggaaacacttctcacagataggaaggggaaaaacaaaacaatagccccacaggagactagcttcccaggctgtgttgcatgtccttacagtgtagtcgccatacactcatctgaacattctgcaaacaggggttttttttacagtctaaggccttttatgttcaggtttagctgcacagcaaccacctgcctggcatacacaaggccccaggttcaatgctccgtgctacagaaggaaaaattaggctttctgtgaaactgtcttctcttgacaatttatgattttttgctttagggaaaatgtttacctactgagttagtctctgggctggatacagacgtggactgatttaaattttatgtggcatgtttgacagtgccagaacctcattttattctgtggaacagaagccaatgtgccatactctgccgagactcctgtggaacaagggggtttggaaggcagtaacgtggctgaacacatgggtcttttggctggttctccctgcatgtacaggtgtatacagaggagagacacacacccagacacccacgttctcacttacttagcttgatgggtcctctggctcgtttcctcctccagaagcccatgtatataacttgtactttgacaattctccccaagtcttggaatttcccttttagagatttttgacctaaagtcacaacttatgagttgtgtagagaatgaacttttagtttcaatattattggatttatgaaaataaactccataccactttctttcagcctaggactttgtgtgaaatgtacccatctgcctttgcttagactgtgacctcttggtacctgtcaccaagaatgaatgacttttcccctggaagccatagctgctgatcacactcctaacattaaggatcactcctgtgtctttaaatctgtctgtcagttctcactgagcacttctgtaagtgctgcctggatctttcttcctggagctgtaggttttccatttgtttataaaaagcctttcactccagggacggcacagcacttttgagagagggatctctatgtgtgtgcatgtgaggccttcagtcacgtgtgtcccactcccacttttgctcaaccttgtgtgactttcttcgggggaggatgattttattttgttttgcttttaagtcaagggctcactatgtagccctgactggcctggacttttctatgtaggtcagggctgtctggaactcacacagagatctgcctctcacctagcctctggtactaaaagcatgggccatcctgctgcctgggaaagtgatataacagacactgaacaagccatttcccaacataaatccacactgccaggactaccctacaccacacaccaggtgtggctcagaacccaactatccagtcccccaactatagcagtctcaattcagaattcatgcaagagccttcctgcccttgagtggcagaaatagaaatgtttcattgtctccttaaaatcagtttagggggttgaagagatggctgctcctccagaggacctcagttcagttcccagcacccacataggggctcataactgtctgtaactccagtccctgggatccggcttcctcttctggcctctgcatacactatacttgtgtcagacacagacatacattcaagcaaacttaaaataaaaagtctcaaagcaacaacaaagcaggcccagcatctgggcctgacaaatggctcgctgtgggtaaaagtgtttactggcaaacctcatgagctgagtttagtccctagaaggacccacatggacggagagaacagattctctcaagttgttgtgtgactaccacatgcatgtcctgcatgaaataaataattataaaaatcatctggcattattagtttctctttgagtgaagtttgagaatgctgggttgcctcagcagaacctcagagaagtatatccctgctgatttcacgataagaacttacttgggatgacattcaacagtgtccttttcactccatcccttctaaataagcaccgtcagtgtaagggagagtacaagccctgctctccagaacccgttgttttaaacaaccatttatacaaacaaaacccccaaagcatttatgagttcccagtcggttgggcatcagagagtgcatagttgttccaattgaggccatgttaggcgtacacatttgtgaacctcaaacttcaaaagtggtggctacctaagaaaacaatacagttatgcagaatccaaagggagagcattgctctaacgtaaaacgcgccataggtcatagctgagagaacatggccatcaaaaagttgatttctgaaactcaccaccccccctaaaaaaaaaaaaaatgcggcctggttttgtttttagtctttctccgcttaataaacttgagttttatctgaacatgtggcaaaactaactagtctcctgctgcctccaaagacacttcttgttgttagcagagcaacagagctaggcagccggttgttctttctccaaggagaacttttacaagaaagatgtttgtacacccttagtacatgatcactgcacaggcagccttgtgagagagagcacagggcttgtcaccctccacagacaaagctttcccagtggcagcgcggaagggttactgtcctaggagcttccagccaaagccagcttcaaccgaggagctgaagaggcagcctctgcaacttgtctagagcgctgttccagaaccagcctggctcaggtaatggcttcctattgtttgtgagagaaaaggcagaaatacacagccacatccaagtttctgttctgtaaactgaaaatagaaattttccctgtgagtgcagcttaactggaaggacatctcgatatacaatgagttggaaaatatttttaaggtgaaagatcacagcagtgtttggcctgcatccttggaactggaatttcaaggcataagcttaatgtatttttagacctccaagtgacttcctcaacaaacttacttcttgtgtcttgtgtcaatgtcatttttattgaatgtgtgtgtatatatgtgtgtgtgtgtgtgtgtgtgtgtgtatctccaccctaacttgttctgctttcgattgggtacatccccaaatctgggggcttaaaggggaattatgggaggtactgacagtgggacgaaccctatttggaccttgttttggttccacaacctgaggctctggcattgctcttctgtccccatggttttgaatcccttggctactgtagctatgcagaggcccagatggagtgacacagtccagttgtgtcagggtcacacctcctcattgattagacttttgatatttttccagccaaacattttggtctacaaaagtgaagaatgaattcctttccgatctctcggagtctcgggggctgcgggggctgcattttactctgtagagtccaggcaggttttacctgtgcacacatttgtgtgcctgttgcgcttgcccccagacttcggaaaggggaggcctgaattgttcacctgagtgtttgtgaggccaaagcatttgacttttttgaagctgccttcttatttccatttccccacacttcatcctctgtccccagcactaagagagagtggtgatcacaggaaatcgagggacctcatttcctgcccagcctagggctgcctctcccctgcacaggcagggtggccaggtgactgtattcctatgctgactcttcccctccctccggagcttacactgcactagccagcatcatccccttctggggtgcccctagctagcatcatccccttctggggtgccccttacctttcctaatcactcatgtgactcaaatagaattattcagtagctcttctgaggaagtaccttacacacttgattaaaagcccaaagaggcttcagggatttttttttttcctctcctgcttgaggagcatctgccaatttccctgattttcttgctaattatctttgtatttgccagcgttcatttaacacgctatggcttgaacaagacagcgggctggctgaggatataatgacgatatatccagtttaaggcttacaggatttccttgaatagagctgtgccttccatctagacttgtctttaggaataggcttttgggtttgcagtgagagagagaccaaacctaccttgccgagtcgtcgccctgagtcaacctgggctctgcacctacagctcagcctgttgtgttccctccagcaatggagcttccccatccctaaaataacacgggatgagagcacagcctccaagtacgaaagcagtttgcatccctgctggcctgcttggtagctggatgtatgtagacaagttcatctgacttgcctaaactcttatcctcacctaaaaactgaggatgatatcggaggacttgataatgatcagggcaacacgtgcaatggggatttggaacacattaggccctcaataaattatagtgcttgtcaaattctgattattaacaaacctggaattgcttttgtgctttgcaaagtactggtagactacactttgtggtatcaggctggcatgctaacacaattctagcacgtgggaggctgaggcaagagtatcatgagttcaaggctagcctgagctacatacccagtcttttgtccaaaaccaattctttggatgcctatttgaataaaaaggggaagcaattgggtgttcaaatttccactgctaggtgtttagagaataactaaacccaccatcctagaacgagttccctttctgtggcatttccgttgatgttcattgctgcacttagcatgacttttacacaaaggtgaatgcatagattcattcatgcacagtcagcttatatgtttgttaaatgtgcactatacttcagaatatgacataatatatgtatttaggaatggatctcttagaataactcattctgaaatttgtccaaactataatatgctagaatttcacaggtatctatcagtatagggcagatgagtttgctagtgatttgaactgaggactttgttttgttttgttttgtttttattgaaccttgtaaaaactgtgttgagttcctggttactatctaaaaattatatctgagattcaaggcagaaagtctgttttctaacaaaatacaaaacctagtctgtgggaatgtgtgaaaaaactggagagtggtaagtaagatcatgtttaatcgctaatataaaattataaatgtagacactccaatttctaaaacaagttttttccttatatacaaagaactaaaagtatataatatgtggtagaagtcctgtgtatgaatatatacatatattgtggaagagtctacagatggttggctacgtctagtaattggatacaattaagtgctggctacattttcagtaatataccaatataaagtaccagaataaaaatcccattttctttttgttgtaggttctctgggagatgctaacaagggaggtcccctttaaaggtttggaaggattacaagtagcttggcttgtagtggaaaaaaacgaggtaagactccgtttctccattcaggtgcatagatcagaaaacagtattggggttttgcaaaagactttttcatcttcttcaaattgaaagtaagttcacgcttatggaaagattagcagtaggagctagcacaaagggtcagagtgatgttattcctcatgaatggaccctttacatctaattgttgcagcttcacgtcgtgatgccgtagatcaaaaattgtacaagtactgtactagtttctcagtctcaattgtaaaacctgggggtttgttcttagtgatgaaagaagccattgcgtccaaggtaggggaacagtttaactgcatctcctgcgtttaggacatcttttttactggccgggagttgatctatctgtaagagaccttcagctacttcaacttacctctcccagcaggagccactatagtacaagaaactgtcgcttagatgagaatttcaaaaataaaagaagaaaaaatagtttcaaaaaggggaaaaaattacagttttgccacctacgttgagcactacattgaagatgagcttctcagtggaatcggcgaggcggtggcgggagcgctggcttcttcatgcagagtcgttccatttcaaaggaacttcagtggcgtaaacaccgtgtgtgctgtgtccccggcctcgcttttcttcttcccacaaattgaggctttcagctagttggacctatgagcctacatcagagaacatggcacatccatatcaaagagagcaactacattttgaaaggtttcaaattgtcactgaaacgcacagccatggaaatctctcagcataaggacgaggtatccagcatcacagcattaggagaactgagatggcgcggtggccgggcacactcgcctttgcgaggcaaaaccacttatttcccagaacttcctcattttcatttccgtgcacaaaggccgagtgtaaccttaaagtaagatactctccacatggagactatataaagatagtgtcccttttagcgctttaacagagctggattgacctgccccacccccacgtgagtatagagcaagccaggttaatcagaaagctgctgttgaccagaagaaaccaagattctgtctcctggatcccattaacccagaactaccggactaatttgccctatcgactctttgaggatgggaggcacatagtagtggcttaatttgatgggaaagggctgcccagcataagagatgaaaaggacttctgggcaagaccaggcctcactcattgctccacaagagctgttatgttttaattagacgaaggtaattttccatgcactgctcagtaagaccttacatgggataactgatcattttggacataaggacccaattatttctgctctgtatcttttgctagtgagatggttgcatgtgtttagttcaggttttacaagtctaagtaaagacaacactgaccttcagctgacctagaagcaaggcgttccgtacagtctctacaccacacaggatggaccaggaaagggctctagagagcctcccagatcctccagaattgacagaataattcatattttgcaataatatgttctctggagaaagagtaggttgcaatccagtgcatctttaaagcattgggtatttaaagccgaagagttgatgggcttccatcctgcctgagggttaggaagttcccaccaaaacccgtcagaacttaacaccacacacaaggaagccatctcctggccctagagccaatgggacatattgcggtgagctgtggcgagcagctcagggacttccggggctgttcattaagaagtaagtgagagaacccacatggtgagggagttcagcttgccagtgaattagagtacaactgcttgatttaaggataaattatcttctcttcgcattctgcacagtacttacttgtgtgggggggaaagtgttgaaatcaagccctgatgggatttgcagtgtcaccgttcaagaaggtgtcttcattttgccattaggggcactggttcccaaacacgttctgctcatgtcattcccggaggttgagttctcttcaagaagcctaactcataaaacctcatcaacttccaatatctcatttgtctttactgttgactaccttcagttactgggttagagaaaggtttccatatttccagaattcttcatttaactaagagtgacgtgtttaaactgccaaggggagattgttaatgagacctatctcgtcattctgtaacatctatatccaattagtagagtaaattttttaaaaaagcagaattttattttgaaatgattatggactcctgggagtctgtaaacatatttacccaacttcccactgctaatgccttatgtagctgcaatggcatccaagctggtcagttaggattgggactgcactcttcaactagatgggagtccttccgtagtctctagctcctcatagagcattgcatctgaacctatagagaggccatgctcgctaacattatatccaaggacctttgcttcttatggagtacagcttttgactaatcatttctgacactagcttctattaaaaatggattcataagccctgttacaccttcccaagggagcagtgaacctgcacagaagacagtaatttaagagggcattactaagaactttttaaatacaagagatacacgtatttgctttttttttttccatgaaaaaacagtgcaccttcagaatgttctagagaatattttctacagaatgtcctagagtataatttctttcataaacacttgggttcttatataaatatatttcattgtaaatagcaaattaattaatatgaaaaatcttgatcatattgggaccagtgagatggctcagcaggtaatggcacttgccaccaagcctaacaacctgagtttaattcctaggacccacatggagggaggagagaacttactttcttaaattgtcttctcatttccacaatgcacaggtgtgcatttacacgtgtacacacacacacacacaataaaacgtagcgcaaaagttttaaacttaaatttgatctactactatttaactttagaaaaataaaaccaacaattattttcatcttacatataaaatggtgcaaaaatatttttttaaataccctacctaatttagttattgggagatactctacttttaaatgtaaactctttgctctaaaatatttaagctgtaagtagtattaccacatagtaccaagatgtggccatttccgtgtgtttgaatacattaggaatgcattaaagttctgtaatcaggacataaatacttcagatcctattttaaaggactttttaatgtagtaatgaaatcccttatgtaaaagtatctaagtctgtgattaactaatacttgacgacattagacatttaagattacttttctctttgtgtaatgtttgaaatgttgtatctaaaaagatttcccagtgagaaaagagtatgacaggactttcaccctgttgacatcgcttccttggacgaggctgtgctgcagtacattcctctgaaaccagttgtctgttcatttgtgtggaatatacacgtagctgcacacaagcaactgcagtgcatctttacttagtctcactcccaaccgttttctgtctcctaagcaaacaactgacttcctttaaatctccatcaaaaacgtgcagttcacgatatactaaaataacagtgaaaacatcgttctcctctgtgatgtcaagagactaggagttcccaaggcttagcatagctttaatttggagagcttgcttatttattaactttattatgatatcaagattatctgtaattctaatgtaatgcaatgtatagactatcagttttcttgcccagacacctattttttttaggtctctgcatggcctcacccaaatccagccaaactcagttttaaattttctatttgtaaaatgtccttggcagacagttctagggacttacaccttagtgcttagcttcacagttcttcactccacaacacccacccacccatccacgaacacccttggcacgggagattcagcccagtgcttcgtgagtgcctgtcactctgccacggatgtgtctccaactccattgctctctctataacaactgctttgacagcccgggctctgctgaaaagaaaaccagaaaacttcagctcacccacacacaacatgcttcaagtcagtgtagccgtgcaatgtgaagaataaatgaaaatacaatggaaatgcaggctaggcatcaccttactagacaagatgatgaggctatttaaggtgcttagcctggtgggtaaatgacattgagaagttgcaaacacagccggattgaggtcagctgtgttaatgactcggttccaagaccagccctgttgctagtgaccatacttaaaagtcatagttagctcgtgaataatataaaaaccagtctcctttgatttcttgtgtgcgggtgttgtgatctggtgtatttggaaactgttaagtttttttttttctgtgtatttgtaatttagttagatgctaagtccaaaaagttataaacttcattttgtttacttgacttacataaatacacatggaacatttgagacttggtgacttgattctaggaagctttgtgggtatttatctctaaccgtactgaagaccaagctcagcggctcacacgtgccaggacattctgttgttgttggccggaccgttaagccttttaaaacaaacattcctccctgagataggggtgtgccgtgttctatgagacccagacctgtagggctgatcctcagaagccaatttgttttgtatcaagtctggttcagtacacgggtgtgaccagaggtaaagccaaatgactcgtgcgcgctgaacggcacattcagaattaccagtgagaaaatgcagagtgatcttctgtgccaaagatggtttcagagcctcacacctattgccaaaactcaatttgtttcctagttacctggctggtgtgcacagatcttaagttgcaataaaaacgcagtaataaatttgtggttttaaacacagcgttaggccccagcttgcccctctcccgctggagctgttccgctgcatttgtcacgaccaacctgacatttccatctaccaggatttccacttgggaaaagctggagccctgggagatctgcagggcagatcggaacatgaattctcccgtcccatgtcagtattaacctgtggaagctataaattctgtgtgttgtttgagcttctaaattagctgtttgacgatccatcaaaggtcattttcttgtctctgggagtaaacccctgtttctttttctcctgttttcctcctttgttgcagagattaaccattccaagcagctgccccagaagctttgctgaactgctacaccagtgttgggaggctgatgccaaggtatgctcattagggttcagatttcggaaccctcacctgttcatctttgagttcctttttttttttttttttttaacagcatttgtcagcactctggcttcaaaaaacaatattgttcttttgcttttaatcatgaccatgtgacttgttaaaaaaaacaaaaaacaggaaccaaaaaacagctaacacagtacatactataggtgaggctgtgttttaagcactttttcttaactcttgaatatagaagctgatccatctcaaccttggctcacagatggagccaaggaagcacaggttaagtgacaaggttaaggtcaagcccacatggccagtactggtggggctggatgtgaacccagagagtcggccatggagctctgcccttagcctcttctccattgcctttctctctaacagaggagcagagagaagttttaccttggtagaatcacagtgtgtgacatccctggacaagtccagggatgtttctgagctgtcacagtaaaattgaagaaattccaatcctaggttttcatgcatttatcacatgtaagcatggatagctcatctcctttccccacaaagttcagctttaagaaaatattcttgcgtgaacggtagtggcacacactttggtccgagcacttaggagacaagaggcaggtggatctctgtgagtttgaggccagtctgggctgcagagagagttccaggacagccaaggttgttacacagagaaaccctgtctcaggggggaaaaaaaaaaacttcttggatacatattgaaatagttatgaataaaatgatagctggtcttggatttgcttcaaagtaaaatgaagggcaatgggcagctatacagattaaacaagatcagcagggataaattttgaagctcagtcatggagtatagaggcacgttatattgttttgtgtatgcttagattttcatagtaaaggttataattttaaagtgagtctcatagattaaacattaaaacaattgagcaatcaaaactcaagaaagaaacaaaagtcataattcaaatttgtataattttttcatggaaattgaggtcttactacctattcaaatatagaggcctttaaaaaataacaaagaaatgtaacattatagaattctcccataatttatactcatttccagtgagagccctaggagtgaatggtgatgatatgtcttttcttgggcaatgcacttctttactgggaatggcttagagacaacgtgagagtgtggacggaattcatgttcattcatatacagtatttccggcatattgtcttacacaaagggcaaaatacagcaacacagcagcaagagcctgtcttggggagcctcccaaccatgtgccttgcttcatggctaggaagagtcacttatgtggctccccggccatgtgcatcctgccttggccctgacatccagcagacttctgtcagcctctcgtcacctggggctccatataacttagtgttatttttcttaaagcatgtgacattgtgattgttactattgtcattattacactggcagtatcgcaagaggttgaatgcaccttccgacccctctgctttagggcctcctacttttagtgtgtgatttctttttccagaatgaggggttttaataattaagctttaaaagaaatgtacactttaccattagttcagttaaactatagacaggtgtttgtacgtttcttttcaaacatgactgttgaaataatatcacagtccctctacttttgtgtccattacaacatacaatgactttagcagtgttttctatctcatgcttaaaatttcccttgaaattatttgcattgaactagaataatacacccagatctctagatctgtaattatatttcagtatgatttaattccttggctgaaaacttggtgctatagcctcagaatgtgcacttaaataataatataaccacatcaaggaattgaagtccagagcgatagccatgacactggcctttaacatgtatgaatcctctctagaacaaaaaaaaaaaaaaaaaaattcttgtgttagagcccatgaagtataaagtaagtttgaaacagattttttgtttctgcattcgcgacgttttattctgatgaaagtacgccaggtcactgtgcttaatttgatcggagcatggctgcagctcacccctcactccttgtggctaatctgcgggcacaggctcccttccccgagcatctctccctaacaacattccgctaagatagatctctcctaccttcccagccactctgagcccctgcccagaccacaatcagtctggcttattatcctagcttgtatagtgatagattttcttgctaaatagattgcatgttctgtgagggaatataaatatattcacacaggtacagatgcccatggctcagagctgggaccagacctcttctgatagagaagagcagtcagtcagagtattttattccctgtttcagactttagagtattaacatttagatcacaatattcagtttccctctagagctagtgttcttttacagtgaggaaagacatatagggaaaacccgacattgtctaagtgacagtatgttctggtggcctaagtcacgtcttcaaaatattctattggagtcagaaatgtagctggttgagtgtggagtagatgaagagaataataagtctacataataagtccaaaaccagcttggggtattaaaaaccctgtctcaaaaataaaataatatataatatatatagtgtgtatatacatattcatatctgtgtgtgtgtgtgtatgaatgaaaataaaaaaaagatgagtattggtttgcattaaaatggcatctttaaagctgagaattaggtaggaattggtatcatactctttaagataaaagatttgaagtttaaaagcacaaccccaggttctgtgaccagctttgtgtttaaagcaggataacttacagctttctaagctagttgtcctgggtataaaatggaaatagcaaatagagatgtaagatataaagatggttaatagtggtggcgcacgcctttaatcccagcactcgggaggcagaggcaggcggatttctgagttcgaggccagcctggtctacaaagnnnnnnnnnnnnnnnnnnnnccagcctggtttacaaagtgagttccaggacagccagggctacacagagaaaccctgcctcgaaaacccaaaaaaaaaaaaaaaaaaaaaaaaaaaaaaagaagtcttggctgtgacttgtttttcaagataagtaatctgttcgtgacactctgaaggcaactaagcccttcaggagcatcctcagatcctacacagggacacccattctgcaaacatcatacctgaaaccattactacagaatttacattgttgttgggggtggagtgtctattttgcctgggctggttttgaactactgtgctccagtaatcctcctagctcagcccccccaaacagctaggactactgaaatgtaccaccacagccagctatgctgcattttaaatgctcattctgataatgtatgagagtagagtttaactgtaatggtaagagtttgtttgtttgttttttaagggttacttgtcacctgaatacaaaggagtttaattttatttaaaaaataattaagctgggtgtggtggcgcacgcctttaatcccagcactccggaggcagaggcaggcggatttctgagttcaaggccagcctggtctacagagtgagttccaggatagccagggctacacagagaaaccctgtctcagaaaatcaaaaaaaaaaaaataataataataataattaaatgtaggagaacataagtcttaaatagtgattggatgggctgggaatgtagctctgctggtagaatgcttgggtagtacacacaagaacctgggatccatttccctgcactgcataaactgggtgtgctatatagcgtggcacttgggaggtagcaggacaatcaggagttagggttatccacagctacacagagctgaagggctaacctgggtctatgggccaggtctttaaaaaaaaaaaaaaaaagtcattagccctgttgctgcttttccttgtaaaataaagattctgcatttcctgtatttattttatagtcatttcttgtgcaaagttacaccttttttttttttttcatttaaaacctgacacatggtgggaggcatgaagatctaaacaaagtttaaaaatataaatttgtttatatgtactctatttaaactatttaaagctttttcctttgttcaccagtagcatttaactatgctttcttacacacacacacacacacacaccatatgtgtatacacacatatgtatgccctcgaaataaataaagacagaagaagtcaataaatatcctagttttacatttctgaaatatggggaaagagcttttcttaatgatgtcagaagcgccaggtcctgagagcaagccacctcaacattgttccttcctgtttttgtgctcctaaattaaaatgcgtgttttaattgctgtagctgtaatttgttctgaaatgctgtaattatgaggcacggtgaggagagcacgtgcaccatccttttattatcggtctccatttttgttttaaccttttgtctgagccttggctggagaggaaggaggtgagcgcagacagggcctgctggagacacactgggcgagcttgttcagggactgccttcagagccacgggataaaccttgagaacaatgacgtcattctgtctttaaatgttttgttgttgttattattgttttttggggtctttttagaccaactgatttgggatgttttattagttccagtaggttggtaagcagatattgcctgcccaaacacattttataaaaaggaaacattgtgtagtgaagcgcggaatgcccagagcacataatatagttaagctttgaccagatctaccacacaggcacatctttaatgatggagctcttggtcatacctcaaagtgagacttcgtacctctctccatatatacaaacgagtacttgttaccccaacctgatgctgcatggttaaaaaagctcagcatatgtgtctatgcctggataactaactgagggtgaagactatggccccctgcacctggtggcctgctggttttacacacgaagtcagaaccctgctgtgctgcggctacactttctcctgtctcattcctcaagcctcatcgtggttccttcttctcttcttcagaaacggccatcgttcaagcaaatcatttcaatcctggagtctatgtcaaatgacacgaaccttcctgaccagtgtaactcatttttacacaacaaggcggagtggaggtgggtagctccggcatgagtcccggcccaaggctgaggagaaccagacacccgatggacagtcctgatgactaagcacagcttgggggcgcgggggatgggacagcaagcccaagagttataaccccgcattcatatgtgagagtttgcctatgcttgttgtcgtctatggtcgaagtgtctgggggagagtactgaagtcaaagccatttccagacccttctctgtacacattctgtgttgagaagctttggtctctttccagaaaaaaaatatctttttgaaatatatatatatatatatgcatagtgttagccttgccatgtgtagaacactgtatctgctagcgcatggcatggggaaacctataaaacatgttagacattataaactccagcgaaacaaatgagtaaagagagaatcggattgtgtgagtggaaaaacaacccaagatgaaacagttggaccaggtcgaatgacgcagggaatataaatagcatgtttgggagctggacactgttcctcccctgactcagcggagatttgaagtaacttcatccttgctccgatatccatggcaggaacgtgatgccctacgccatctgctggtgataaggcagtactgcatgcactggctcttgccacctgtcagtacacttgactgagggccttctagttgactgatatttttactgtgaccttatttatttattttcattcctttgaaacagctttctcgggccattaactttcatgatttttttcttagaaatataaaattaatgcagtgagctcccatctagatcggagggcttttttttttttctggtctaaaataacttaacaaaagcttggtatgacattgtttcccacagtaacatgtaatcagaccacttcccctcaagctccatatgtgtgcctcattgctcttcagacaaaggcagaaatacgtatgatttggaagacccaccatccagccttgtcttgagcatgccctaagctttcaatccctccacagaggcccaggtctccctcaccagagcctctcagtgcagtctcctttttatagacaccctgtttcagttgcacattcctcctgtccctcctcccccccagctcccattagccgcccgggcagctggtgaccttgcatttctgcaagggagcaacccacactcactggccaggtcagttccacggagctctggagatcaccgtatggatgtatctcaggactggaaaactgggaaaatcgaacaactgttttgtgtatctctgcctccatctcctccaaaagcaagtactcaataaacatatgaagaagaaaggaaggaaggaaggaaggaaggaaggagggagggagggagggagggnnnnnnnnnnnnnnnnnnnnnnnnnnnnnnnnnnnnnnnnnnnnnnnnnnnnnnnnnnnnnnnnnnnnnnnnnnnnnnnnnnnnnnnnnnnnnnnnggaaggaggaaggcaggaagctgggtggcaggcaatcagagagcatgactgtagtgatgtaaacactactcttgccctggaagataaatatgtacccagtgcatttgcctagccattgtgcttcatgtcagattctttaaacctccccggccaatgctcctgtagtgattagtaccatgtccccagacatacagcactgtcggcagcagcctcaaaaacacctgtgtcaaaatgctaaatatgagagtacaaccatccacattccgccctgacaagccacgtgacagagaaggcatggctaacagagcactagcaatgaaatctgatctgacctgaatgcataatacaaggtttccctaaggaaatgctatttgatctgttatccaaaggattagagggatttaaaaactgtgagtatcagtgtgttagaggtagggttctgaaagtgtgccaacaaagaaaacaatgcaaagtgactaaattctctgaaaaaaaaaatgaaatttcccatagcccaaaccaatattcatcctaaataagtttaccagagaactgtcactcagttataactctcttccctagagtggtagactgaagcttctctgctattttgtgtctaggactccagttcactttcagtgtgtttatgtgtagggtgggtttatattcatgtgtgtgtgcatgggggtgttgtatgcacacatgtgtatgcaagtatacacacgtgtatacagaaacagagaggccttgagtttatattcatgtgtgtgtatatgcaggtgttctatgcacatgtgtatgcaggtgaacacatgtgtgtgcagaaagagagggaggaccttctctaccacagtcttgttccttgaaccactaggtaggctagggctggccagtcccagtgaccctcatgtctcggcctggcacagacagtgctgtgactctatgcaagcactgccatgcccagctgtgtgtgtgccaggatcccagcccagctcctcatgcttgcatagcacatgtccctacccagaaaaccatctctccaacacctctacttcactcttaaaagttaatggggaccccaagaaatttttcatttaaatgagtcgtatctggcaatatttattacattaaaaatagaactaggaaaaagttaaaatgtatttactaattcatgtaaaaaaaaaaatagtaaatgcaccctgctgaaaagatggctcagcagctaagagcacttgctcctccttcggatgactgcagttagttcccagcacccacaacaggaggctcagtaaacactggctctccagctccgggccatgcattgccttcttttggcggctttgagaccccatccacatgcatgcatgagcaagtagacacacgcatcagatacacataaaaacaaannnnnnnnnnnnnnnnnnnnnnnnnnnnnnnnnnnnnnnnnnnnnnnnnnnnnnnnnnnnnnnnnnnnnnnnnnnnnnnnnnnnnnnnnnnnnnnnnnnnnnnnnnnnnnnnnnnnnnnnnnnnnnnnnnnnnnnnnnnnnnnnnnnnnnnnnnnnnnnnnngtgcgatcttgaaaaccagttgggtctcaagaatcctctgagcagctctcccgggtccctgaccatgctgcaactcctaccttccaagaagcactttagttctaaacagtaaagaagaaatagaatagtgctatcatcaagtaaaataatgatgttggtgaggatgtggggagagagagatccttccactgcttgctggcagagagtaaacttgtgccaccgctgtgcaaatcagggtggagattcctcaaagagacaaaatgtgaatgtccatacaactcagccatactccttaatgtttcattgctgtgaagagacacggtgaccacagcaactcttataaaagaaaacatttaactggggctggcttgcagtttggaggtttagtccgttctcatcatggccaggacacccaaaggacaaagttaacatatcactaagacacttgcacatccgtgtgtatcgctgtactatacacaacagccaggaaacgaaacccatctaggtgaccatcagcagaataaagaaaatgtggcacaagaaaatgtcatgcagttgtaaagaaagatggaattgtggagttttcaggaaaataaatagaactggaaattgttatgttaaatgaaatatggattgcagataccactccttctctattatatgcagaaactgtgtgtgtgtgtgtgtgtgtgtgtgtgtgtagctggctcagtgggatgtataatccacctgctggggagccagagacaggcagatccgtgatgctcactggctggccagtctagtcaaatcggtgagtttcaagttcaatgagaggccctaccttaaaaaaatagagtggagagggattgaggaaatacctgacatcaacctctgttttcacacacacacacacagacacgcacacacttgcatatacacaccaaccagtgcatactcacaagaatagcaccatacatacacaaactaaaactccatgtgtatttttacgtgcacctaggtgtgggttgcagagctgaaaggagattcatgacggggggaggggggggggaagaactttgagtgaggtgggagatagagaaggcatcagagtgtgtgggacagggagcacggggagcacaggcaagggctggtttagagcatggaggagggaggcccgcaggagtgaagaacaagtgagcacacagtccagtgcctcgtgaaaatgccaggatggagcgcattcttatgtatgctagcctgacaaattaatttaaattaaataaataaaaaatttaaattaaaaggaggtagaatagctaacaagcacatggaaaatcttcagcttcacttagcaaacaagcaaaagggagaataactcatgagatctgtcagaatttcacactacaaagctaagtggtgctaaatggcttcctcgtacattctttcttttattttttattttttttggctgccctaaaaatgtacaagggctttgccccagaagtcctgctactatggctttattacaggccaaatcagtgtgaaggcttttacagaatgtgtggggacttgttcagacaaccccttttagatgccaaggctggagacagaagtttgtgtaataaaagaactgctttcttcagaaaaggtgtctccacacctagcagggtgcatccccgcccaggagttctgagcagtggatctgagaaatgagcttaacatggaggctacaggctgctttattcaaaatggtggtattaaaaacaaaaactagtgcacagtattgtgtatgcccatgcacactgcagaatgcagcagagagccagcgggccgcaaaggaagggtgttttcccatttgttcaaacttctacattaagtctggattagctgagtgataagtataatgtttaaaatacttcaaggtgaaagctggggagagtaatacatgcctgtagacccacctactcaagaggctgaggccaaatgaagggccacaagttcaagcccagcctgggcaacatagcagaacccatctcaacagcagagacaaaccccagaccttgaagatgccaaatgaaatgacctggtattaaagaatggggggaggtaccctgattagtaagagggcaccatttcccaggggcattcttgagacctctctgatgtagcatgtgtgtctcgcctgactctcacctcaaactagtttgaggcagcagagctgtggtaagtgaacttgacaactggttaaagccacaacggatgatgcttaaaatactagtaattggttattgttcataaagtttcctccagatgtccatgtttcttttgggttatctttctcaatccccatagcagccccagtcacggcccaggaactaacctgaggcctcagcagctcgggtaacttacctgggttcacactgtgctgcggcggagcctaaatgtggcccacgtggactatggtcatcggccatcagccatgccagctgcccactaacccgcagcattcttttttaccagatttctttcttgctcagaagcaaatggcggggtgtgatggcattaggttatcaatcaagtgaaaatctgccattcagtgtgccacattgcagagaaaatgtcatgggttttcagatcaccctgtacgtagttcaaaagacaggacattctgctgcgatttcctgtaccccaacttttatcagggcccaatgactttcagcaaatgggagtcaccatgaagtgtgcgtcccggcatttgcaaatgatggccgcctgcccaagctttctctccacacaggcagacgaaacatctaatttagaaaattaaacgatcccgaaaatcctctgtaaaactagcttactagaagccacttaaacagtataaggaaagagagctagcatcggactctgcacatctgggctgttcctcccgctgatgtctgtgcagtcggaacagaacctgagtccccatgcttcagcttcccgttgttatcatgttgggaccattaccacgtgagaccacacaaactcgcagcggtgaactgtgaatgagccaaggggctgaaatggagcattcaagttttgcctgttagcaaaacatttagttggttttccatggcggccaaagtactgtcactatgacatgccttttgagaataaaaagcagagattaaaactagagtctttgcaatttggatatgaggacccatcacatgttcaactctaatacacttctacttatcatgcaatataggagccacatggctgtttcttcagtttgacctgtgatttcacagtgaatatttctaatgaaagaatagttacagttcattgcctgcaaaggaaaagttgatattagttgaaaccaaccctgcctggatcagatttgagagaaccagttttcaatgactggagtttaagaatgggaaggttttctaactgcatcaacagatgcacaaagcaaagacagcaacaaggtagggaggggatgtcttttcatgtccttgggtttaggccactctctcactgtgttccagagggagagagagcagcgctgggactctgggcctgcagggcagattaaggaagctcatcttcctagttggcatgtttctatcacagccttcagcttacttaactgttgatctgtttttccatgagggctaaaaatcacagtgggctccctgatccagaatttgagatgagggcttggatttaattataagcaagacagagcgctggtcattcatcttgaccaaaagcagctcccaggggatcagtctcattggcaggagagttaggacaagcttatcgagtgtcacacagacaagtggcccaggccatcccaccaccaagtatgcccacctcggtgacctgcttgccacccagtgaccctctcaatggctcaaagtggcccatttctttttttgtgatggacgttcactataaggagttccatactgagtttttctcttcaatcttccacttgaatagctaaaacaaactttttcatgaattggcacaatatttttgtcagaaatattaagaattagacttgtatctttatgataaagtcataattctaaaagatttctgcttttgtgacttctcttcggactgtactgtgacttattgtctctccatgctttctcacaaggccccagtcaaaggaagtggggtacacagagtctgcactgaagccttcttatgctgaggggctcttcagagatgcagggaagagaacctttgggttcaaatgcagtcccacctccaagctgcccctcgagccatggaactcagctttaatgcataggagtagactgcgatggcgtgtattctatccttccctggaaacccaaggacaggaccggggaagctccagcaactgcgctctggggcacatgtgccttccctccacattaaggcctcaccgtgaagatggagtgtgtagtacaggcttgtctcagcagctaaccagaaagtccttgcagaacagcagaggccctttagccctttagccttcctgcctgcctgcctgcatgtcacacacacacacacatacacacacacacacacacacacacacacaccccacgccctttcatctctcattacatggctcatagctcatgtgcaaactcttcagaaactcaaggcggagaacttccagttctcagagcataaatttagacattaacattgtgacagccctgaaggaggaaaagtttgtgcccagacatcgtgccagtttccgtgtctgtaaggaacagtttctgttaccgggcagagtgtcctagacaggagggaaagaactgcctttaaaagtctagagttgaaaagagactcagaatctctctggacaagtattccatgcttgctagattataaaaattatttgtatgggattcgtgtgtgtgtgtgtgtgtgtgtgtgtgtgtgtacacctttatgtgtttcttgcactttttctttggctttttttttttcctcctgtttgtttggtttgccttattccagtttgcttgtttttgttttatcgtattttattttacaaccattctttaggtgcctgtttattttttgaggagacaaagaggatgtgaacttggttgaggtggaaaaatctccgaggagttagggagaggagaaaccataatcagaatatattgtatgaaaaattatctattttcagtaaaagaaaagtggagaaaaaagttgtctgtgtttgttaaatagtggaagcaggcaggcctcacccagccggccactagtgttctttctccatggtatccttggccatttgtgttttattgttttcagtaagcaggcccagggattctcaggatgaagcacattgtagagccctggcatcttaaactgacatcccttcagccaaagaaatcccaggttaaggagcctcactgagccactcagtgggcaagagtgtcagccccgtagttcaccctgtgtatatacaacctggtgtcattttcccatccacagtacagaccagtacccatttcttggggctgttttgggagaaaaatggtcgctaggtcgctcttcagtgctttgttaaaatgctctgagttggtttttcccaactaggaaccacctgttggttttgaaggataagaaagagtcccgctgctctggccggttcctggccaatttcaaagcccacaccttagctttgtatctggttagtcctccaatggatccactgagcacccacgggccgggcagtagtggagactcactgaattctctctctctgcaggtgtgaaattgaggcaacccttgagcgactgaagaaactagagcgagatctcagctttaaagagcaggagctcaaagaacgggagagacgtctcaagatgtgggagcagaagctgacggagcaatccaacaccccggtgagtacgccacctagtggcttcccgcagcatgcacgctgagcacgggacagcatgaccacgctcctccccacccccaaccctgccctgccctgccctgccctgccctgccctgccctgccctgccctgctcctgagaactaaaggccttcattggtagtaataagtatgaaacaccaaatgccagagatttaaaaggggggaaaaacctatttaaaagaaaatgcctcctctgtatctttccttagaaactattatttccttaagaactgcatttatttgtatgttaaaattacaagagtaaagtctaatatgtttagaccatccgttaagccctaagaacactgagggaatgaatgcccttagatgctaccagtaattaataactcattgcaaggaatgccttgggtgtgtcagaacttaagcacattttctaagattgaactggcctgctgacatagacatggcaggcattaatattccttatggatttagtgccatgagtaggagaagcatcaaatggggagaaggcctctcctgggacaggcaacccacttgctctacctctgggaagatccttgttccttcccaagtatggagcagcactggccactcatgcgttagccttgagcttgaacttagtgttaaatcatgcatctcattccatcatccttgagatttaaaacagagtgacttttagggatcaagtaaaagcttaggattggttttctaggattttcagtggacgagaactgtccgcttaaaattacaagaagcaagagattcaaaataaagttatcgacaaatagaccaagaaaaaaagagagagagaaaacactgaacacccttcattgtgtgttcctcaaagacctatctagacaagtcttaacctccactgagcggctgcaaaatgtcttccaatatctaaagaacaggagagtccgtctccatttccaattccaattgtggagacacaatctggcaccccctcacccccaaaaaggaaagtgcatttaaatgctacacgtttacccttttcaaaaatgtctttggtaaatcccaggaatgccgagataaggactgagttgctatacataggactggcatgagatattataagggtacctcatttttgtcagcaagtcctgtgaattgaaccagattctcaaagaaggggtaaagggggggggcagcttcctgttcaggctgagctggtgccagcaggcaggtgggagctacagagcacagccctgtccccacggcccatctgctgaaggctaggaagctgtgttgttatgctttttatgtgcattgaaaccttaactgtaaagcactgcatggctcgactctttctaaatgtcttattgtcaagaaaactttcaaccgcttattagagtatgcctaagaacctcgccttggtttactggcgtcagtcttgctaagaaattatgggctgccttacacatattattgctgctggtaacacagttgtatgacaaaggataatacgcgacaggtgcttggtaggttgtgcgcttgtgttttaaccccagaagccttggtttgggggaagtgcttcgcaagccaccagctaactggggacagcatgatgcagtccctgcgagggcccctccctttttacttgtgaggcccaaggctttttgtttataacacttgctttcaatgtctcctctgcctagagctggtacttctaaggaaaaggagtttgtgctcgggtattttattagtagctgttttctttcatcctcactttaatctctaggtggtttataactagactgctgaaagaaaaaaaaatctttttaaagggggcaaacgaggcttttttttttttataggtagcttcatcttaaatataacagtctaacttttacacaatacataagaatactatcagattgatttcaggggtcctattttccttccgaaaaccgaaatattaaagacacttggaaagatgagttctctgtgcataaatagaaataaagcttatttctaattattgctgtggcttgctgtaaaaaaaaaagttagagataaactcttatttaagaaatatttatggatctctttagaccctaacataatgtgagaaaagaccttggcaataataaaataaataagcaacaaagggtttctgtccattgaaaaaccaatttgagaatgtggaaagggagtgaatggagccttagggagtgaggccctgccccaccagtaaggatctgagactggccaggtggaccacaggaccttgattctgagcccaaagtgccaaaattctcctctaatagaaagttctggcttttgagaatttatctccgccaagcagtggtggcgcgcgcctttaatcccagcactagggaggcagaggcagcaggatctcagagttcgaggtcagcttggtctgcagaacaagttccgggacagcctggcctacataaagaaaccctgtctcaaataaaaacaaaatgaaatgaaaacttatctccatcagtaagttaaattagaaaattgggccatcaagatggttgtgtcactagaagcacttgccaaacaaccctgatcaccccagtgccaaaaacctaacgaggcaggagagaaccagttcccaaaagttacacgcccatggcatgcgtgtgcctgccacaataatagatatggggaatttttaatcttaagatttaaaaaaacctaggaactacactgtgccttcacacccagagtgtagagttcatctgagagttattaccactgcgacaacatgagaaagacctcgtaggcaagtctcactggaaggagacttggtgtcggtggctgcagcaaaggagacaggctaagagcagtctcccacagtctccacaggttcaccataactgagttaaagacgggatctcgaatttactcccaagtgaattatataataacatgaataaattaaacagtgctggatctggcccgagtcagtaataaatggaagcaagtaacgtcctcttcagagtgtgctcaaagcactgtcccagagaaagaggtagggtcaaccacattccccagctgcatgcacgcacacacgctcacacgtgcacacacacacctgcagccaaactgcttttatccttcctctgcgctcttccttggaacggggtttctgatttttttttttttacttgagatttaatctttgcttcatttcttcccttttttaaattaatataatggtcaatcaaatgtttctgtctggaaatgaaattgggaaaaattaagagacatcctcaaaactactttattttaagcaaagcaaggacttaacactggtaccttcctgtccgtttgcaatcgggctcagtgtggtgctttgcgagatctccgttatgatttaccctgtcacttataaattaccgacaatacactggtgccagatccaccgttaaaacgtcctcgtcattcacctgctgcgtggtaccaactaattttgtggtatctgtcccctgactgaaattggtactaatttctcttttcacttctgtcctttcttccctttgatagcttctcttgcctctctctgcaagaatgtctgaggagtcttactttgaatctaaaacagaggagtcaaacagtgcagagatgtcatgccagatcactgcagcaagtaacggggagggccatggcatgaacccaggcctgcaggccatgatgctcatgggctttggggatgtcttctcaatgaacaaagcaggagctgtgctgcattctgggatgcagataaacatgcaagccaagcagaattcatccaaaaccacatgtaagaggagagggaagaaagtcaacatggccctggggttcagtgactttgacctgtcagaaggtgacgatgatgaccatgatggtgacgatgctgagaatgatgtggataatagtgaatgacaccagaaaggaataagcgtgaaaatgctttatttcgtttttttgttttgttttgttttgtttttttagaagaacagaagaaatgtgttatctcagtctatgccaaagagcagcatagggaggcagagcccccagcactgcgcctgcgcctgcgcctgcgcctgcgcctgcgccttaggccaagctcgtttagggcgtttccctcatcagtgtgactttgcttttgcgctcagaaaagggcagggaaataagctaaaggcatatttatcagcgagtgtggtgcctggttatagaaatacgtgattacacacatatcatgttctagagctagtgacatttgggctttttctttttaaagcgcatgctctgtagtttgtatctggctgtacttaaccctttcactcagttggttaagaaatgtccatttcgagcaagcactctgctcccgactccactctgacacttgatccttccccagcataccaaggtcccttccttgtacagcacattctaatgacagaggtgattggcaactataaaatccaggaaaacaaaacaaaacgaaaacctgaggtgaaatgaaagaagagtataacaaaatacctcttcagaaatacctaaatgccaggaatcttcaatgccagagagcacacagctcctcgaattaaagcccgagtggtgttctcagtagttccatttgaaggagaaacactctggtttgaagtgggctgcagacaacattacacgcctgcatccccgtgctggccggaagcatcctaacaagagcacactgttcaccctaggcttagcttgtcccttacacagaagcacatggtcccaaagggacgtgtctagtcatgaaacaggatgagcacaagcctgctctttacatgcaataacaacactctgtttctttgttttccagaggtgcataataacactactagattttaatctatgtataagaaaaaaaccactctaaataggaaagataaattatccttcttagacacaagtgcatcctgaaggggtctttttgttgcgtgtagcctcccggaacacacccagtttcttttctttttactgtcctctgttatgctggttagagaaatagattcaggtaacacttagtgtgaaggccaggcttcccagagacactctaagaaggctagcactagcagccaaaatgtatttaaactataaacgcatataaaattactagataaagttaaaacaaaagtttttatcaatctaactcagaaattggtatcattcatttgacaatgtaagttaaatatttttggtgggctttttttatatagaagctgtaacatgaggtgggcatggtagctcacgttcatagtcctggccctcagaggctgaggcaggacagtagtgggtttagtattagctaagtcgcaagactatgtatgagcaacgttgcaagactctatctcacgaaaggactaggtatagctactattgtttctaagtatgtttggtcatgaagtcttctggaatttgagataggacaggcctttaatcctcggtgaggattgaggggtagcatcaaagatgggaagcatgcactacaactttatctggaaagaaataactagtgggctcttctgggtatctgttccctgtgcagtctcaggtagactatgtaatctctgagcctgtttaccctttgttaccatgacagtacataacaagaaaaaggttcagaaggaaagtatgtaaccacgtagcctagccccaggccatgccaggggccaggtgacaccagctatggctaattgccaagtaaaggagacactgagaagtaagtgggttctataaccttctggaccactacactatctattgcaagtgacactggctcagaagtatgaagttaaaagtagatagctttcatgaaaagtaaagagagcaaaaatgaggaatgtaaaatgcacaaagagtttaattcagttgcttttggaagctttgtgtcatgccagatccacatgtgctgggtgtttacagacaggtaaaggctgcctaagaagtcagggttccccctcacccccatcctgctggaatcctctgcacatgtgtactctagacatgcagccaggctgctcaaacagaaaatcttgaagggagcagaaggcatgcctagcgactcttcattttccagcgtgctgtgagcatgcgaaggacacagtgggagtcagtgggttcaggagcctcctgcacaactgcccaggccagaagaaagcctcctgttcaacaagcctttgctgggacccagtgtgaaccaaattctagagaacagctaggtgaaaacctttccactcctagagcatgcacgctactgagcatcacagaatggcaggattcactacgtgtgtgctggaaattgagcaaggaaggaagatggggctagaggaaggagtcttgaaagcatgctcaggaaagaccctctgttgcatgacgatgctacagagcctgagaaggtaaagggacctctgagagtggtgagttctgccctatatgtaagaacataaacctcaccacccactaatcaagagttggttcagaactcatatagagcatggaaataatgtatttcctaaattaatatctaactcatattctatataaaaattgtagtgccagtaagggaaagttactgggctctatacccagcctaggttgagcaccaccccagcacatccctcccatctcctaactgctgccttcttctctaccaacattgcagtcatgttcacaactcagtactgtcatgaagaaatcacaggtcttagcacagagcacagtgagccccagggaagagcttccaaccgctctgtctagaaccacggaatacgccactgggcgctttacttctgctcaaatcaagtgttcgtctagtggcattaaaatgtgcaaacatacctgaaacctgactcatataaacaggacccatagaattctcacaccttctgtaaaaaaaaatactacaaagctttagttaattttataagagatgcctattcgctacatgaagaatttctaatgatgctagtgtagacggtctaattcacttctcagatcagtttttgaaatggccaattatcagtgttagattttgtttcagtgtcctgacttgcaaaagaacacaattcagaagttaaagaaatcctgaaacatgtaaagttcagaatgagaattagagctacaggttgtggtgatgaatgtcagtcggacaccctaaaacatttccctcttcacttgtaaagctaacgtgtagaatttgaggacatctatagtggtactcagctgagaggtaatgcagccttggccagccagcatttactgtagactggtggcatcctgtttgccagggacagacatacacacacacacacacacacacacacacacacaccgagaggtttccatcctcgatctccacagcattgtcctgtccccacggtggtgaagctccttaaacctgacacatctcctggtccatctctacattttccccccaaaacaaaatcacccacaccttttcagaacaatagcgacactttctgcgtgtcaggaagctgtagcttttcctcaaaccactgtctgtgaaaatgatttctcccccccgcccccaaggttgctagtcggaacactatgacaggattgcattacggtaaccccaacacagtacagccctggcagacttgctgtcattctgcagtcatttaaagggaatttttcctaactttttttttaagcaaaattacatttgaatgtttcacaaatagccagtgggataaggtcagagacacctggcacactgcttttgatgctctgaaaatactgaagactgtttgtggtttttaaccagtgaacttttttttttttttaacatgcagtgaatttgttaggctttgaacaccagctgaggtagtcacacttggcccccattgaaatcaaagggactaggggaggggtggcgtctaggagagactcagacccatttccctgccagttcccatgcgtgtatttaactttagttttcttttttccttttttttctttttttgtttttttttttcttttgttttgttttttcaagacagggtttctctgtgtagccctggctgtcctggaactcactctgtagaccaggctggcctcgaactcagagatctgtgtgcccctgcttcccaagtgctgggattaaatgtgtgcgccaccactgcctggctttttaaatttttttttttaatactttagttttcatcagtgtgccaataactttatgaaagatggtctttaaacctagtctgagttaaataccaacactttaaaaacgatttttgtcacactagacttgggcagccttgtgagactagttgaggttcactgtaccacagcacacggtgaggcgtaattctttctataatcaggcaccttccgctgcttccgagtaaggtcgttttcctgtgtagagcgtaacactgcagcagaggccccaccctgccataggcagcccggcccgacagctgtccacacagcattctgtggttgaaaaatggatgtctaccaggaaatccaggacaggccatgttttctcagaccccaactttgtgggcactctgttgcttgtgtgagaaactttctggcatgtggataattatttcaaactacagttcaggcaccgatgcaactgtttcatagcgtgtgcagaacactcttagttccaacacgacactttgcttctgcactctgaaaacctgctatcagaaaccatttctatccttggagtgtgagctctcagtaggaggcttcatcactgtgtttgcatatcagtcttctcccctccactctgttgccatgttattctgagcaagtcttatgccaaatgccatgtacaatgtctgtatggaagattaaactgctctcctgtgtggtaaggctgtttagttgccgacttcatagttgggatctgatattcccacaccgagtccgcgatgtatccggaaatccaggttggcgtcgtacatttcattctgatgtgaacttttctctgctttcctttgttctaagactccattttgcaataaacgttttgacagtaaatccctttgttatgtgtcgctgtgtacataagatctttgttagactggattcccagcattctttgacgaaatcagtgtcacacacatgcacacgagtgcttttctctcctcaagtctggtggcgtataaataatggattactaaagtgaaggggcagtcatgagaggttggctttttttttccccttatccccaaagaaaacagaaaggcttagaagtcacctgcagcagatgcactgatatgttaacaaggtacagaaaacatgaaggagaggggggggggggggctctgcgtggctgcagatcattaagtcttatcccctgtcttgccaaattcaaaccgtcttgctgcagtgcccagttccagccccccactcagtgatctttgtgagcgtctgcagactccctgctggagtgagcatgaggcggagttcaggctcttccctgtggcacaatggtgagaagccagccctggcagcaagacctccggctctcctttgcacattaaagctggaggtgttggttctttcatttgcaatcttgattcaagaaatacttatttctcaattatgtgtagcacaacatttggaaattatatagaagtcaaaacgacacactcgcaggcatgcacacacattctcgagacacacacacaccacaccacaccacattcacacatgcactgacatcctataaagaccagctatactagtgtccggctgtctctcattccacatttgtgtctgtaatgggcaaagatgatggcatgtttctgcagctggatacagctgccctttgaagaagtagagcttgccatgcgttttctttgatggcgatcaactctagatgttcctcctccagtcacccatccacgttattaaagcaggtgagtgtgctgggcgacgccgtcgcagctcgggtgctccagagaaagcacagtagcagcagagtacggggagcatatcattgactcgaatacacggtttatatccttgcagcctagatgtagcactcaaggtctgcacgcccgtgttggtgttttagcaagaggctctaccataatatgttcgccacacccagaatcagcttctttctctttttcctccaacacaagctcactccatcctctagtctaagtgaacatgccacacccacttcgtcccccatggccggtgtctcacctactccctcttccttgccttttcttctaccacaaccgcaccccaccctaccccaccccacccctgggtctgcaatccccagctcagcccacttgccttccattcccctgccgtatgctatggagcatgggtctttgtgcctgtcacactgagaagactgaatacatgcatcctccgattgtattcattctgtaaggtagtacagtaaagattaagtgggcagggcgagatagagaacgtggttggtaaaatcctcgctttgcatagaagaggacctgagtccaacaccagaatgtacacaagaagcccattgctgtggcgtgcacttataccctgtgctaggggcagacaggtacctaggtctctgaagctcagagtcagcccagcctagttggtgacttccagcccagagagtagtacccgaggaatgacacccaagttgtcctttggcttttgtgaacaatgcatgtacgtgtgtgtgtgtgtgtgtgtgtgtgtgtctgtgtgtgtgtgtgtgtgtgtgtgtgtgtgtgcgcgcgcgcgcgcgcccatgcagacataccaagtattgtgagttaggaacttaaagaaaaaaaaaaaagacataataaaggtggcttctctcaaatataatccacacacatttcactccgttctagtaaaattccttatagggactctgcctctcctagcagtttgagcctgtgggtatacagtaagcactgtttgtaacagagattgggtggtacttttgcatattctttcatgaatcatttaaacattttgacaactcaagctagttgaagctaatgactgtaccacaccctagcccacaggccatgggccttctcaagttatgggagcatttgtatgggagcatttgctatttagcccgtaactgcgggacgtactgatgtgaaaatttctccagcacaggctaaagtactcttcaaatccccgtctccctgatagggatacatgttttagtctgtgttagagtaaccggatgcctgtgaacagttccatcttcacatagcctgtttcctctatgcaagtcagatgtttaagccctggaattgccctgtgagaacaggcaaaataagtcacccggctacttagggttgcttggatagtaaattattgcattatcctactgctggctgagaattctaaggctgctgtgatagctgatgatgttgtgggctgtaaagccattcctgccaaagaagactacaccaacttgtaccaagtcccactaaaacggcattcacaaggtgaaatgggttgttgctgctgggctcagcatcccgtggactggctctgagaagtgagggaacggttttcctctcggccctaacctgcaagcagaagcaggaagcagggcagagcggcaggggagctgagaagacaaaccaaatgcaaggataatcttgcttccctcttttcatttccttcatatctcccacgcagctgctgccttcctttgagattggtgcgtggactgaagacgatgtggtaagccgctctgttagtgactctttagatctgggcaggaagccgacagatttgcccacaagtttagaaatgcggttagagagatctgggcctatctagcagaaatcaacaaattcctctttttgcataactaatctaatagagattgaaagtaaggactctatggtaaaagcaactaggtcttcaagccttaggagagggctcactggctgtggaaatactccagaatgcagtacaccaccaacaagataaaagccgtgatcctcagtgtcaaatacacatacttgaaaagatgcttaaacttccctacagtgccagctgaagacttgcgcatggaggagagagacaaggacagcctggagctttctgcacaggttccctctcccacctcaggcctgctctttaaatgacaaaatgcttaactgccctccttgctcaggcctaccccaagaggaatggacagagcattccccataatctgacattgcaggaggcaggatacttaagtccgaaagaagggctacatgcagctctggtagactccctgaagaacaatcccatgtagccaattctgtctccagatctgcttccttaatgggaaatggttttgaggagtgctgatgagagagagagagagagagagagagagagagagagagagagagagagagagagagagagatccctcagggcccgtgcctgtccaggtccattttacaagctcacgggcatcattaaatgaagaggaatgtgaagatggagtgctaggtagggctgccaagaacgggctccaccctagggagacagccaccccaagcaagctatctcaagaaaaaggctcatcactagaaattccagatctgttctccagctcagcctagtgtggggttggggcatgcctctctgccctttgtatcttcctttagcatttggcagcagcatagactccacaaagtaaagaaggcagatgccagcttcctgtttctcattcccagaaccctagaagccaagcctcttgccagccctgtacataattgcttcctccccagctacagggatggcccatctcctcctttggaaagaggtagatttgaaagatctgggttctaggagccagtctcagtttgtgctgccaggtcgagtggctcccatgccatttggctaaaagtccattgtcaagggacccagggaatcagaatgactgagtccggcctctcctctgtgtatcttcaccaaggtaatgttaggccaccagtaaacaggggcccagtgatattcaaggccaagagacctctgggtgtaaccacctcagtggacacagaaagaaccatgttttgcctgtcaccccatgtggctgccatgacctgacaggcctagcaggggacatcatttgtcccatctctctgtccactgctgtgtggtccttgttgctcatacagttcctgaaaaaaagtaccatggcaatccccacctgcatgagtgagtgaaaaagtcattatagcggcacctctaggagagatgtaaactctctccctcagaagtgtcccagctgcccaatccccctacgggaggaatatctccagttggaaagcttgaggctttaaaactaccaagagagctcttccatctttcctctgtggttcagttaaaaacatcagaatctatgggagactgtaatcgttaagaatgactactgcctgtgtgtgaacctcccaaaccatgtgtgtcctctctccacagtatttttgggttcagcagctcgtcagaaaaggcaagtagaataagtcccgtctccccctccccccgttttgtatctgtggagctaactttgtcttggctgtgctcaagtctcactccctgccctctgcccttctcccccaggcgagtcttcagtagagatgagtggatacgcaagtttgtttaaggagaacaacatcacaggcaagcggttgctgcttctggaagaggaagatctgaaagacatgggcatcgtctccaagggacacatcattcactttaaggtacatggtaggagaacatcaataagtcaactgagcatgtgatggatgctggcccacgtgttagcacatagagaggagagcatcatgctgtaggatgtgaggtgctgagataccttcaggcttggccctaactagctgccacacccaggctgcccctgttcctgcctcaaaagcccacggcaaacaggttagcctagcacagcagccgttacctgggttaaatggtgtaacactgatgtaatgccaggaagcctctagtctagggggaaagtgaagtatactattctgtacaatgacacctgtgagagatgccacaaaggagagggacccaggatgtgggcagacatctggaaggaagccacgaaggaaccagagccctttgtttggctttctagataactactctaatgttgtaacaaatacagacatctataggataattttattagaaatatgtttcaaaagaggccttatagaatgtaagatagactttatgcctacagtcctggcaggagaattgcaagttcaaggccagcctgagctatgtagtaagctatgtcccctatctctcctgcaaaatcaaattgctccccaaatctcaatcctaggatggatggaaagatggatggatggatggatggatggatggatggatggatggatgatggatgaatggatggaggaatgtatacagattagatgggacagggggtaaaaggaacacagctcttccaaatccatacctccccaaagccatgtcaacaaatctccctttactcggagcacctcactctatggctgctccagagagaaccattcattcacattgttccagagagccccggcccatgtaagaacatgtctatagtcccttggcaacagtctcttgggacaatgactggacactaacccaccatacgcaagacaaagcaggaccatgctgtcttcccctacatgggggacaagaagacacatgcataaacatcaattggcgggggtggggggcccaagggggactctcagtacagaggtatctgagctcccaaagacaaaactttgtaaatcttgtcctgtgtagcagatgctaagtaagatactcccacttgcccttaccctcttccacctttaccaattttctttgggaatcagccagaggggaaagcagttgcaagctgtgatactttaccaagccagaagtgattaaatattcctgacatagccaggataacagaagtgccccatctatgctggttggtgttactggacaagtaatatcccagcttatttaccatgtatggctcatcaaattcagtgcatgtctgcttgcaaggctgggcctgtggaagttcaaagaatcaccctgcccttaaggaatttacatcccagagaagagataaaacacagtcatacttcttacaggcagttggaagaaaagggacagtctgttatcttgaccagtggaaagagatggagaggcgaggtcccgtgatgggggatgaggggtgcgtggagctggagctgggaacaaggaagcatcagaaggggagtggtggagcacagagagctacagaagtggggtgcctgtgttcagaggagcagtgggtggcttgctggtctggtggaagtgtgaggctggagcagacctggggttagcagaagtggagtgaggtggctcagcccctgaactacttccagcttcgggctggacctctgggatgtgaccagagctggagagagcattgagagctcacttggcttctgggagttttaccgtggagtagggaggagaggctaggttttaaactccagggaggcagttaaaacaggcaagaaatggggcctgcctggctccttagcagaaatggggacagagaaaaaaggaggtcggcgaagttgctggtgaaggaggacgcagtaagattggagcgcgtgctgtagcatggatgagcctggcggtggtgctcactggaaagacaatggatgagcctggccgtggtgctcactggaagacaatggatgagcctggccgtggtgctcactggaagacaatggatgagcctggcagtggtgctcactggaagacagacggggagggccacagtggtgttctgtgggtatgcatatccagaataacatatcttagaggtggcagttgccagtgggtgggacaaggagggaaggaaggggtagtggttgtttaatgagtgtcacagtccctggggggtgatgtttggaaaacactggagaagaaaggactgcatagccctgtgaaggcagtagatgcagctggaggaaacacttggaaacagctacttttatggtactcaaatttcaccccattaaaaaataatacaggccggaagaaacagccccgaaggtaacgtgcttgccatacaagcataaggacctgggttcaattcccatagcctgagtaaaactctgcaaaaatccaggcacgttgctgtgcgtgtgcaaccctagtgtaggggagcagagaccggcaggtgcctgaggccccagaaccaaccagcctagcctactgggtgagcaccaggcagggagagactctgacccaagaaaataaatttctgtgagagggagagatggagggatggagggtgttgtaactggttctgtgtgcggatggttctggtgtgaatgggctttggaatgagagcacgatgggcattccagaccagagacgttcctcctggtcactgctcgcatgctcacactgcctgtgagaagctatcccctgtccctgttctgtcactgaaaggtacagtcatcatgggaccgagtctgtcacctaaaaggaggtgataaaactgcgggctggcgcagggtatccaccatccctttgcccaggatccctcccgctgaacctggctcccctgagcttcctgggaaggagcagggtactaagacaaaagctaagcatcccagaagggttcgatacattgttagaagatttgttttgctttaggagaaaaaaaaaaaaaagacacatccacttttcctgggctggggctcttttctacatggtcagtttcctgagaagctgagtaacagccggtgaattctcccagccttgtcatctaaagcaatggttctcaaccttcctaactctgagaccctttaatacagctccccatactgtggtgacctccccccacccaaccataaaattatttcactgctacttcataactataattttgctatggttatggatcgtaatgtaaatatctgaaatgcggggtatctgatatgcgttccttctaaaagagttgtttgacacccaccaccccctccacaaaggggtcaccacccaagggtggggaactgctgatctaaagtgtcctctctatgagtctcggtgccccctaggggtaaactggtgcatgatgaggctacagcctcgctgatggctttgctcctaaattcccctcctgtccatatggtaaatgctggggcattaacttgccctacccagctcagatctgaaggacagctttatctattgcataccctgaggtctaacatccctgtctggcagctttatctattgcataccctaaggtctaacatccctgtctggcttagtgggggtttcacttccagcgtcatttcagcttggctttttctcattcatttttttaaaactgaattctattttcatagcttatattggccttgttacttcattcgtctctcgccttttatcttgagttgtctgaacatagttttaatcctattcttgaattctttgctaggagttctttggggtcatttccctggagtctcttactatgggataagtaatttggggaggagacaggctgttctgaattttcactttgtctctcttttgcacagacttgtgcatttggaatcacttccttaagtaggagtgtagactcaggtctgatggtcaggagactgcttgcctgctaacacctagagtcaggacaacgggagaaggtgggcagggacttcagggccaaggatcccttaacagttggaaacaggagctaggttgactaagaagtgtagcacaaacagtagaggcctggcgggccttacctgtagaggagccgaatgggctgtggtttaatatctctaaagtagccacgcctgttcctttaagtgatgacaagttgatatcatgactttgacaatgagacatatgcttaaccaatggtcgatgttaacatccccaagatagtctataaactacataaagaatcatgttttttgtatgtgcaataattttactcctctttgctatcatcaaagcattaatgacgccacgtgatttttcctccttgcagtcagctattgagaagctaacccacgattatctgaacctgtttcacttcccaccactgattaaggtaagagaggtttccttcctgaaggctgcttttattgccataggcacctgccattgtccacgcccaaatttgctgatgtctggaactgttgtttgaagtgaaatttaatcacatctgtccaacaaaagaccctttgaagactgcgtgtgtacaaatgacacgcatttgttccccacactttgaaatattaacaacacattccagataagaatagcactcctcactaacgtcgtaggtgaaggcctctggcttcatgcctgattctggagtcctttctctaccttttaagttactaaaggaagtcacgcagcagaggcctgggttgccctggaggtggaggggtggagtgttattacttatagaacattaaacagcagtccccctgcttatccttagcaatacatccttgcacccctgcagatgcctgtggctgaggttatcacccaaccccatatatatggctttttcttgtgcaaacatgctcatgatagagtttaatatataaactgggcacagtgagagattaacaataacgagtagtaaaataacggtttacttattaaaagttattttaagacttgtgaattgtttctatttacaacttttatatcatatttttggaccagagttgactgcagatcactgaaactgtgggaaacacagtgagagagcgccatgcttgctgtgctcttgtgagtttagcctcagggtacatgacacacttcattataaaatgactactttcagtcagtacccagagctatgctagttcatccacagcctcggctctcatctctcagcccttgggtctctcagtccacggacagtggagaagctgcagtgttcctgtctggaaagagtatacaaacaccttgagtattttaaaattctcagcccaaagtctcatcccggatctagtgcaaaatgcactccagaataaagtgcacaatgccaggtgcatccagaaagccacgtcagcgacactgctcggaagagcctgagataaaccattcagcaaaggtctcaaagctctgtcttttctcttgctttcagctttgagttacagcgtgtatcttaatctaatagaagctcgatgatagagtagactgggaaaaccccgttaacaccaggagctagggaagagctgcagaaatgtgggcaggggtttcaggaccagggacccatgaacagtcagaactcagagctgcactaaccaggaagtgtggattgagcaggagggacctggtgggccctttcctgtgctaggggtaaaaggaaaactacctacattatatggaaactcagagggaaaatactgtctctaataatgatatctgcttttctatttcaggattcaggaggggaacctgaagaaaatgaggaaaaaatagtgaaccttgaacttgtttttggttttcacttgaagccaggaactggcccacaggtaacatgttgcaagtcctttgggcattttcgatctgtaactctgtggttttatacacgagccccaaccacctggtaacacgattgtgaatagaagtgtagacctcataaaactgaactgggctgacaggctgccactggcctctggaatccaacccaagaaatgtatagtctccatcagaaaaagaatactgggggagacagcccaaactctcagggttgcacagagtcacacacaggcagtatgagtcttggccattgcttattctgctttctggctcctgactcttgaggaaaatgagaataaagccacattgagaatggaagtggagatctggattatcagatctaaacagggcagcaggacttttggcctgtactcatctagtgaggcctacactgtcagtctggagggctgggggcgggcgctgcctaggtggcatgtgagctgaactctccatgagcttgtgttacttcagatccctgtaaatcactaatagcgtcttaagtgtctatgctctactatgtgtcacattgctacaagggaatcctgacagaagcgatttaaggaagaaggatttttctggactcgcggtttaggaagggacatagctcatcacggtgggaataagtgatggcgagacacggtgcgagctagctacactgcagccacactcaaaagcagagagagaatgcgtgctaacactgggacattttaattcagtttgggagctctcccttgacaatgcagctcacatcagggtgggtcttccatccatggttaaatctctctggaaatgccttcataaacatacccagagactccgaccaatgtctcttaaggagattccaaatctagtcaagttgacaatgaagatgagtcatggcagtgctgacatgtgaatgtggctcttccccagtttgcaaatgtggccactgagcctgtgaggggataattaccttgccttccaagagctacatagccagaaaatggctgaattaagaattggtttggggttttgttttgtgtgtgtgtgtgagtgtgagtgtctatatatatatatatatgtatgtatgtatgtctgtctgtctgtctacatgtgctttagagtctacaagagggtattagaaccctggagctaaagttagagaaggttgtgaaccacctgatgtggatgctgggaattgaactcaggtcctctggaaaaatagcaaatgctgataacctctgggccatttctctagccccagctttttactacataacttgtacttttactttgctaacggacttatgttttaacttcttgaacctgtagcttgtggctggggaagggttggacaggcctggctggtttccaggccatcgcttaataaaacccaacttctctcaaggcagttgcgggttcttgtgctcgggaactgggaactgggaactgggaatgactgggaatgactgggaactgggaactgggaaggactctaagtgctgagggttgggtttcacctgagacttcaggaaaggctctgcctacagcactgaggcactgaggcactgaggcactcacagaaaggggaccttttatgtcctctattttggccataacatagcactaaaggaaagcttctcctgtacattggtcactaggcactcattcttgttagaaacaagaagaataaggacaaaagatgaagttcctctcttactagcaacagtgagaaccctgttttaaccctgccacactcaagtctgcccagtagcaaacaaggtgtatgttacaatctagcctcaattctgtgacaagcttataagcttataagctttctccacagtacagtaactttttatgatttataggtaggtaggtaggtaggtaggtaggtagagagagagagagagagagggagagagagagagagagagagagataacttccttgagagagacttgtcaagagagatttcaaataaggaaatattttccatttttattattcaattattttattatttcaattactaacaagcaaaaatatgtactcattaatgtggaaatctgaaaaatgtttttagcaaagctttgaagctatgaagatatttgagaataaatacaatgacctatatcttaccataataatatgtgtgtcttaagttctgggttacacatcagctcctataacttgatagtctgctgtccgtgggtcaccttcccagaattctctcacccattcactcagcagacagttattgagggcctactatgtgctggatgcccagaagacaaagtcagaaagtagagtcgtagcttacaaggaacccagagcatcttgggagaaagaggcaggaccagtgagtggctgtggttcgggatgatgaaactttccgatgtcacagtccatgcacacactgcatagatgtctgcttgtcgatgagagaggggtggggatggtcttcaagtctccctagtagaatgaggctaaaattcacattttagaaccattcgatttgttcagtaggaagaaggtgtgcgaggcagagtgaccagtgtatatggagccaggcaaacacaggaagctcctcttgggctcacttccatggacctgactcaagcatttccccctctgggaagacttaacagagagcagagccagagatggggctggtgaccacaaaaagaaccacctgcggtgccacgctaaggatctggaaggtgtcacacagagccagtcagatctggtttctgtgtttaaaacattgctcagaagcagaggagggtgacttgggaaagagccaggccagtgtgggaagaagtgtgagtcaagtagagaagcaagttatcggtgatgaggacaggccagggaagtgctctgagtcccgggacacatgatgtgacctcacattccctagagatgggctgggagagaagagaggtaggaatgggacaaagggttcaagctgggctgctggagagatggcgttggaaagcaacagattgaaaggaaaccttagtgtgtgggtgcagtgccaaggtgccaagtatcaggaagtaactcacatggggctaatcaggaaatgttttttgaaagggatgagtttgaaatggctgatgggccactgccaaataattacctgaatgtaatgaatacgacccatctttgtgactttctgaacatcttaagcactttgggaatgtttacctaagtccctagaattcatgtcagatacatgagacacgatattgtcgtcagtgattaagaatcagagaacaagacaaagtgtgtgactagtcttagatgaggtgacaacagccagggccagaaatgatggcttgtttctgtttgtttgtttttgtttgtttggttttggttttgttgtatatgcgctaactcatttacgctgtccctaaacttgaacaaaacagccagaatgggttgctgtctagttctgacatgccccattatgtcaccctatactctaaataaaaagatacttcttcataagcatgctctgagtgcaaattacagtatatataagtcttattacctcgacccttaaaggtagaacctattaaaaaaaaagatagattcaaaaccctcaaaatgccagctagctgagttctcataaaccttcctttgcaacctttctctataactaaaaaaactcacaagaaacattgatgtcttgaaatctctccaaaccctttgcttgatgtgagtttttctctcacaaataaaatgaaaaggatgttctaacaggcgccaatgggaataatctatgccaggggttcttttctcaaaactagtagcaacttttcctctttgcctttgagaaggactattgggcaaggatacgctaaaagtggtattggtcaccttcactgctgtaacaaaacgcctgacagatgacgtaaggaaagagaggtgcattctggactgtggtttcaggggattttagtccatgatgagggactagatcaacaatcagcagttcaattcctaacagggagcttgtgatagaggctactcaggtcctggtagaccaggaagcaaggggtatcatgggaacaagaggccaaatagaaccttccaaggtctacttctagtgacttccttccaccagttagaacccacattctaaacattccacagctttcaaaaaataaataataaataaataaaaccacgaccaactaaggataaaatgttcaaaacatgagtctttggaggtcattccaaatgctctgccatctcaaaaactcgaaacctaccaaccagagatggaaaggtgatttatgtacaaacagtgaggaggaaagaccctctctcactgtgagaagtcaaccttcgttctaggaattcagatgaaattactttgctttgcttgctttccaaccaaatggtttatgccatgaaactgattcaaagagccttcagcaaccatccacgactgcatgcgtgtcttttctccaggactcaaagtggcctcgtaacacctggcccggcccgggtgctttgtcttcactgctgctccctcctggacacccaggatctgccaggctccagcactgtgcacaccccaggccttctcccacaagcaaaacgtccactttcatttcctatcctgaaataacctagcaggaagggggaaaattatatttgtgccaatgaagatactggcaatttaataaaatgagaatggggatcattctatttgactatttctaaagagcaaagttaattttttacttaaataacacacatatatacatatatatagaaacatatatgtatgtgtgtgtgtgtgtgtgtgtatatatatgtgtgtgtgtgtgtgtgtgtgtgtgtgtgtatgtgtgtgtggaagtatttgtatatatatgaaagttatgacaatcaaattgggagacatcaggtcttcctaaagctcgtttgtctcccatgtgagaggcaggagatgtcgctaatgcctctggtaagcattacgccatcatcagtcactttgcaaacatttcagtgccatgttttcaactgagcatggtagggaacagcagccctgaattagcctccccaggaggcaaccaaggagagagatgaagtgacttgtccagaacccccacttggtaaggggcagctccagtcattgcctccttctggaaaacaccatcatcccctctgagtgcgtgcattggtgatcggttgggctttgatcagttaatgctatactccagcagttcttgttttgtgtgagaactgctttgtgttctgtgctgtgaagcctttggcttggtataaaggaaagcagcttcatgaaactcaggcatctcatgcactccccagggcagcgaccatgctttttattgaaatattcggctgcatagagtttattattatttctcttatcagctcaccagtcaggaatattgatgctcaatttgccaagggataaactatcaaatcacccagtacttttctcaccaagctcttctgagactctgtgtcataaaaattcaaaagcagagtgaagcagggactactgggaagtcatccattgctttggtgccaaaccgtcaaacctcatcccagagaccttatctgtcactgtccccagtaagacagaagaaatgagacagaggctgtgctcctacaggcctgaactcatcacctgctatggcagcaacaccccctccctctcccaccagttctcaacagggacctgggtccaggtctaggaacccttttcaaatggccattgcttcggatctccttttgagatgcaggagaaagtgaggaggactttggagaaggttagcaatgtccctcaggaggctggtggtctcagaaggattctccctggatgttttattccccttcttgcctacgccttgtcctgtgagcacctggctgcatccttgccacccagaggcaggtcagtcttttcctgctctgactgttagactacctttacctctacctcttgcttgtgttgtcctgaggactttatttaattaaacgttgcatttaatacatggaattgagtcaccagactcttccttggaggactataaatagaaactatcaaatagggattttttttttaactattgtatagtttttgtaaatggatagacaaaatggctaaaataacagggtctcaagaaaaggattctgtgtgcacacatacagccactgccttctgccaattccagaacagctgagagcagagcttttctccactctgatggaaattggatttattataaattcagtataggggcgtccttgccccatcatgggggaggggctgtgcacacccgcccatctttgtacatgtaactaaatactgaagcttgcaagggtagaaacatacaggttttaggcaggaagaaacagaaagattagccaaaccctacaagacttgatttgcaaagaaagcaaatgctagagagtcacagcatagcacagcgtctatcactactagattggggacttaaaatttcacaagcaagggaaatctaagttaaatgttagcaggaggggacttagtagccacagactgtggtgacagctttcagtttgacccaggcattcactttaagcatgtccagctttgacatgtcaaccatacatccataaagtcgtcttttaaaaagagaaagaaatgtgagttttaaccaacgggacagaagcaaatgcagtttacagttgtataactcactgctgacttccagctacagagtggagcagtgccccgtccagtgttgggtagccacctatagtgccagagctgagctgggcaatgtgcctgctgatggattgacagccactcatacatgcccaagtgccagggattgccaaacaaccagaggaaacagacacactatgtggcatttccagattttggtggtgtaaatattctgccacaactgattgcaagttgtcagcctgaggtcactgaattttgttgtgaaaagattcatctggggtgtgtgtgcgcgcgcgtgtgtgtgtgtgtgtgtgtgtgtgtgtgtgtgtgtgtgtgtgtgtaggggtgtgtagagagatgactcagcagttaagaatacttgctgtttttttcagagaaccagggttcaatttctgacatctatatgacagttcactctgtctgtaactaaagttccagggatgggggacttttgggatagcatttgaaatgtaaatgaagaaaatacctaattaaaaaaaaaaagttccagggcatctgacaccctcacaaagacacactcagacaaaacaccagtgcacataaaataaaaataaattaattatctttaaaaaaattttaaaaagaaaaaacaatccacttgggagagctgcctctagcacacgattgggtcatttttagccttccttgggattatgtatccctttaaaaatagcccacagtgatgtatgtcgcacatgtgagcaaacacaggcttaatacagacatgttggtgctggttttcaggataccagagctcagggaccactctagccttttaaccttttagccatggtcacctgacttctgaatcagcactgacttatattgtctcacactgaccatattgtatgaatcaaaaggcaggatttagatttgtgagcagtgaaaatagacttctggagacagggatatgaaaatctaaatccgtgcctgtcttctgaaaccctctgtggtcactctagttgacgattcctagacagcaggcacagtttgggatctggacagaggtctttgcttttagaagtttctgggtaccattgtaagctttgtactgagaaggtcacttacaggttttgagaataacaaactccaaaacagacacattcgttacattaaaattaaaagcactggaacgcaaggacacacgacagctctcccaatcctgcatgttagaatttggattgaaaatggctcaaatggtaaagagtgcgtatctccgcccccaagtcagggctttttcataaatctactgctcgtcatgggataggaggacaactttacaagtagctacttttatatcctgagaatcttgagtaaaagtttaaaggcagcaaatgtctcagtattgaaagggtcagatgagcacttaggtaagccaggccactgtctatattcatttaggaacctagtccgacacagaatattcttaattaatgggaaatcaatagcaaaactaattattcatttttttacaagataactatcttccaattccaaatgcaaaatttgtaaagccctttctaagccgttaactaatatccgaaccaccttagatactcaagcctagtgtgtcctgtgaaagtgtgtctcgctcggtgtgtcttacttcccgtcatccctacggccccttttcatacgtaactccaataacaaccccccaaaaggcgatataacaaccttatctccactggtgtctccttggcaccagtctgccctgaccttagacaccagccattgttaagggtataacacatttacatattttgcaataaaacatcagttatttgcattactgtgtcaagttttatttgattctttcacctaaaaatgactcattttcctttcttgtattttaaaaaccaactactctaagcttgtttgagaataatcaaaaattgcccatttagctagaagtcattttcttttcaaaaggcaaatgttatttaatctttcagctgctcattgtgccatcataaatactttcttttcagcacagttgtggagactgaaatgagcccactaattgcctcccatttcgactgacatgtggtggtttagtggaaagagaacacagcagggagaaggaaataggaggctgagaaaatgagagctaattattttcactgcctcatgtcaggctctgtgtcagccttgtttttacaaactggaaggtttagcactaaataaaacaaactggcgtcatgtttttatatactggcagtgtcacggaagcagctgcacatctcaaagacaatataatgcctgcgttcgcatggacaccatctgacagacactgtgagccgcggctaatgaggctatcacagtggtgccagagggaaaggtgctgaattatgtatgattcttcatcagggcggcagtagtcctgtacatcattatgagacattgttttgctgaagagattaaaacattcttagttccagaccctgcaacctatgcgcgctgaaaggaggttattaatggaatttttagggagactttcttgtggatttcttttgggttggaaaaaaccaatttcgtgggacaaagccgtgatgggtcacgacaccgtatagataaagaagagaagcaaattaaccatacttgtattctcttccttctaaagacggcataataaaatacagcgtggcggggttatacttaatggtaaataacccaggtgctatcgcaggacgtgccacttgcctgcctttgacacagcaggttctggcagctgagctggataatggtgacacatgtaaaggagccttcagagacctccatcagtagcatctccctgctttgtatacagctgtagccaatattatttttgtgggttttgtttttaatccgggattgcttcgcaaaagccagtcagctgctatggctgcatctttctctcccggctctgctttttcagaaagtttattctgaccgctctagtttatattttaaagtactcccacagttggtggtttttatatttctccatttatgggaagagaggagcaggtgggggttggagaagctagtggctctaagactgaacttgatgtatctagggcatggattccagtcccatgaggctggctgtaagatatctaagcctcagtttctttatccataaaatgggaaccgtgctctctagaacagagtaagactataggggttagataacataaatagatctcaaaaccctgaggctgggcgtatacacgtgacatcgtgaagtttagtctgtgtgaagtgaaagagaacaggggcagcctttgattgctatgaagagggcttgcctggggaaggggcttctgaaggactgtagatgtcttgcctgcttggttggctacacaggtatagacactagtcaagctcagtgacctgtgcagctaaaagatctgtgctttcattacatgcagattgttgctcaatgtgaaagccctttttaaaaaaaaattccatattcttcagtaaaactaatctagaaaagctcatttgagggtcaccttccttctgaaggaccctgaggtgttgatggctccagttaatttggtaggggaaaaaaactgaatattaaagaagaggagggggagggggagggggagaagaattcccagaattcttctgaattcccagaattttacagtttgatatattttgtgctttttaatatctggagttttgttcctcctgtttgggaaatctaccactatctcaactattctcttaattctcttctcttccatttcttcttccctccctctttttatgtagagaaaaggatgtctgtgtgtgctgtcatttcagctactttggaactccagggaactgtgagcagctccaaaagcgtgtaatagtaagctctcacaaagagatacttaacttagcattaactgagtgttgttcaggattttatctccacagggcaagaattctcattttagttagcccataatcttaattcgtaaaatgctttcacgtaattggtaatcccggaacagttagttgagatgctctgtcttcctccgcctttgctcccagaactgtccagtttatcttggtggctaatcagccagtaggattcttctattttccccattccaaatgcaaaacttgtcctcttcccccaacaaaatgtcatgtgtctcctgcagacttcagagcggtgcatctgctaggtaacggatagtttcaagcattatgtttgctgccccccaaattccagcagaaacagcccctgtgctcagcccttctgctaagctcagccttccccccccacccctcccgtgggtcagcaggtgtaggtgatgctctctgtagaagtacatcaggataactcttccagccatgtgcacgtcaccatggatgagaaccaagctttgaaattaaaatccagggtaatcgggacctgccttgcctttgtatgtgcaacaagacctaagctgttgtttctggtttgggtggcacacgccagctgggctggagctagtgatcccagtggtactgtaggtacctccaacaatggcctgttgcggtaatggaagaaaaaaactggctatattgaacctcatggagatgggatattagtctgtatcttggatctttacatatggattcaacgggagaatctggactgtttgcaggtgttgcctccccgttgctctttgtaaagggagacttctggtactgtgcgtccttcgttgatctgtagcaaggaaaagctcaaggatcgacccttatcttagacctattgggaggaggtaggacctttatagagctggcgtagtgtgagaatttcaagtcgtcagaggaataccctcaaagagaactcttgggtcccaatctctcttgtacttcctggccatgacataagaggttccattatgctgtagctcccaacatgaatggccccaaggtaatggccaaatgttcactagcgtgaaactccaattctgtgggcccaaataagccttttctctttataagttgattatactgaatatttattatgctgatggaaagcaaacacaggaaacctgcttttcacagcattgtaagaacctttgctgattcaaatctaaactcaactcaccacttgctacctgtgtgatctctgtcaaattgcctcatctgtccgtgcatcaattaccttgaccaaaataaggcgctctggctgtcaatcacatttaatagccaccatacttccaggcatctggctcttattagcaaggcagtattgggacatgttgaagcagaagaggaccaaattagttttatacgttccatttgtgagagaagataaaaatgtattctttctgtttaataaaacaagtcatcgtgatggctaccagcactgggtttgaggtcagcctgggatatgtgaatccttttcttgataataataataataataataataataataataataatgtttgttgggctaaacattgtggtatacacctataataccagcactccaggcgcaggggcaagaattgccacaagttcaagaccagcctgttctacatagtgagtgcaatgccaactggagctacataatgagatttggttctaaaaccggaaccaaataaagatgcagtaagattcagaaagattacatccattagcgttgtttagatgagaaaaataagtaaagatgagaagtcagtgtgaggaggtgaagccgtaaactcacactcttctacgtctctccttcctccatttctccatagcaatgacttaatttatttatttttattttattattttttctcttcttttttttaattagacattttctttattcacatttcaaatgctatcctgaaacttccctgtaccctccctctgccctgctcacctacccacccactcccacttcttggccctggcattcccctgtactaggacatataaggtttgcaagaccaaggggcctctcttcccaatgatggccgactaggccatcttctgttacatatgcagctagagacacgagctctgggggtactggttagttcatattgttgtttcacctatcaggttgcagaccccttcagctccttgggtactttctctaggtcctcgattgggggtcctatccatccaatagatgactgtgagaatccacttctgtatttgccaggtactggcatagcttcacaagagacagctatatcagggtcctttcagcgaaatcttgatggcatatgcaatagtgtctgggtttggtggctgattatgggataaatccctgggtggggtagtccctggatggtccatccttttgtcttagttccaaactttgtctctgttactccttccataggtattttgttccctattctaaggaggaatgaagtatccacacgttggtcttccttcttgattttcttgtgttttgtaaattgtatcttgggtattttaagtttctgggctaatatccacttatcagtgtgtgcatatcaagtgagttcttttgtgattgggttacctctctcaggatgatatcctccagatacatccatttgcccaagaatttcataaattcgttgtttttaatagctgagtagtactccattgtgtaaatgaaccacattttctgtatccattcctctgttgaggaacatctgggttcttcccagcttctggctattataaataaggctgctatgaacatagtggagcatgtgtccttattaccagttgtaacatcttctgggtatatacccaggagaggaattgctggatcttctggtagtactatgtccaattttctgaggaaccgccagactgatttcctgagtggttgtacaagcttgcactaccaccagcaactgaagagtgttcctctttctccacatcctccccagcatctgctgtcacctgaatttttgatcttagtcattctgactggtgtgaggtggaatctcaaggttgttttgatttgcatttctctgatgattaaggatgttgaacattttttcaggtgcttcccagccatttgatattcctcagttgagaattctttgtttagctctatatcccattgtatatgtatgcaatgttttattactaaattctttctacagcagtgttttttgtatttaaaccccatatgcccaccttgatctaaccattaacattttactctgctcattttctttgtcatctctctatctctccagccacctaagcaataatgatttcataatacacttcaaagtaacttatagacaccagaatccttcttcctaagcatgccaatactctaggagtcagtaagaaatgtatagaccttgtgtatacagtcactggttttgacaagtgcatacataccctcatgttaccctaagctctatcaatagagccctaccacttcaggaaagttcttctcatattctttccatcaaagaggcaatcaatcttctgaaagtttttgcagaagagtattactgagtgtcagaagaacacactcattaatgagttctttctttctgcctgatacttctttctcctgatcttcagatgtgcacgtgcttctggatcagtaacttttggatcgttctgtgaacatatagaaattctgttcccttttttaaattagtatttatcattttattaagttaaggcttctaagaacatacccaaataattttttttccatttcttctgtctaaatgcttatacaagtagaatttcttagtcatgggtgtatgtttagttctgtaaaaagttgctaaaggttttttgaagtaattataccatttgtattcctgcaacagagcatgggagttccagtagcttcaaattctaaccaacatttgatgctatcagcctcaggcactctgctggtgtataataactccctgtggtttgaattagcactcccccagtgatcaatgatatacagaactatgtagtggtattgctgtggatttaatataccagtattaaattttaagtggttttacaaaagaatctaaatttctagctttcatgaaacattgaaagccctagcaaaactagactcatattcatacatgggaacagtcaggagaaactggcccaactctccaggttgcccatgccttccgtaactgcccagctcttcaggattcctttgcctttcatagctgctcagctgtcagctatcatatgtcatcacatctgcagtgatgctctcctccctgtaaagaagacagcaggcttcatctttaacccatgacaccactagttctggggaaatgctggtaggtagatcaagaacactaattggttaaaagaataggaaatggagaaatatgactctttttgtaccaatgatgaaatatccttatggtgtttaatatgtacgcacattaaatggatctgttgcaaacagttacaccctaaggctgcactgagtggggtttattagatataaaaagggatctaattttatgtcttccttcagaaaaggaaaaataaggcgctcccacatgacttcatttagaatactttttgtgttataaaacactgaaatgaaaaaaaaaaaatcggttcactctctcagtgctctgattctgcttttaattccaggattgcaaatggaaaatgtatatggagatggatggggacgaagttgcaatcacgtacataaaagatgtgactttcaacacgagcctccctgatgcagagattttaaagatgacaaaggtaaggttctatttacagcttaaaagcgtcttccgaattcacagatatcaaacaaagacattagaataccgcagcagtgggcttttgtgctcctggatgctcacatcagctcggtctcaagctgcctcttgaaaggcacattttatttagcagattgagaggataatttttttgttaaaattccacttatgctgtgtgaaataaaaagcactgcaaacaaaaaaaaaaaagtatcatttaagtttctttttaatcctacatctcttcatacttactctatcatttattaaagtaaaaaaatgttatcaatgaaaatatttacttgaaactgcattgacttaaactttgagtaaacttgtgatgatgaatacttcctttttgctcttcactgctggggatgagtgcagggcccgtgcgctggacagtgttctacccctgagctgcatccccagtctgagctcttcagtgttagaaggattgagataaggccgattgggggacaggttactactttgtagcctctgtaaattcacactgaagatttatttttacagtgcttggagagcctggtagtaatacagagtcactagaaaccctgaagaaaatctgatagaaaatgcttaacttgatcctcagaatgggaaaaaaaaaatcagttgttttccctaactgtactaggaaaaaaacaaaaacaaaccatggtagaagacctagtgcttcagacaaagcacagtacagctggtcatcctgacctcaagttatcaccaaccctggtacatgagtaacttaagtgcgtgttgagttctagtgaagaaaatggagctttttggaaagagtcagagtgcagacacaagtaggaaacagaatgagtcaacagagccatgacgtttaacttgtgtgttctccacatagacataagatggctgaatgaccaagtccttgtaacttacaagtagattcattgaaaggctggtttggtatttgtgttggagccctctatataactggaattcacttccatggccttccttacctgggagactatggtttggtttagtgtttccttactttgtggtggcacactatgttttgatgtctgggggactagaaaggaccacaatgtccttattggtacaagcctcttggcatgatagcctgacagactggaaagctgagtggttatcaaatcctctacactagtcactgctcaacctaaaggggcctctcatattatcatggctcttaatattgagaaagctttgggctactgcttcaaacagcatgaattaataacttgctgataggattgaatggcacgtcatgtgtcaccccagacaggattgagaaccttcatggtggtacatctgtgataccaatatttgggaggctgaggcaggaggatcatcgaccagttctaagccaggactacacagccagaccctagctcacagaaacacagaagaccatgggagaccaggactactgtctcctctcagtaggacatgcacacaattcagccatgcaaagattagttttgcaaatatatatatatatacacatacacacatatatatataaaacaaagccccaatatacaagtatgttataagccaaccatgttttatggtcatctgatattctgtccctgtttgaaaattgcttatggcacaactaactggcctcaaccacgcgaggcagcacaaggctgtgttctgatactaagccatcctaacttccgtgtttcagccaccatttgtaatggagaagtggatcgtgggaatagcggaggatcagactgtggagtgcacggtcacctatgaggtaagctcctgaaaacaggatgagagtttcagcccctgttcgtgagcagggattggtcgggtctccatcattacttacaggttagtacgtggatttcctggaaaagacatgccagcatgcatgttcaaagatgaacacaatttctctagcaaaatgtgaagaaggaaagagagtacaatagaatttagggtaatgcctagtctatactgtccttagatatcgattgagtattgtgtatgcccaaccttatgtaaaatgtgagtagaactcacttggaaataggagtttaggagaggagatgggtggatgttcaaaataccataccatgtacctctacaactacctctggagcctttgttatagccaaattaaaagactccatacatttctacttgaaaaaaatgtaaaaacatactattaaaaatgtacatgcttagctaagtatactggtgcatgcctttaatcccagcccacaggggcagagacagacaaatctctgtgagttcgaggccagcctggtccacaaagagagtcccggacaaccagggctctattacacagagaaaccctaaatacatttagtgttccctgctgactgggtagagaataacccagttacaagtaaccagtcactatcatgtcaggtagcgacagaaaaaaaacaacgccttggggtggtagattgtgtagtcaaagatcagagaacagccgtataaacaccaagtgcaagtctctgggacacagagcacaatgatgaagccagagaggtgggcacagtcaggtctggggacccagtaaggactcactgtaagcacagccgaaagtctgtggaagcattttaagcttcagagactcactgattctgttgtgaaaatgcacaagatcttctgtacgatacataagttaccaataccttacactcaaaattttttttaaaaagatttaaagtttcatgtcttttaccattttaaaaaatcatagttaccattataaaaacatctctctgaaagtatacttcaattctgtattcaaacatttatttaatgcgaataacattgtaaaaaatcaacaaggtcttcatggttggtggaacactaaccctagcaaggtaggaatctcatgtggcacaggctggaggggcacagtcatagcacagagaccggggacggggacaaggatgcatcttccattgctagggcacacacaccttccatctgttcacgacagttttagcaagggttcaccataagccaagttaagagccaagtacacctgccctgtctcacaagcctcgggtaaatactgaaaggtgggtaatggttgtctccatttagcaggagagaagaaagcccccacccctaccttccagggctctgggtactctgacagagttaatatgctcacaacccttgtttctctctgggaacagtgtctctttcctgcctccagccccgacctgtgagcctcacagtggctgtagtatgctgcaggaagttccctcagagtgggctttgcatgctgctccaatgagatttcctgagctatcacagtctagcattttagaatcagaggcccaagccttgtccacctcaccccatcagcctgcaaggcaatacgtgtgtcagcaatcctgatacctgttaaccgttccctccgtgcatccgcccaggaaaagccacctttaactgattccggcttcgcttcgcctgctgcagacaactcattaaacgtgccatgcccgccgcttgcccttcttcaacctccttcctccctcagtttcttctttccttactcctcctcttcatggactccatgatgataatgagccactttttcactttctagtttttaaagagttctttttctttttcttcctttcttccttcctttcctcttattctctccttttattttttgaaacaagatatttcctatgtacccctagctagtctcccacttgctattagaccagggtcagccttgaactggcagtgatccacctacttcagcctcctgagtgctgagataaagggcctgtacaccacaccctactgtattaaatcctagagatccctttttgtagggacccaaggccatttacaggtcaagccaatgtcccactgagctacacccagcgccctaaagagactgtaatctgtaggtgtatctggtgatggggacagttttgggacaagaactgttatcttggtccagtatcctcttctgataccggatttcttctctctccatcctgtctcgctgtgcacctgctaaccttcactcccccgggagcagccttgtgccattctcctccctgtgtgtatcctagcacccttggaccaaaggtgcttttagggaaaacagtggtcaatgttcatttattcaataaggtatctttttttcaaatatgaaagacatttcttattaataaggtaaattgagctctatcaaatgttataaattctggaagaagacaactctattttttttaaagatttctttattgatttatctatgagtatggtattgctgacacaccagaagagggaatcagatcccattacagatggttttgagtcaccatgtagttgctgggaatcaaactcacagcctgcggaagagcagtcagtgttcttaactgctgagccatctctccagccccacaaccctatttttaagtattataatctgataagtagaaaagggcatagaatgagagaagagaaggagaagggagaagaaaggacactgaatccattatgagaaagggggttggagtgttcctcttattcaaattcactaatttgggcaaatgacataataacatgtgtttccccttctcattctataaatgtgtatatgcatgatcatggggttttgattttttttttaacagaatgatgtcagaacaccaaaactcactaagcacgtgcactccatacagtgggacagaacgaagcctcaggatgaggtgaaggcggtccagcttgccattcagactctgttctccagctcagagggcaaccctggcagcagatccgactccagtaagttagtgtccttaactcagcccgcacacctgagtccaggatgttaagttatgagattcccattgcagaggagagtgccaggcagaggtggctcagatgcctaactcagacaccttgagacctgagaaccagcaatgaggcctgtcgatgacggaggaaaggtcaggggagggaggagaagatggacaaacgagagtggagtaggcaggacaggatggagaggctcggcgtgatggctcggtgtatgtgagtactgactcttgtatgttgtcctctaaccacgcaaacatcatggcatgagctgttctacacacacacacacacacacacacacacacacacacacacacacctcgaatacacacaaattgaagagagacagtaaagagaaaaactccaacgcatatgctggatactggtgatagtaatttttaaaatgtagaaaagcattcaaggccagctgacaggctatgaaatcggtcattatctggtgaactcaagcaaaagttctgattccctacttgtgggctgagaagctctaggactgtaggactgaggcacgctcaccgctgtgctgaaggtgaatttgtacaaagccacatgcagtcccctcataaccgtgagtcgtatacaccaagcacacagaaacccgtgctttctcagcagcactgcttctccccccaagagaaaagtatttctgtgacagtgaccagaaggctgtctgccaggcacggagacaaaagcgggactctaacttactgccctcaagggcagtcactgagtcatgaccgtctggctcctacattggccactgttacgtctgacatgccaagcagaacaaacattcttaaatgaccaccagccagggcagccagaatcctgaagaacagtcaaaagccatcaacaagtgatttgacatcatgccttcacctttgtcaacagttggtttgcttccttgtgcagataaccatcagggaacactgtgactatccatgactaggcttaggatttcgtgtggctatttctaaactcctttatgttggttaagtctgtgtgccttgtctaatatgtctgccataatccttcaagttcttcttttagatgggtgtgttagctcacaactgtgatcccagcaccctgggggctaaagcaggaggaccattcaagttccaggccatataagctatacaggagtttcggagacaaaaaaaaaaaaaaaaaaaaaaaaacaaaaacaaacaaacaaaaaaaaacctttctaataagtgatgtttacagggcacattttacttctatagggctttcatagtcatgaccctggttgacccctatagccctgccccccgtaaagcctgtggggttctactataattctgctgcattgtctcttctgtgaggccagtttccccatttccaaaagggctgccaatggcttctaagttttacatagttcaattccgtccgaccatgttgagagtcaccaaataaacatttttgttgttgttgttcttaaatcagtctgagttccagatttcctctggtaacacttacagggctagtttctccacacatgcctctatagtcagtggactgtatcaccagatgtgatggatggtggtgaacggcagaaaacaaggtggggttgggggaaggtcttaaggtcacctacattgtgaccatggttcttccccaggacactgcccagaccctaaattggtgtcccttacatcttctaagcatcatctcttaggaaataataacttaatctttccttaagagtgaacacggggaagatcagcaccctaccctccaccttctaggattgctcccaacagtttctctctggagagctcctgtcttcctctagtttttagcttggtgccttccttctgccctttctcaccgcctttcactcaccgttccaatgtgatatgaagactcaggctcacctgttagatcaggcacatcccttgtcacctacaggtagcagaaaaccccgattctgcctggtttacctcagtgggcctcaaagtttggtcctgcaggatcctctgtggacttgtcagatatgcatattctctggcccatctccagcagtcggcattttaagaaaccctccaaagtcccgcaaacactgatttaaatgaataaaatgtattgttttccattactagaagtctaaaggaggccgaggttctggatacagtacggcaaatacatttgactatggtatcttaagagatggcctcttccttccctcactgccatacacactgtactgactccgcccacggcttccctgaggtgtctggctactctttaaacacagcaatgccctgaagtcaccaggcgtcggtcctgatctgtcctcatatttaggagaaaagccttctggaaatccaacagactaccccacaccaattctgctttgggcaggagagtcctttgctggcgtcagcatatctgtcatgggccagaagaggctgtttcccttggcacacatcaaacaggacttcaagctcaggcctcttggtagaagctaaaactgtatggaattagcagtttagaaagataatgctgtgatactatactgttccatgtatgtgaagtttctaatacagtcagaccatggctgcaaaaaaaaaaaaaaaaaaaaaaatgctaaccatattacatccttaatgacaatgtacctttcccactaggggttcgtggtagtaaagaaaaaggtccccgtgtacctacctagaacttccatgaatggcaatgcttggcacgcccccaagcagccttgagattgattgcctgagccaggcttatgaattaggcatgcagctttgtggcatgaaagatgctcatttccattttcccctgcaggtgcggactgccaatggttagacactctgcgcatgcggcagattgcatcccacacttctctacagcgttcccaaagcaaccctatcttggggtctcctttcttcccttactttgccaaccaggattcctatgctgctgcggtgaggaggacccagactccggtgaagtaccagcagattacaccaagcatcaacccttcccggagctcctcccccacgcagtatgggctgtccagaaacttctcctccctgaacctcagctccagggacagcggcttctccagcctcaatgacagctcctccgagaggggccgctactcagaccgaagcagaaacaagtactaccgtggtagtgtgtccctcaattcttccccgaaaggaagatatggtgggaaaagtcagcattccacaccttcaagagaaagatattctggaaagttctacaggctgccccagtcagcgctgaacactcatcagtcccctgacttcaagaggagcccaaatgaccatgaccgccgtgtgcccaggaccatacccgggatgcctctgcaccctgagactgcctccaaagcaggggaagaggagagcagggtgagcgaagggggctggactaaagtggaatatcggaagaagacacacaggcaactttcggccaagactagcaaggagagaacccgtggcaactaccgtgggcggcggaatttttgagggattgggtcagatgcgcttttccaagcgggttagtagtgctttgtgcaatggatttttggtaataaggtatcttgaggttatagggaccaaaaaaagactagttctgggcttgggaaacaccttttaactgaaaggacaaccaaagcagggcctcaattatggctgttagtcagtcaactagaggtggcaattaaacttgacaataactgccaatgttttgtcccctgaattactattgaggtggggagggctatgacattgcctgctgggaacattcgagcaggcttggggccaggataaagctagtgagaaccacagaaaaatcatatttctggacaaaacaggattcatcttatcttctctttcatctaagttccaagatggctctgcaaagcactgtggacgattcttgagttaaaatttgttttttgattttggggttttgtttttttttttttaacctactgggataaaatatcatttatcttgattgctgagggatttttttaaaatgcctccctaaatgttgtgcccaaggcaagtgcctcactcatctccactgtgttagtatttattttagtgagatatttgtgttttctgccatggtcagtattgaactgatttggcttgtcatttttaggtaataaaaaaaaagattattgaagtt

SEQ ID NO: 44 - DNA, 3325 bp, Mus musculus
tccctgctgggcaccgagccgggcgtgcccggaggctggccggccggcggttccacgctcggaggtaggtggtgctgttgccgcgacgtcttcctcattggcgccgcgcggagaggcggaatgttcaactcctgactccggcggaagcgtgggagccgcgcgggccgccgtccccgacccccgccgccgctcgcgcccgatccgggagccagattttgtggacgtttactactttgtcattatgagatgtcgtctctcggagcctcctttgtgcaaattaagttcgacgacttgcagttttttgaaaactgcggtggaggaagttttgggagtgtgtatcgagccaaatggatatcacaggacaaggaggtggctgtaaagaagttactcaaaatagagaaagaggcagaaatcctgagcgtcctcagtcacagaaacatcatccagttttatggagtgattctggaacctcccaactatggcatcgtcacagaatatgcttccctgggctccctgtatgattacattaacagcaacaggagtgaagagatggacatggaacacatcatgacctgggccactgacgtagccaaagggatgcattacttacacatggaagctcctgtcaaggtgatccacagagacctcaagtcaagaaacgttgttatcgctgctgacggagtgctgaagatctgtgacttcggtgcctcgcggttccataaccacacaacacacatgtccttggttggaactttcccatggatggctccagaagttatccagagtctccctgtgtctgaaacctgtgacacgtattcctatggtgtggttctctgggagatgctaacaagggaggtcccctttaaaggtttggaaggattacaagtagcttggcttgtagtggaaaaaaacgagagattaaccattccaagcagctgccccagaagctttgctgaactgctacaccagtgttgggaggctgatgccaagaaacggccatcgttcaagcaaatcatttcaatcctggagtctatgtcaaatgacacgaaccttcctgaccagtgtaactcatttttacacaacaaggcggagtggaggtgtgaaattgaggcaacccttgagcgactgaagaaactagagcgagatctcagctttaaagagcaggagctcaaagaacgggagagacgtctcaagatgtgggagcagaagctgacggagcaatccaacaccccgctgctgccttcctttgagattggtgcgtggactgaagacgatgtgtatttttgggttcagcagctcgtcagaaaaggcgagtcttcagtagagatgagtggatacgcaagtttgtttaaggagaacaacatcacaggcaagcggttgctgcttctggaagaggaagatctgaaagacatgggcatcgtctccaagggacacatcattcactttaagtcagctattgagaagctaacccacgattatctgaacctgtttcacttcccaccactgattaaggattcaggaggggaacctgaagaaaatgaggaaaaaatagtgaaccttgaacttgtttttggttttcacttgaagccaggaactggcccacaggattgcaaatggaaaatgtatatggagatggatggggacgaagttgcaatcacgtacataaaagatgtgactttcaacacgagcctccctgatgcagagattttaaagatgacaaagccaccatttgtaatggagaagtggatcgtgggaatagcggaggatcagactgtggagtgcacggtcacctatgagaatgatgtcagaacaccaaaactcactaagcacgtgcactccatacagtgggacagaacgaagcctcaggatgaggtgaaggcggtccagcttgccattcagactctgttctccagctcagagggcaaccctggcagcagatccgactccagtgcggactgccaatggttagacactctgcgcatgcggcagattgcatcccacacttctctacagcgttcccaaagcaaccctatcttggggtctcctttcttcccttactttgccaaccaggattcctatgctgctgcggtgaggaggacccagactccggtgaagtaccagcagattacaccaagcatcaacccttcccggagctcctcccccacgcagtatgggctgtccagaaacttctcctccctgaacctcagctccagggacagcggcttctccagcctcaatgacagctcctccgagaggggccgctactcagaccgaagcagaaacaagtactaccgtggtagtgtgtccctcaattcttccccgaaaggaagatatggtgggaaaagtcagcattccacaccttcaagagaaagatattctggaaagttctacaggctgccccagtcagcgctgaacactcatcagtcccctgacttcaagaggagcccaaatgaccatgaccgccgtgtgcccaggaccatacccgggatgcctctgcaccctgagactgcctccaaagcaggggaagaggagagcagggtgagcgaagggggctggactaaagtggaatatcggaagaagacacacaggcaactttcggccaagactagcaaggagagaacccgtggcaactaccgtgggcggcggaatttttgagggattgggtcagatgcgcttttccaagcgggttagtagtgctttgtgcaatggatttttggtaataaggtatcttgaggttatagggaccaaaaaaagactagttctgggcttgggaaacaccttttaactgaaaggacaaccaaagcagggcctcaattatggctgttagtcagtcaactagaggtggcaattaaacttgacaataactgccaatgttttgtcccctgaattactattgaggtggggagggctatgacattgcctgctgggaacattcgagcaggcttggggccaggataaagctagtgagaaccacagaaaaatcatatttctggacaaaacaggattcatcttatcttctctttcatctaagttccaagatggctctgcaaagcactgtggacgattcttgagttaaaatttgttttttgattttggggttttgtttttttttttttaacctactgggataaaatatcatttatcttgattgctgagggatttttttaaaatgcctccctaaatgttgtgcccaaggcaagtgcctcactcatctccactgtgttagtatttattttagtgagatatttgtgttttctgccatggtcagtattgaactgatttggcttgtcatttttaggtaataaaaaaaaagattattgaagtt

SEQ ID NO: 45 - protein, 794 aa, Mus musculus
MSSLGASFVQIKFDDLQFFENCGGGSFGSVYRAKWISQDKEVAVKKLLKIEKEAEILSVLSHRNIIQFYGVIPPNYGIVTEYASLGSLYDYINSNRSEEMDMEHIMTWATDVAKGMHYLHMEAPVKVIHRDLKSRNVVIAADGVLKICDFGASRFHNHTTHMSLVGTFPWMAPEVIQSLPVSETCDTYSYGVVLWEMLTREVPFKGLEGLQVAWLVVEKNERLTIPSSCPRSFAELLHQCWEADAKKRPSFKQIISISMSNDTNLPDQCNSFLHNKAEWRCEIEATLERLKKLERDLSFKEQELKERERRLKMWEQKLTEQSNTPLLPSFEIGAWTEDDVYFWVQQLVRKGESSVEMSGYASLFKENNITGKRLLLLEEEDLKDMGIVSKGHIIHFKSAIEKLTHDYLNLFHFPPLIKDSGGEPEENEEKIVNLELVFGFHLKPGTGPQDCKWKMYMEMDGDEVAITYIKDVTFNTSLPDAEILKMTKPPFVMEKWIVGIAEDQTVECTVTYENDVRTPKLTKHVHSIQWDRTKPQDEVKAVQLAIQTLFSSSEGNPGSRSDSSADCQWLDTLRMRQIASHTSLQRSQSNPILGSPFFPYFANQDSYAAAVRRTQTPVKYQQITPSINPSRSSSPTQYGLSRNFSSLNLSSRDSGFSSLNDSSSGRYSDRSRNKYYRGSVSLNSSPKGRYGGKSQHSTPSRERYSGKFYRLPQSALNTHQSPDFKRSPNDHDRRVPRTIPGMPLHPETASKAGEEESRVSEGGWTKVEYRKKTQLSAKTSKERTRGNYRGRRNF

SEQ ID NO: 46 - DNA, 212178 bp, Homo sapiens
ttatttgcttttaaaacttatgaaatacttttacataaattacctcatttgaacttgacaacaacactttgagatggatcggaaagctataagggacaattcacagcaggggaagctgagtttgagaggttaaattcatttctcaagatggaaaagaaaagatcaccatggggtcatatccagagaacactagagaaaaaaaggaagaaagattgaaagaaaagaaaatatttcctggaaatattacatagaaatgtgaagactaatctcacacataattatttggaactgttatatgcgaacataagaatcgcaacaagtggcatgtgggaaggctcatcctattgagaatgtaaactggcactacagaagttttgataaggaggagggtgtgtgacccaggcaaaaaaaggcttaataaacctcattctctgatttgaaggtgacatgtctaattctattgtaaaagcaatgtcaccccagagtctgtagaagtcagggagtcagtgagcagatgtatttaaatatgtatatccaagccaggctcagtggctcacgcctgtaatcccaacactttgggaggctgaggcaggagcattgcttgaacccaggagttcgagaccagccggggcaacatggcaagaccccgtccctataaataatttaagaattagctgggtgtggtggtgcatgcctgtggtcctagctattcagatggctgcagcaggaggatcacttgaacccagaaggtcaaggctatagtgagtggtgtttgtgcctgtgccactgcactccagcctaggcaacagagcaagtccctgactcaaaaaataattatatatatatatatatatatatatatatatatatatatatatatatataatgcatgcacacacatccctattttatatatgtaaatatataaaatatcaaatatattttatataagtatataaaacatatatcaattgtatgtattacctttacttgtttataaaaaagatctagaatctatttctttttagaacattgatactatgcataggaaaataaaatgttatggttataaaataaattttttaatgtacggcatttcttaaatcagtggaagaatatccactgaggaaaaaagtcttaatttcctttgataaatagctgtggattagagtactacaacaatagttccaactctgctattgctgtgcacttgaagccaagatgatgactgtattgaaagagagggatgagaaaatcaatagattatggcttcaatggagctcacaacagtgctgattagagaacacaaatggattgcataacagtaaaataactataaactgggtatggatttaagcctatgttaagaccattcttaactgcattgtgtctttagaaaacatgcattgaaattataacagcaaattaaatctattcgaccgcaaaatttaatacataagaaatagcatttattaatgatctggaagaaggagtaaatagcatgttaatgaaatttgcagatgctgctaaattggaaggtgttacaaacaacaacgcagacaggggcttaatacaattggaccttgaaaagttaaggaagaaccaacagtgacaaaaaaaagaaacgaaaaaagaaagaaggttgaatttataaaaatagcagttagagaaatttcaacacgagaaagaataatacaaaagaagtgtggccagaaaagtgactttgaaatttgaccaggattttctgattataacaagttgttaaatccacatctgggaggtcctagcccagatcctgggaagcagtagtcattcccttacttcccactcttcctccaggcagtccagaggaagtatgttgcttagttgtagacttttggtagcaagagaaatgaagaaaacacagatcaggcatatcagttaaaaatgcatatagaaaagaaagggattactatgggaggcagatgattatgtattagtatcatctaatcaggtatataatgaaaaagaccatgagaaatctacagatatctgaaaattttatataaaagatggttatgtcacttgaatatttatgagtgatgattaaatggatctaataattaccttatgaaatataattattgcttttccagaaatcaacagatagaagagttctcctgccctattgcacatgcctaaattaaagaaattggtggtatagctgaatgacgtatggggttatagttgggtttctcagaatttccagaagtttgggtctgagaatttggtttatccaggaaaacagcaagatgtgtctaggggaagctctgaggactgtaagaaagtagaaacgtatctgtaatgtttaccagctcacctgcgatatagccacctggggatgaaagttcatccctgcttattggatcttttaaagtagaagcctcaattttagaaacttgactaggtttataaaactttatttttatgtagttatattatgtatgcttttctttagatttcagtaatgtttttttgaatacaggctgccaccccggcacttgggatggaagcagtgtattcttggttgccaggtgtgacaatgagcatgagaactggtgtaggcaggttccaaggtgtaggggaagatgttgggaggggacaatggtggaagaattggagctgggcccatgcacggactttttccacctgggtattctccttcttgaacacttgtgtagtgtttgaggatttgtatataggaagatattctttatagagatctgagactattcttgaaccattaattatgataaagtagtgagaaaacatgcacttaaaaccttaaacctcttgtatcatcttatctaaacgggtatcagccctttgcttctatgctatttagttagtaaattttgttttaataagttagaccaaaaactaaaatctttcagaaaaacattacttgatggcatgtgctaagacatggaatacatgcaattgcctctgatgtgtacaaaggtcttacgatacatattataaaatatgccactttttttccaatttttagcaatggctggcccctttgagaaataattgtagagactgaccaggtgcttcttatagcccatttctttatcaaaaacatctaaaagtatatttcccttgaaacacagtacaataaaaacaatatgggctatagactcagatagatcaaggcgtatctatatcctgactttaccacatattagctatgtgatattcagcaaattacttagcgtctctgagtctgcagttcttcttttatagattaaataaataattaagtgatgtatttgcataacttctgataaaatgcttaacacagaatcagtgttcatgtggcgttagtttccatacttctctacaaataaactccctgacatagttaaaagtagtttcttgaatcataattcaattaggaattcactttcttttattcggtttttcattaaataaatatttactgagtgattgcaagcaatgtttatgtcagttgtggtgggtttgcacagaaataataatatatgtggatcttccctttaaagatcatgaagaaaaggaacaacagcatgtaaataatcataatatggggcaaaacccaaaagataaacaaaagtattctaagattccaagggggaaatgattacttcttttttttgagacagggtcttgctctgtcactcaggctggagtgcagtggcttgatcatggctcattgtagcctcaaccacatgggttcaagcgatcctcccacctcagccacccaagtagttggtactacaggtacctgccaccatgcctggctaatttttaaattttttttgtggaggcgagatctcagtatgccacccaggctcctgagctcaagtgctcctcctgccttggcctcccaagattactccttaacagaggattggaaaaggctttcgagaaagggaacattttacctgggccttgaagacagcagaggtgctagaagaaagtaattagaaggaaagcatggaaattggaaaatgaatggttctatttgtcatgaggcccatgatgatggaagatgtttgggttagataatggaggatttggggttttaactttgggttactaatggaggattctgaatgcaccctaaagagcttggactaacatgttaggcagtaaggcatcaatagaggttttaagcaaagatttttgggttttgataggattcttctacctaatttattagctattccttctaaattcatgttagtccttaattagatatgcaagcttcctgggtcttcatccaagttgttgaaatgttcaacagggcagaataaagaagacagtccagcaacataccattagaaacccttctccaccagagcactgatccattcattagcacttgtggctcagttttcattctaatagaaattcactgtattgtgttgtcatcagttaaaatttccttctgatttctaaagccatcctgagaaactttgtcaaatgtttcactgaaatcagatccacactgacctcctctgataccagtagcaaaaactagacatatcttgatttcagtgaacccatgctgggattcagtgaatcccagtgttcatattcaaagtcgttaccagcccttcacttaataataccacttcataataagtaactccaggattctgtcagaaaattacatcaattgttacatctttgggaagaggtatatgagtttcttgcaataaagtagagttaagagtgagtagaaagaatagcaagactcggccaggtgcaatggctcacgcctgtaatcccagcactttgagaggctgaggcgggtggatcatgaggtaaggagtttgagaccagcctgactaacatggtgaaacctcgtctctactaaaattacaaaaattagccaggcgtggtggcttgcacttgtgatccccactactcaggaggctgaggcaggagaatcgcttgaacccaggaggcggaggttgcagtgagccaagatcatgccactgcacttcagcctgggtgacagagtgagactctgtctcaaaaaaaaagaatagaaggctcaatgctgaatggatgtgacaaactcagttatgattcagtcaaagtttagatatagcattttaaagaaaagtagcatggcaaacaatagtaaagaatgagcagtgactaggactcaagactcagatatgtaggactttatcatcccacatgaccatcaggtagtatggtcccgaggaggggacagttgtttaaggacagggctggcaccacatcccagattttctgccatttagcaaagtgctctcttccctgcttgatgcagctgccctgttacgctgcgtcttgaagcagagaacaaggcaaccaactcccttcagactctaaaatatcagttctcaaaatgcagcctggggaccctttggggggtttgcaaggtcagaactcttcataaaaatattgacactctctcatgagtgtacagtggaatttcccagaggatatatgtagtatgatattggaatagattaaattcagaagcagatattagaatccaacttttgtctactaagctaaacgttaaagagatttgcaaaaatgtaaaacaatggtattctttcagtttttaaaaatctggggcaatggttatttttcactaaaatgttatttatgttaacatagataggcttattggcttattatttttaaatggattaatttctaattttttttttttttgagacggagtcttgccctgtagcccaggctggcgtgcagtggcaccatctcagttcattgcaacctctgcctcccaagtcctgcttcaagcaattctcctgcttcagcctcccgagtagctgggattacaggcacctgccaccaggcccagctaatttttgtatttttagtagagacggggtttcaccatgttggccaggctggtctcgaactcctgaccttgtgatcaacctgcctcagcctcccaaagtgctgagattacagccgtgagccgccgtgcccagctttaatttctaatataataaatttgatagatatgactcacttaaaagctatttggcatcctcaatgacttttttagagtgtaacggagtcctgagaccaaaaagtttgagaactgcttgatttgaaaaaacaagcctaaagtctaccttttgctccctgagggaaggcaagttgcccaacttttccaagactttttctggccccatagcatgggatgatgacttaaaactacctgctagggttattgtgaagactaaatgggaagacgtctgtgtaaaactcttaattcagtgcatggcgtatgactgttcagtaaatattaaccatctattattattattgcttctgctattactgttaccactactatgagggctattactccctgctggtgatgtctttactcagatacatgaagaacttattctttgaacttgctaaatgctctcaggccattgcacttgtttcctttgcctggaatatctttccctcctttttgtccagcaaatcctcttcatttcttcttgtattaacttcgagcttctttgatttagaagccttcattgacctctcaaaactatgctaggtaccctgctgtaagccccaatctttgcccctttaagagcataccatagtgtaattgctcgtgtctttgctggctcttccattgcactccgaaaactctgtgagagaggggaccatgcttgttcactgctataatcataaagctctgcacagtgcctggcagtcagtaaatgcctgttgaatacattttgtaaaagtcttcaatatgtcttcttgccacaccgctcctttcatgtcccagggtgcctaaataagctcgatatcctgcatattcctgtaaatctctttgatcctcaagttagatgtaaacactaaactcaaacaatgatctgggcttcatttatgattttaaggcaatggttaaatgacttaaaggatgtttgattatataccttaatttcccagggattcagagttgtacaggaggtaaagccttggtctttgcataaaagttgggtaattcttagctatgatccaggcatagactattcacaagttaagatggaaaactaagacggctagagaaaatgcccctgggtgccagcttgtgccataactcttaccactataagaggaggggaggataaagactgctttcttccttttaagttgccattccttctgccattcgtagaatttatgtctgcacttttctcatccactgatagctagtggcagtttcagaatatctatttgaagaggggcttagaagaaacagtcccattgaatagggggataggaaagtttttccttaagctatatttatatttttcaacttagattgcatgtttattttggagaatgttcttggatataagagggtgctaaggacttccaagccacctcactgctaagagtacatctatttttagtgtggaaacatttgaagtaaaggaataggcaggtttgataagagaagtttgactaggtctcttttgttattgcttttcacacgggtaaacctaaactctgcctggtgagcattaaccaattcaaaaaagatttgaaagttcaaaaaagcagtcggtgttgagaatacatactagaccatatttattaggtctggggcctaaaaagatcagtataatcaataggaaacaggcagcttgacaaaagaaaaaccaaacttgaggcaatcagtttatcatacaatcattatatatttatttcagctatggacaatacatatgcagataccacacaatataagatgtgacctcaaagggcttgcaacctatttgggaagacaagaaaatgtctactagattatcatttaagcatgtttctgaaactaatctttagtgttcattgttcctgctggttattctcttggcctaattatgtgaggaaaacagaatgaaggcaaagggatgggaagcaagggcaatgtggctaaaaatattgatgctcttaagccatgtgttccaaatttaaagcaatacattcatggttttaaagctggaacctgcaactaacttctaattagtccctcttattttacagaggaggaaactgtggcctatcctgcaaagcactctagctgataactggtagctctaagaccagaagtcaggttctctgactctcagtctagggtcctttccaaaacaaacaagtgcctctgaaggtaaggtaaaatgactggagtcttcctatgcctggggtctatgctaaagagccttagtttttccttgaatggataggatggaattatttgaattattttattagacctgcattatacatttttttagcatggcaattttcatcaattctaatttctcagttaccaaaataaaatttattaatgctaaaatctccagtccttatcaaagggcaaattaatcagactaataaattgttttttaacctctactcattcatccctcaactttcatatctttaacctattgaatgacttacaaattttctatttcactcttgacctctttcctgaatttcagtttcatatttcagttgctgcatctctacctgtttttactcctatgacctcaaactcaacatgaagccagcttccctttcacgtattcctatttttgtcaatgacaccatcattcttccagtcatccaggtctgagatcttggcatcatctctcttcttcttctcttctaaatcttgtgggttaccaatttctgtggcctcttgctgaaacgtttaatatttctctcaattccatttcttctttttttttttttttttttttttgagacagagtctcactttcatccaggctggagtgcagtggcgcgactgtggttcactttagcctcgacttccccagctcaagcgattctcccacctcagcctcccgagtagctgggactatagatgtatgccaccacatcaggctaattttctgatttttttggagatgaggtctcactgtgttacccagccaggtctcaagcaatcctctcagcttggcctcccaaagtgctgggattacaggtaccatgcccagcccatttcttctttttaattccatttcctacatcctaactcaggtcctcatgatcccacaaccgggtggtgacaatatctaccactcatcctggttccatcctagcaacccaacctacaactactgtggactactctctcaaaattaccatttaaacagaatcacaaacccccatttcacccctttgattctaatttttcacagctcccagtgtccatggataataaaattcaaattcaaaatcctgaataatgttgcccatgcccttgcaacctcctctcacttttccttcacagaaccatcctccccaatcagaaatttcttttcttcccaacgcccacctccacctttggcttaggcctgtaacggactctggctcctcttctgaattctgctctgttaaaattagcaactagagcagcagaccacggcccctcctcaaaattccagaggtacctactgatctttctagagaggcagccttcagacctatgttcccagaaatctctacgtttgtgcctttcccaactagagaattaactcttgcggggcacaaaacagcctctatttctttgcgtccccagcgcctgtttgttgaagactgagttgaaggagtagcaggtggtgttaatttgtcaaaaagatgagttaaggtgctgggggcgagggggaacacccccacggccctccccccacagcaaggcaggtgtgtctgggggcctcggcgggtgccggggcgcggggcggatggtgccccccgggcgcaggccagggaggcccgagcgccttccccacgccccgctcgcccgcgcgtgtgaggggagggcggcccagccgtttcgcgccgggaggtaggtggtgctgttgccgtgactgtcttcctcattggcgccgtgcagagaggcggaatgttcaactcctaactgcagcggaaacgtgggagccgcgcgggccgctgtcgtcccaacccccgccgccctcgtcgcgcgcggggcctccgcgcccccggctgctgctcacgccccgcccgggagccaggtaggggtcaggctggagcccgcggagggcggggagggagggggcgaggcccgccgcgctcgcgagtcgtccctgcgtctcggggccgaggctccgccggagcccgggagtctaggcggcctcgggaggctcctcggggctcccctccccgacccagggcccgcccggcggcggcggccggagcgagcgggcgggcgagcgagcgagcgttcgcggcgcccgggaagtcctcgcgggaccttggccgcggcgccgccaagtgcggttcgggagagttcgggccggtcccatggagaagttggcgcctggaggcgcgggcgcaggccggagcggccccggctttcgcggtcccgggcgtgcggcacgggcaggggctccgcgagcagcagagccggccaagcagcgggtgactggggcactgtcgggaggcgaaccgcgaggcccccaaatcagggtagggtgcaggccacttcccagcactcgctgtgcgtgcgaggagggacgacgaacttctgcttttctaagaactcgaccgcgagcggtgttgcttcccatccattttccttcattctgttttcctcacacaattaggccatgcgaataaccagcaggaacaatgaacactaaagattagttttaaaaacatgcgtaaatgtatccagagccaccgctccccgcccttcctgccccgggcttgggcagcatgaagcgcccgccctctcgggcttccccctttcctcccaccggagccggggatgtctcctttggcgaccctcaggcagcggctttttgtgggctcccagacctgcaccaggcccagaagtgcttacccaggccgtcgcctcgtctggcctcgcttgcccatgacagctttcagaaaactttaattcaggactggctagatgacatccgattgcctaaaaaatttttttaaaaagttatctctgttagatcgctgaaaatgttatgtttctgatgcgctttgagatcgcgcataagtactgtttatggggaacttaattactatttttgttagtttctgtaataatgaaagcaacacaatttaggggcccattccaagtatggtacagtaagcagctctcgatactggtgtgtgagaatcgtcttacagagtgaatttgaggatgtttgacttaagattgttgaaaactgtactccttctttaaccccgaagctgttttggaagagccttcttgcttcctcgaccttcgttgaaatgaacagctaggatttagtggatccaaacctccaaacacgtttaaagacaaaaataaacaagtgattcaaggctagttaatgtcctctttgtagtaggcctatctccacagtgaaatttcacttgtttttcaattttccaaaaaaaaaaaaaaaaaaaagtgatggctgcattttaattatggttatggtcatttgtagagtctttgttttaaattcctgctactatagtgagagatttaggagattgtaaatgaatacgaatttagtttgggaaaacagaattaagataaagaaaaatggtcttttggaccactgcactgtttattttaatctatcacaatttaattcctactataactttttgagattatttggggagttttttaactacaaaatattgtttaaataaaaaaatttagtgataataattccagagtaaatgaccatgatgcaattgcaaggactttctccgttgtctaaaaaagcaaatagatgattgatccgtttttcttaatcttttagggaatatataaggacacagtaaagagagaaaaaaaaatccaaatattaaacactcggacttggatctaaaaatggatggtcaaagatcttgggaactaaggggccttcttgccaaataaggaaacttggcaagttgcactgtgtattttaacttagcacaagagtgagtgttattggcaatatattggctcagagcctatctggaatgagcagtgaaactgactttgatagggctacaaaattataaataggtttgtgggggcgtggagtgaataatcgaatcatcagagaaaacactgaaaacttttcatgaaaataagtcagatgtaaggtgaagctattagtgtggagtgacagagcaaaatggacagtttattttagaaagtggtagattcagaagagaggagagaatcaatggtttttttgtttttgttttgtttttgtttttgtttaaactggaaaaagatgtttgtggggatataatacttcttggaataagatagccctatgtctgtatcctgagatgttggaaataaaaatgaatttagatcacttgttttccattttattctacccaggacagattgacagggtgagtatcttgtctatctaaatgtagtaggaacagttaaggcaccttttggtcttactgcaaggaagatttaggctagttttttggtagctattaactttgccccactagacacaaataagcagagttccagctgtgaccagaaaattgtacctggtaagggaagaggactatgaatgctagagcttagattgattcgactgatacatgggtgcttttatgtcagaccctcctacggatgctgaagcatcgtcctaatagctgttaagtaatcccagcacagtagaagaatctgtgagaacaaagcagccccacatttgacaccctaaccccagtgtcttcaattgtaataggaaattaaagcctcaaattgaactttaggtggatggtgagcaatccagtaattactgtaataagaaaatagtttaaatagggtaaacaaaaggcaaattagaaggaggaggcagaatgttattaacaaaaagacatgatatggtagaaaacaatgatatgactttggagtcaggcctgaatttgacacaagttgtgtcacctgtaaggtagttggcttgagctactttcatacccctgatcctcagttttctcactcatgtaagttaggaacagtagtacctgcttcctaaggataagtacagtcatgtgtccattaatgatggggatacgttctgagagaactgtgttgttacgtgatgttgtagttgtgtaaataccacagcgtgcacctacacaaacctagatgctatagcctactacacacctaggctgtgtgagatagtccgttgctcctaggctacagacctatgtagcatgctgctatactgaataggcagttgtaacacagtaataagtatttctatcgaaaaatagaaaaggcacagtaaaaatacagtataaaatatacagtatcaaagataaaaaatggtacacccgtatagggcatttaccatgaatggaggttgcaggactggaagttgtttggggcaagtcagtgagtgagtggtgagggaatgtgaaggcccaggacatcactgtacactactgtagactttataaacactgtacacttaggctctactagatttatttaaacatttttcttcaataataaattaaccttagcttgctgtaactttcttgttttataaactttaaacttttttttaactttttgagtcttttgaaataacacttagcttaaaacacaaacacattgtacagctatacaaaaattctttatatccttattctgtaagattttttttctatttttaaatttaaaaaaaaatttgttttgcttcttaaactttgttaaaaactaagacagaaacacacacatcagcctagccccacatggggttaggatcgtcaatatcactgttttctacctccacatcttggctcactggaaggtcttcaggggcagtaatgtatatggagctgccatctccccatctccagtgataacaatgccttcttctggacacctcctgaaggacctgcctcagttaattttcttttttttttttttaagtggaaagagtatgctctaaaatgaggataaaaagtatagtaaatacataaatgagtaacacagtcattatccttatcaagcattgtgcactgtacataattgtatgtgccgtacctttatacagctggcagcataataagtttgtttacaccagcatcaccacaaacacatgagtaatgcattgtgctatgatgttaggaaactgtgccatcactcagcaataggaatttttcagctttattacaatcttatgggatcgctgttatatatgcagtccattgttgactaaagcatagttatgtggtgcatgactttatgagaaagcacatagaaatgcttgtaacagtgcctgaaatttcagccactgtatcaatgtggtaaagaaggatgttttactacatctctcaagttatacgcagagctgcttgcccactgtcctagtctgttttctgctgctagagcagtctgtcacagcctgggtaatttacaaggaacaagggtaatttatttggctcatggttctggagcctgggaagtccaggtacatggctctggcatctggcgagaatcacccattgtggaagggtggaaggcgaaagcaagccatgaaagacaaagagaaaaagtgaactcctgagataattaacctactcccaggataacagtgagaatccatttatgacctaatcacctcttaaaggttctgcttcccagtactgttacattagcgattaagtaattaagtttcaacatgaattttggtgggagcattcctaccatagcactcagctcttccagctaaggcttgcctttggtaccctgtcctgttcccaagttatacttatgtagtgggtatgtaggttttcataactactctcctgctttgagtataagtgtttctaaagtgtgctttagaaccacttggaaccatttttatagctaattttgagcaaggccccaatacccttctttctggactcatctccaggcttccatttaagaaaaccaaaaagaaaaggaaagaattgctgtctgcacgtcatgtaataaatctttacttattaaacttttctaccaaagtactctattgtggggataaatgaatgttttccttcaagaatttgtccgtatagccacagataccccaatgcaagcaagtacttgctttaaaattttatatttaatcttaaaaatttatgtggattttgcattctcttctgtcctacactgttttacttaaattgaacaaatcgatacagacacatattttaaaaaagacaaattttttttttttttttttttagaaacagagtcttgctatgttgtccaggctggccttgaactcctgtgctctagcaatcctcccacctgaactttccctgtagctggggctgagggtatgtgctaccttgcctggcttattccccatagtgttaaagtgaaattgatgctgtaggacagctgtttattcatatcaccttctgcacagtactgtgtaataccacgtatgggaataagcacacgaggaacatgggattggtcctaataaagagtcctgcaccattaagctctgcagcccaatactgcatggggtagtgcaattccattttgctgataaaagaataggggtagatcatcatccaaagagttttgatgttaggtggttatacgatggctttcaagacaaagagatctctttgctttgggaattggggggaaggaagaggaaagttttaggatagaaacctggaatgtggctcttagcttctcacccagtttgggaggagaaattgaagaagatggccaaatcgtttcctttatttccatcactgatgtggttcactgtgcttctccatgatgtttggtgtcgggttcatgactgcttccctcagaaaaggagggagaccgtctatactttatagtagattagtcatcaactcaacagggttggagtgggtcttaaagtggtttcattctgccctcttagctgatgcaagagtctcccactcccactctacaccgcatatcccattgaacgctcttggtgatgggtcactcactactaaagagggtggcagattttcttgttggccaactctaaaccaggaatcctttgttttttttttggagacaggttctcactttgtgcagtggcataatcatagcttatggcaaccttgaactcttgggcccaagctatcctcccacctcagtctcttgagtagcagggactacaggcatgaaccaccacacctggctaatttttatttattcattttttgtacagatgggatctcactatgctgcccaagttggtcttaaatgcctgacctcaagcgatactcccactttggcctcccaaagaaccagaaattctttctgtaactttcatccacagatagccttgcctcttgatcatcaaaacataatataaggtcttagtcttccctagttttaccatccccattcctttcacccttcatcttacattgaggttaccatgttttaactcttgcattcacccttctcagggagtattcattccaggcactcagtccaaagttgtacctgtctgtcagcagccaggatggtctgatactttctatttgacagaaaacgatttggggtacaaacaagggctgagtagcagcaagacctagggtgggggcaggataggtgggaggtagcgaactgaagtgagccttgtttactcataggctacggctttctcctcatccccagtcctgacacctgtgaattcctcttctggccaagccctagaaatctcccctctccgtgcaccctcactttattcaactctggccccattctcttcctcatgctgcaagaagctcccagctactcaacacaacaagcccacgcagcggcctatgccgtggccgtaggttgtatccacttcatgtttccttgttgggcttctgtttgagcacagacatgtttccacgcagcatttctgtggcgttaagtgctcccaccaactacattcctgtgcctcccatcttttacttctggtaacaatacttttggtaaggaagtgtgttgtggaagttgacttttattaaattactttaattatttcaataagaatgcctcactactaaattactttaatatttcaataagaatgtttagcttatttttattcttaccattgctctaactagagagttacattacttttatatggtaaagatagaggaagggggaaaacatgaaacaatggctattctgttttttggattcttatttaaagttgggttctctcagatatctatgcctgaagtcctatttactgaacccaacctactctgtataagatacactatttttctaggagcagccttggaggaagaaaggaaatatctggtagatacagtacaagttggttctgttcctatacctagtcttgcaacttttatttttttattttttattttttttttttgagacagagtctcactgtcacccaggctggagtgcagtggcgtaatcatagctcactgcagcctcgacctcctgggctcaagcgatcctcctgcctcagccttgcagagtgctgggattacaggtgtgagccactgtacccagccagcttttatcttttttagtgattaaaaaaaaatagtagaacagcagtcctgttgaggaatagaatctttgaatctttgaccttggtgttacggacaaatacactgaaccagagctttcctcatttttttgaagataagactcaggggaaaaaaattgcagaacagtgattccaagtggtgttctttttatacacatgatgacaaagcacatattattaatttattcactgatctatgttaaagaggctgaaataatactagcataaatatcaaggcagcaagtttggcaaaataatttgctgaatattgaaagctcttttcaaaaagtatcttttttgtcacatccaggtcatgataaaacgtgtaagtttttcttcctatattgtataaaaagtaaactggcaaccttactttttgaagaagggggaaaggaaagtatgaattagggacaggaaaagaggaaggctctaaattcagaaatataggcccatataaaaccacaagatagaaacatccagagaaagttcaaagaccttttttctagtaaagttaatcctttcataaagtaggtttttatttttacttttagaaatgagatctccctatgttgccccagctgagctcaagtgatcctccaacctctgcttcccaaaatgctgggattgcaggtgtgagccactgtgcccggccaaagtagatttaattttttttaaaaaatcatcacttgcaggtattggataatcaggttaagttttcttgggttagacgtgcaattgactgtgcagcagataatgtctgaaagaagaccgtggtcactggggaaggaggggatgctccagcaccctaccaaagtgagtgctatcattgaataaatagatcttagcaatgctaatgtccaaaaagtgcaaaaaaaaaaaaagaaaagtattgtgttttagcaatttaaatacattatgaaaaaagcttaaaagaaattataattacttactaataagatctttcagaaatgacaaaaaccaaaaacggcagttaaacagaggaatgagaaagaattagaaaataggcaaagagagggaaaggattcagggatcaatagcacctttatttgttaataattgctctacaaaactaagagatataatataaaacaattctgaaaatggggagaggaaagctattgagagcatacctgaccataaaaactgaaggaatagatggctaaatatgatatcaagggttattaaaataatgagaaaaccataatttccattaattgcatgtataccatatactaggcactgtgctcacgtatgcactttcacagcactggtattattgccagtgagaacagtgaggtcagagagacacagtgccttgcccaagtagctaataacagatctgctcatagatctctctagtaggggtctttaccctgaatcatgctacttccctgttgaaatatctcttatttggaagtgagatgtatcaatgaagtcaaatactatgcaaacttgataactttggggctatcagttttgtgacattgaatggaaaagatttgaaattttttatttatgcatctggaaatgccacagtctgagaaaaagtgatttgttaaagttaccgagaggtggagggagagttcaaactcctatcaatctaattctaaaaccttgctttttaacattagaactgtagtggggtcatttttgtttttaatttggggcaaaagtaacagtgaaaaggtaaatgacttatttgaggtcaacatggatctgaaaaatcaagaagcaaaatagaaggtctgtgaatagagaaacttaagtctatttttttggactagaagattgaaaactttaaaaagtaaaataattctttaagatttcctaccttcttatgtttccacttttcataattaggtgatgctgctatatatgctttcagcaatttggttaatagttaaatgtttttgaattttaatttaaggaaaactttaaattaaaaattttttgacattctactcaagtagtgaaatgattggattcaaccaccaaattattgattttcaacatttacagagttgtgatgccttattttactttgatttttgtgacatttctgctctaacttacccttcagtattgtatggtagatacttaacatttaaaacagctttgagagtttataaaacaacagttagaatcctacaaaactaaaactgagcattgttgcgtggagcaaaattgccttttttgtgtaaaagcaatttttttttttttttttttttttttttttgagatagagccttgctctgttgtccaggctggagtgcagtggtgcgatcttggctcacagtaacctctgcctctacggttcgagcaattctcctgcctcaacctcccaggtagctgtgattacagatgcacgccaccatgcctggctaatttttgcatttttagtagagatggggttttgccatgttgaccaggctggtctcgaactcctgacctcaagtgatccacccatctcggcttcccaaagtgctgggactataggcgtgagccaccgtgcctggccaaaacaattcttttaatgcagtgagatgaaaacgttggatttgatttgatataccatgtaaataaatttatatagatgactttttattaaattctggtatattcattaagtggagaatacatttgaaaaattagaacataatttaatcaagtagcagtcttccccaacacgctttaaatataaataactagcactcagatttttcattcttctcgtcataaattgatccccttagaaaaatgattcttaaaggagagaaaactcaaggggaaaaaatatatatatggtttaactttcatgtatatgggagtggaaatctcaaccaagtttttcagctacatccatgatgctttgccaagctcactggagttaaacctgtactcacataccctagattactagtttattcggtattcagatggaacttaattttttatggtttcaataaaacattcaagtaattggatagttccattcacaactagccagttcccaaaatggcatggtgtatcacaaaatagcagtgattctgtgaagaacctggctagttgcctcctgtcaagtggtgaaatcctggagaagtgtgcttctcaaaggtcagcctttttctggcacccttaggtcagtgtcagttgtgactgatcctgtctcagttcatccacattccctgggcttgttctgcagcataaggcttacatgaattcatactgatctcatcctgcttcagacctctgcctttgttttggaaaggatttctctactcctccttcttccctgaccctgggattcagagggacccagtactgaaagtcccaaatacactctccgaagaagcctaggcagcagtttccaaatcaggatttgcttcagaaccctccggggcacttgtaaaaattacacaccttaagttttacatgacttggttgaaacctttccagctacaaaaggtataatggaagaataaccagaagctatttactcacttattcaacaaatgcttttttaatggaaaagctgcctaactgtgtacttggctgtgtagtaggtgctgaggatccagatgtaaacagaactgagttttgactttagggaatttatagtctggtgggaattaagtgggaaagataaatgggtaaagaaaggtgctgtggcacatgagagggagaattcagctgtgctcaggagactcaaagaggtggtcagggataggagtttgctgtgcagagaaaagtatttgaagcagagacactagcctgtgtagaaatgtggagatgtgagaggtcagtgtatattgggaagtgcaggcagttcctcgtgtgtgtatgggaaatgagatgacatgaagtcaaagtggctataagtggtaaatgaataacacaagaaactttcttggaattagaatacatgagttacagatagaaagagttcactgagtgtcctaccaatgaatgaaaaagactcattcctaaacatatcctattaaaattcaggattcctgggatcaatagaggatcctaaaagctttcagagaggaaaaaataatataaaaatggttaataatcagtaacatcagactgctcagtagccacattagaaactaggagaaaatgaagtaatactttcaaaattatatggaaaatcatttcctacctagaattgtatgcccaaccaggctaccaatcaagacattttaagatatacagattctcaaaaaattctattctgtgtgttctattcaggtaactaatgggagatatgtgtgtcatcaaaacaagggagtaaaccaagaaagggaagatgcgaaatccaaagacaaggttctcacagaggaaaaaggtgaaggaaattcttaggatggtagccaacaggagtcccagtccaagtcaggcctagagagcaaccattccagccagactgaatcaggatgaagggcctagaaggagtgtctctaaaaacaatagaaccaaagagtgaaaaaaaagagaaattacttgttttaattttattgagaggagttttgcagctcgtgggagagattaatggggggaatgtgttaggagtgtaaaaagctaagcaaacaacaacaaaaaagcaaaaacagggcaactgataactctaagagaatccaaacgttatccaagaaaggaaatgtaattattgaatcctacatggcactgctgggaataatgtttactttgttggattactgtaaacactgactattgacttaaccaaatgttacagtacggttggaagctgggaggtttgggcaagtatgccatgcttgcatgcatggaggtagagggtgatatatgagaactaaattcttgtcttccacagaagttaatagataatatctaaaatggaaaatcaagaaatagtaatataagcacattctttagaaatacagagttcagtgccagaagaaaatgctaaaggagttgaaattagttgcgtctagagagtgggaattgggtatggggaatggggagacaggaaacttctattttttatgataagctttgtagttcaatttcattttaatgcttttataaaaataattaacaaaaatgtaaacctagtgtctgtaatgctgagggaaccttgcaaatggtgtttgacatttggttgaacaaactttttagcttgcatactctatatacctacccttggcaacattcctgaattttatacaaattttgttcttttccatgtttaactaaataggaattacaaaaaagttggtaacataaactgttgattcacatatgtttatagactatatttggatactatgatctttccctcactcatatttttatgtggagtgtatcttctaaactttagaggatgaacaaataacccttcctctttctcgccttctccccaaagtagagcagcgtttgacttcatgtgagaaatcagcattcttcagtgacctgattttcctgaaatgggatggctagccagctgcatgctaagatctttgagctgcctgtgcacttcactcagcagagccccaggctttttatggagaaatgttgccagtttatatggatacaaaccaaccccttctacctttttatttaaaaaaaaaaaactcacagaagaatggaaagagtagtaaaatgtccagatacctgtcacctagatgtgccagttcttaacgttttggcacacttgctttctctctccctctctctattcctatgtacttttttggatgtgtgtgtcgggggacagggatgaggactgaaccattttaaagtaaattatagacatcatactttaaaatggctacatgcatttcccaagcaatacatccaaggacatccatctataaagcaaaaataccattatttgccatggataaaataatatcatctaatttatagttaatatttagatttctctaatatcccaataatattttctatagatttttttatccagaatccagtgatcataaattatatgtagtcatcgtgtttccctttttttttttgagatggagtctcgctctgttgcccaggctggagtgcagtggcactatctcagctcactgcaacctccacctcctgggttcagggaattctcatgtctcagcctcccaagagctggaattacaggtgtctgccaccacacctggctaatttttgtatgcttagggttttgtcatgttggccaggctggtctcgaactcctgacctcaagagatccacctgcctcggcctcccaaagtactgggattacaggcgtgagccaccacatccagcctagtcattgtgtttaagttttccttatgctagaagtttttctgcaaaaaacaaacaaaaaaaaactttcatgacattcataattacaaggagcctaggccagatgttttgtagaatgtcctagaaatatagatttgtccctcttaaggttttggtttatactttttgcaagaatagtataaaccacataaaatagtacacatgggataaaatagtacacaaacttttttatccactaattttaagcattttatgtaggttcaaaattttaacccaattttagtccagtttttgtgtttgtaagtctcactaatctatggtttggcatacagtgttaacaatggccacttacctggagaatagtaaaactccttagactgtaggaaagatcactagaataatctctgggaggggtaatacgtttctttggaaacaagcataatattttttaacgtccttggcagtattctttcgatgacttaatatattgtaatcaagggcaaattttttctactctttaagttttgttacagtatacagtccagagagccacttctggcaaacagtccagcttttctgtcatccctaacctgaaagtttgtttttggagtctaaacgtttattgtgtgttcagtttgcagccgtttggctgtctgtgtaccaggatgctcggtggcttaggttgtgtatattttgtgtgaagtgagtgcagcgtggagaggtggcatgcctcagatgccaggggagctatgcaagcttgctgtggaaagcatgcttcccgtctgtcagggcttcctgagaggagacctggtgacacagtagcctttcggcagagctccttgggatgagtaggaagtgctgctgcaggttttgtctgggggatatctgagccatttctctgtgggcagctgtgtttcaaagtctgggcaggttgttgttgaattttgcgtgggctgccagggtgagtgttttcgaattgtttataatcttgcttttcttcttcctaagtcaccgtgactttctggaagtttcacaggactcgttcatgatatattatctaaagtaggattcagaggatttagcctaatatatttgtaattcagcttttctttttctttctttctgcagattttgtggaagtataatactttgtcattatgagatgtcgtctctcggtgcctcctttgtgcaaattaaatttgatgacttgcagttttttgaaaactgcggtggaggaagttttgggagtgtttatcgagccaaatggatatcacaggacaaggaggtggctgtaaagaagctcctcaaaatagagaaagaggtaaggtcttttccagctgacagaaacagtcacgataccatttatgtaagctttttcaacctcgagttagagggtcacagggctgcaagagacctagcaaggcctttgggactgatccacgaggccgtttcccaatttccattctgggagccccataaatagaaattattgcagcgtgtgctttagggttgagttctactaggggtcagctgaagtaagaggatttctttccagggcatgaaagaccaaatgttctctgagctctcctggaggcagaggtgagattttagaccttcccagggttcaagcttttctcttccctgggcagccaagaggggtcggtaaagagtaatgtgtgaagtttttataccctttccattttctctgcttgaacttctggtcatcagcagttgtcttttaaaagataagacactgttttttttaactgaaatatgcagtacctgtttcttggatttcacctctacttaaggctaacagtgatggtctttgtattatatagaattaataggtgccagacagagagctgtcctcctagtaaaatcagaaaagggtcttggctttcagagcctgggatttgtgctggtcctagttgagctcagagttcttagaactgtcatccttctcaggaatgagatataacatggttgtcacattcagtttggtaccatgagaataaaagtaattacagagctgacctgcagggactcagcagcattgataacttcagcagcgaccctctggagctggttttggtcatttctatttacgccctgttttggcaaattattgttcaatatctttttaaagtgaactttcccataaatatcctttaatctccctgaatgatttcatttttttcattaactgctgccagtgaaccatagcaattgattagagaaggaaacccaaatggtagcactttgtgagtttcctcccagcggtgctgtgtaattgtgtgatcaccagctgtgtttccaattgttgaagccaggttagaaggactgagagatctctgccttggggaatctataggtttttggaagacattaagaaaggagagcttttaaagcccatccgtacacaaaacagaaaggtactgggtatgagaaagtcactttccctttcccccatttctcaatcaataaaaatttttaatggtagccaagtaataaatccatgtcttaccttggactgaacctagcccttttagctgatcaattctttaagtcctttataggaagcattattgtccccattttatggattgggaaatagagctttgcgaaatgtattaagctgccccaggaggggcaaatgaaatccaggaggctagaacccctgttctttagtttttgactctgaaacctctaattgaccaggtacgaagagaaaactaaacctgctccatccatttatagtcagttatttatatatatgctaatattttagctttagattgtacaactttagtaaaaggaacatgttcttatatgattgttcgatgtgaaaaagattttatgagacatgaaacagattttgataggaaaatattaattgtaacccgttcactccactcccccctccccaaggatacctacataataccttttcttctattcttgggagagccaggaaaatgacataggaaagtgcaggagtgaaagcaggaattggaaactgccaaatcctgctttcgtgcaggtatttaacatgaatgtaggtaattcagaaattgagttgattccagtaaactgtaagagcataactcataaacctgtaggtaggaaaaacaaaacctccacttttgctttggggcttagtcagtgattatgagtgataaagagacacagtaaattatggcaaagaacccctatttgtactggaataacatgagtttaagacataaaaagttatggcgaggagttgacagttactagcaaggaaatatacatttcttatgtaaataattgttatgctttatgaaatgtgtgttggcttctggctaggtgttttctaagtgataagataaaggtaataagccctggattttttccaaatttatagatccagttccatgtcacttggttgttttttgccaatgagttttagaagcaatggaacacttaataaaatgttcgcagctcatttcatgtgactctttaagaatgacttaatattagactaaatatatgttctataaacttagcaaaatgtagagaaaatatataccaaactctaactttgtttatgtgagaggagaaaggaagactatttactttcactttatttgcagacctctagtgtagtgagtatgtactacttttctctgttttagtgggtatactactactttatttaaaaacaaaaaagaaagactgtatttacttaaaatctctgtagttctttaaaactttatttaaaaaaatttttatatacccaaaggactataaatcatgctgctataaagacacatgcacacgtatgtttattgcagcattattcacaatagcagagacttggaaccaacccaaatgtccaacaatgatagactggattaagaaaatgtggcacatatacaccatggaatactatgcagccataaaaatgatgagttcatgtcctttgtagggacaaggatgaaattggaaatcatcattctcagtaaactatcgcaagaacaaaaaaccaaacaccacatattctcactcatatgtgggaattgaacaatgagatcacatggacacaggaaggggaacatcacactctggggactgttgtggggtggggggaggggggagggatagcactgggagatatacctaatgctagatgacgagttagtgggtgcagcacaccagcatggcacgtgtatacatatgtaactaacctgcacaatgtgcacatgtaccctaaaacttaaagtataataaaaaaaaatttttttaaacctagagaacaattaaaagaatactactatgaactctagtacgttttattcttcccctacactcaccatttagtaacattttacatttgctttttctctatatgttattgatttatatgtattcatatatattgtatgatttttgctgaacgatgagagtacattacagatgccatgtacctttatccctaaatacttcagcatctcccaaaacacaaccacagtacaattaacaaattcaaaaaatgtaacaatgataacaataatgttacttgttatacagtctatattcacattttgccaacttttgcaatgcgagcttttgatggcaatttttccaacccaggatccaatccaggatcgtatattgcatataatcgacatgtctgtttagcccggcttaatctggaacagtttctctgcctttctctgtcttttaagacgtagacattttggaaaagtataggataagtgttttgtataatgtccctcatttggggtttatgtgatttcctccccagcccccagcctagtcagagtttatgtagttttggcaggaaaactacataggttgtgtgtccttggtgtgtcttaatgggtgtcttgtgatgttggttagtctcattattgatgatgttagttttgaatgcttagttaagaggggtttacccaatttctccacagtacaagaaaatacctatttttcctttgtaattaataattaagctattggtagatactttgaagctaagtaaatatctttcctcagcaaacatttactaatgtttttagcatctattgatgattcttgtttggatcaaatagtactataacagtttactgtgcagaaagtaaaaagttctagcataagtgagtttgcccttattttttcctttcttcctttagtcaaccattcattcatgtatttattgtttgatcgtatacttaaagactttttggaattcagaatgttataatccattagtgttattcattttcatgcttaaactatcccaaatttagcaagtaagagctctttccagctggctcttgtgtccttttggtatgtcgctgtcatttttttatgattttcttacttcaggcacaaaaagatgtactaggctcatctagttcctgtctcattcctggagtcagccatgtttttgagaagccctgagtcaatatacctgattttggagtatattatttaggaaccaagatttgggtactaggattgtttactttagacttttttaaaaagaacattgtctttttgacagaaattatggttacagagaaattttattcatgaaagcattttatttgaaatgtaaactcatggctctggttagctacatctgtgatacactgctattaggaatgtaaattggtaaacctttctggagaagagtttagcaaaatgtatcaagaatcttaaaatgtttacttctttgggccaggaatcttgctctgggacttaataatcagagatgtgcagaaagatggatataattataggattcttctcagatgtataacaaggaagaattggaaattacaaattacgttgcagctatataattgatttctcttccatttggaagaacatttagaaagcaaggaaaatgctcattgtatagtgctaagtggtgaaaggaagttacaaaacattatatacaatatgatcccaggtataggttttgtgtctgtatggtgcttttatttttcttatactgtaccttgtttttcatattttcctatgatgattttacatttcttttccccgcaacattttattgtgaaaaatttcaaacataaagaaaaggtgaaaaggttttgtagtaaatatttgcatacctaccatctagtgcctatcattaatataaatacttgcgttataagatgtgtatgcagctatctacccttccattcattaattcattttgatacatttcaaataagttgcaggcatcagtgtgcttctccttaaacacttcatcctgtatattgttcctagaattcagtatgtgtttgcagttttgttttcttctgggataaaatttacctcaagttttgagaaatgtaaataccacatgacccacacatttacttttataatcagaaaaattcaatttaaaaaagtgtagctgtggcaatgtatgtcactctctttttttcttttttccttttttttttttttgacacagagtctcgctcttttgcccaggctggagcgcagtggtgcaatctccgttcactgcaacctttgcctcccgagttcaagcgattctcctgcctcagcctcctgagtagctgggactacaggcatgtgccaccacgcctgggtaattttttgtagtttagtagaaacggggtttcaccgtgttagccaggatggtctcgatctcctgacctcgtgctccacccacctcggcctcccaaagtgctgggattacaggcgtgagccactgcacccggccaatctagtgaattgagttttgtaaacctccttagcatatcacacaacactaattttccactctcaatatgtggctgtagagtgtttaatgtttactttcatatcgcttttccatagtagtgcaagacctcagtttagcttgtttacattatttgcagatttacttacagtgtactatttatttctgttttaaatagtgtttgcaataggagaaaatcatatgatcttaagcatatacaccaaaggtaagaaaggaagccactattgtatctttttgatgaattccagatgagctgggatcaaattgaactgcttaggcagaaatttaagagacaagtagaagtggtgcagaaagacattgtgactgcaatgtcctatttacagctactgcccagaggagaacactcccaacatgacaaagagttcatcagcttgaatgttaacttttgaaaacaattaattggcctagtgcagtggctcacgcctgtaatcccaacaatttgggaggccgaggcgggcggatcacgaggtcaagagatcgaaaccccgtctctactaaaaatacaaaaattagccaagcatggtggcgggcgcctgtagttccagctactcgggaggctgaggcaggagaattgcttgaacccgggaggcagaggttgtagtgagccaagatggtgccagtgcactccagcctgggctacagagtgagactctgtctcaaaatcaatacaaaaacaaaaacaaaacacaattaatcacagcaacttatttgtactcttgtgtatatttgataataaattgaacaagatatgtctgtacatagtatttttttttctgtctggaagagatgggaacctgacagcctttatgttaacttgaaatctgttgatactcaattgaatcaaaaggaagcagaatccttaagaggtaatatataaggccttttcttcatctgtcttggcttttgtaagacaccactacccttattttaaaagaaaaagcatcctaccaaatttcactgctttagaaatgtcggaagccagataaattcaagtttcaaatttattccacgttataaatatttatagataaggagagaagatcaacatgtcaaactggttataataacaggaactatcaataatttttatataaaggggaaaatacctgtgtgaaataggaaatataatcttgaaattgacagagaaccaagagcaaaaaataaaaagcttttattatactcagttaatcaatatgatatcgtttagtgatttatggaaggctagttaaatgttatcactttattagctcatgggagggagacccttcttcttttctatgcagttctgttgctaactttttattaataaattctttaaatttgttttaattgtaagtgctattttaaatatttccccctgacccaaacacgttaaagaagaataatgccacatttactttctttgtaaatcctctcaatatttaagtatatcgatgggaccaatacaaataaaaattaattatcttagatatttgacaatcgctattgagttctggcatagtttctataataactcgtccaaagcggtgctcaagagtggccactggtatttttaagcatggagagagctttgttaactataccagagctaacattttaatttggtacaagttgagtatccctaatctgaaaatctgaaattcaaaaagctccaaaatcacaaactttttgagtgctgatgtgacaacacaagtggaaaatatcacacctgacctcatgtaacaggtcgcagtctaaactttgtttcatgcccagcattatttaaagtattgtataaaattgcctccaggtataagatacagatgaaacataaattgatttcatgtttagccttgggtcccatccccaagatatctcattgtatatatgcaaatattccaaaatctgataaaatccaaatacttctggtcccagccattttggaaaagatactcaacccgtactttcaaatgtactcttttatggctgaagaatattggttatagcatctccacatgcctagtctcttccccttcactcaggagtccctttgtgagttattaaataatctcatataaaatttttctctccccagttagaatttgttcattctggattttatccttttaggtcagtggttctctcaaagtgtggtccctggaccagcagcattaagcatcacctgagaatttgttagaaatacaaattcttgggcctcaccccacaccaaatgagtcagaaactgggaggtagcgcccagcaatctgtgttttaaccagctttctagttgtttctgatgtcccctagagtttgagaaccactacttttattgtacctagccaatcatatgctaaatacagacagtataacttcagtttggaattttgggtaccttgtcaaaaagtggcggagaggtttttgctcttagaggcctttaggctcttaacttcacccattgtagatgaccacctatgcacataataaactgaaggctgacttaggaatggcaaatgtacatgaaacctcaggccaatactttcaaattccagccccttctcatagtggtgctaatctgactttccggccttttttttttcttccttccttccttccttctgttgtttttgtttgtttgttttgtgttttgtgttttgttttgttttttttttttgagacagggtctccctctgtcccccaggctggaatatagcgagctcactctagcctcgaactcctgggctcaagccatcctcccagctcagtctcccaagtggctgagattaacaggtgcaagccctctcactcagctgttttattttgtctttttttattttctgacaggatctctccactcctgtccaactgttcttctgcattacttttttaatttttgtaaccttgttcacattctttccttcacttgtaatacctttgtcttccctgtctgggcagatcctacccattcttcagctgtaattatttccttctctgtgaagcattctcagtcatacaagcgtattttctctttctcttctgaatttataccacataatacccatagtactaatttgaccgatggttaaaactgcctgtgactctgcattccagtgagaaattgccacctaagttttcatgtgaacatgctatgtcttctcatctgaaaagcagggctaatgatagtacccacatcataagagttgttgagaggattgaatgagatcatatatgtgaaatgtatgtagaagagtgcttgactcataggaagacttggataactgttaacgatcactcgcatcttcacaactgtaccccacagtcagaacagcagctagatgtcatcttttgtgaaaatgttaattagctgatatctaggcctcatgctgagaagggatcagatgccacatatacagttagcagcaaaggcagcctggcaaggctcagggtgaatacagtgggcaagcacatgtgtggtgcatttgatgtcctgttgtgaactttctgagagcaggactgtctttgtagctgatgctgtcactagacatcatcactctaccaagtactgctaccactgtgagcctgaatttggtgaagggctttacaccattgccctcttcttcttcacagtcactttataagattataatctgcatttgatggaaactaaggctcagggaagttaagcagcctgcctaatataaacagcatcgttcacttgggtcttccttgccagcctcacaacacctgccattgtgctttgctcccagtgaacattgaagtatttgttccttgatacctggtattgtgtcgcagtggacatacctctcatttttgttcatctaggaaatgtatcttgtattgacatacctacattttcttcatttactctgctttgagctgtgaagagggtagaactcgtgtctttaccatgtcactgtaagtacagtaacacacttgcattcacctacatagtaacaaactcttaggtattgccctttctgtagggttcctgatgtctggtttttataaatgcccttgcttttgtgccttttagactggcatgccatttctgcttaaggaattttaaacgtgtcactgtgcagtgctttaacattgtgctacgtatataaatcatcattttgaattggagagtaagcaatttaaaataatggatcattttatttgataatgaacatagtcatcatccggaagtatatgttgaatagccatccatcactctgctcttttctaccagacatttctgttactgggagcttgtaatctaagacactccaaggtgaactgctataaaggtgatagaggaaattggacacatgttgagcaaataaatgtattaaaatgagtaacatgtattactgatatgtctgaagataactcaaaccttaggagagaggtcactgaggaagagccaccagaaaggcttctcctaggacctagaggaatttggaaaattacctgaattataaataatgttcctaccatgttatgtgaaatgtagttacattaagacaaacaccactgattttttttagatgattagtgtgaccataaaaatgttttatttgcaagccaaagcccctaatccttcttatgtttgctacttagtctttaaaatttttaaaaatcctttcaaagctttgttagataatatatttacctgtacatggaggttaatttcagtttgccttatgagaaacattgcaactgttatttcaccttttcattaaagtattattgatctcagcatattgagcaataaacatttcagttagttaatatttgttctacagccatgctggaaatattatgctgaagtaaaaccaattaacgtatttcagtaaaaatgttacagcctgagtagctgatgttatacaaagctaggctcttgctattagaagaaaaatagtatacagcatgaattcaattcctgagaaactcaaagcctaatatagagaattgagaaattgaaaaattggaggagagaaaaagcagcccgtaagtatttcagatagtttcaaaattgatatgactggctcttagtcttcaaaaatagaattatctcacttgaatatttaaaaagtacctagaattttcttctctgttctgtagtgaagatgggaagtcactgacatgaaattacccaagaatagaggccatgttatcaattttttttcactgatgcttgactcatactcccggttaggacatccagtttctgtttgaacactgccattgatgacatatgagatgcagtctgctctagtttggaacagcttcttagaaagtcctttataatgtaacttccagccattgttcctggtccctgcctccggggccatatacaacaaatcttaccttcttccatgtatcagcttctagaggatggcatctgtaccttattgatctttgtactttctggactctacacagtacctggtccacaataagcagtcaataatggataggatataaatgaaaagaataataaacataatgatcacatctcaactttctcttctttgtaagatttacagaaaggtttcactgttaatgaatcttcagaaaagaatacagcttgccattcctaccctactttatagccttttcttctccatgtttggctgattttttgagttcttaataaattactttgtctttgaatgaagggttctgttctatagcagctagaaaggatgttttcctggccgtggttcttatctggtttgtttttgaacatatttcccaaaaaggaatccaagatgctttttcttagccctgctaatatcagatgttcactgattcatgacctgagaaaaattaaggtgtcctaaatgaaatgagactgccagaattttaatgacttgaaaatatgactcttatccctgatactgttcttcaagaaaataatgcttggcagaattaggtgcattagagaagcagcactggtaagtatgaaaatgtttgttaaagagggaggagactgtatggcagctctgctttccagagattgtattcagcaagtaatgtacaaaatcagctgatctcacgacattttaaaaacatgccaagcagtgcttccattagtcggaaactgaattgcttccattattggaacatagaatctaccttaagaaacatatactcataggtgggcagatcacctgaggtcaggagttcgagaccagcctggccaaaaccctgtctctactaaaaatacaaaaattagctggtgcctgtaatcccagatactcgggaggctgagggaggagaatcgcttgaacccaggaattagaggttgcagtgagccgagatcgcaccattgcaatctagcctgggccgcaagagcaaaactccatctcaaaaagaaaaaaaagaaaagaaaaaaagaaatatatactcatttttattttaatcacttggtggctattttaaaatataatacaaagtttagtgagcatccgctgctgaacaaatctttaaagttgtgaaagcgagggactttttctccctaaaacctcaggatgtcttcttaactacacagtaaagcctaggcctctaagtgtggcttgcattcttctatgggaaaaaccttatgtgcaaagaagcctagggattgtagtaaggccaggacacctctctcagatcagtgaggctctgtgggaaatcctgattctggatatactgacctcaagtgttgaccagaccaagagcagattttaggaagagatcaaattaattaatattaaatggacttgggagtatgaagtgttaaaaagtttatactctggccttgtttcaaaaaggatttaagattattagcagataaagtaagcatgttttgaagttccaggaaggccctctgtatctctgaaatctctctcacctaaatgtaaggtgaggaaatagaaaaaaattaacatttctttagtttctgttatttacagctactattctaagcacttcgcatagattctctattcaagcctactgctaacacttccagttttatcttgtaactttattctttaaggttgtttcccataatagaactgcagataccactgaaagaggtaactctacatgtgaataataccttgaagtacaaaacatacctgatttgtttcctgagcacatatttttctaggtggggaggtgcatacttgacactaggaaactgtgacctgaacagattctgaggtaactttcttttctgtaattcagccatccaacaaatattgagtatttattacatgctaggtactattctagatactggaactacactggtaaataaaagatacaaggattcatgttttttagagtttaccttcaaatgtggggaataagaaaataaatggtatgtcaacacattagaaaatataagacctatacctgccagggctaggggctgaatttagtgattcatttccaaagattcaagtatagaaaaggaatagttagtaactttacagtgggctaacctgacagatgcctccttaaccaagtgatgagggctaacaacactagtaattagtcaggttgataacgtgtatcccacatatgatttggtgagaaaagcattttacccctgaggttttcttcccctaaaaccataaccccagtctagtcatgaggaaaatatcaggcaaaccaaagctgatggacagtctacaaaatacctggccccagtgctcctcaagactttgaggttttgggaaacaaggaaagactgagaaactgtcacagaccacaagagataaggaaatgtgatgaatatacacagtgtggtatcctgaattggattctagaacagaaaaaaaaagatgttggtggaaaaaatagtgaaatgtcaataaagcctggagtttagttcatagtcatgtatcaatgttggcttcttagctttgacaaatataccctggtgatgcagcatgttaacatggggggaaaacagggcaagaagaactatctgtaccatctttgcaacctttctgtgaacctagaattattccagaataaaaagtttattttaattaatataaggggaaaatagggcagagtaagggagatcaggagtgccagaggagctagggttcaaatttcaatgagttggtcagggtaggcctcactaagaaggtgacactgagtaaaaacttgaaggaattaagggagggaaccaagcatgggggataaaacattccagatacaggcccatggcaggtgggagcatgcctgttgtattggagaaatagcaagggggccatcgtagctggagtggagtgtgtgagggaggagaaacaagaggttgggccagagaggcaatgaggccaagtggtcttggaccttgtaggcaattataagagcctccgacctaaattggaaggaaatggtgagcagttgaatgcttttgaatagtgacgtgaaatggtttgacttacattttcacatgaccactctggagactgttgaaaagagattacatgggacagagacaggggaccagttatggctctattacagtaatctcagtgagagatgcttgtgtctggggctaggaaggttgcagtggaggcagtgagaagtggttgaatttggggtagagttaaccagatttgctcactgattggccatgggctgtgaaaataatcaaggacgtctcagaggttttgcactgaggagatggaaagatgtgcgtgggcgcaagggaaatcaagagaggagcaggtttgtgagcaggtcgagttcttttttgatacaaacaatgaacaattagaatctgccacctaaataccatttacaatgcaataaaaatatgaaatacttggaagcaacctaaatgtccatcaacagatgaacagataaacaatatttattattcaaccttaagaaggaatacaattctgatccatgctacaatattgatgaatcttgaaaacgtatgctaagtaaaaataggcctaacacaaaaggaccaatattgtacaattccacttatatgaggtacctagaataggcaatattcagagacaaaaagtagaatagagattaccaggggctgggagagagagagtggggaattattgtttgataggtatagaatttttgtttgggatgatggaaaaattctggtaatgaataatgatgagagttgcacaacagtgtgagtgtaattaacgcccctgaattatgcacttaaaatggtttaattggtaagttttatgttatgtactataatttttaaaacaaagttctatttatagaaaaatgaaatgctgaaggataaatttaacaaaagtctgtgtaagatctttacactgaaaactgtaagacattgctgtgagaaattagtgaatacatttaaaaaagaaatatatcctacatttatgggtcagaatatttttattcagatgtcagttcccccaaaattgatttgaagatttaatataatcccaaatcataacacacccagttttttaaattttttgtagaaattgataagtagattgtaaagcatatggcagtgaagaggacctggagtaatgaaaaatgaaaactaacagtaatgatggagaacttgtactacaaacttatttgatggcttaccataaagctacagtagtcaagatagtgtggtatttgtgtgtagatagactagtggaaccgaacagagagtccagaattaggctcacatatatttggtcagtagatttttgacaaagatgccaaggcagttaagtgaggaaaagggtaaccttttctagaattggtgctggaatgattaatgtctatattgaaaaaattgagaaccactgaactagggaaatgtagtatggttgctgagaagcaatcaggttatgtgttttcttcagccatattcagctcaacagttgcaagggtggagtaaacagagaattggatttcttcagggttgtggttttcctgagtacattgaaggaaaagtagaaccatgatgctgaggatggttgcaggggaaggattctgtgatttggcctggaatttaggctaagtaaggagggaagacttcagggaagggtgtgacactcataaggtataggaacaggtaatgataggtcaagggattactggagttcaggtgctggaggcaggaagctggaaatacaggaattggtggtcagcaagtagggggcctggattttagattgtagagaggtgcagttatgggtaattcctaagtcatgaccaaaggaatttgtgactgcggcagggtgaaggactagactgttgcaggggaagagttcaaagacttgaaagaacaggtgtctgagggtcttgtaagtgcatgaaaattcccacatccagacaggaatagtaatcggacaaagtgacagtgagctggggctaaaatcattaagaaacaggggagtgaactagggattggtacatgatggcaacaatgaaggctcatgaatgatgcaatctcatgacagaagattcagcttttgggaggtggtaggaaagagtactgtctggaggtggtaatgaggggctccccaccaagctctgcagagcaagggccaagagacagaacagcagctattgcgagggctgccggggagggccaggctctggacagaggaggcaagggaaggtttagagaagaggttcaggatagaggggctttgtgcaagggtttcaggagttgagaagatatgggaggaggatccagctagaatacatgcggtcctgtaggaattggcatgagaggtgagggggcagccggagccggttgtcttgtgctgacctgcacagggataagggcacccagagcctagtcctggagtattcaggactcgcctatttacatgttttaaaataaaatatatgttttaaataacatcttctgccttgcgctgcaaatggaggcatttaattcctaggaagcaatatggcttcgtgtttaagagcctgggctttagcgtcagacaggtgtagattcagatgctttctccactacttattagatttatgggaaagtgactgcaccaagccttagtttccttttttataaaatgcagataataatagagtccacttcataaggctattgtgaggaccacatgaggtaatctgggtaagtacagtgcctggctcctactcagctctcagtgcgtgttacctgtggcggttagggctatgatttcagcagcagacagtcggaacatattcgagatttctcctctcccctgtggcttgttagcactatttcagcataacttgcttttttaagacttatagataactagctatttacatcatcctagagtataatgtttcccaaacttaaaaaatctttgttctctatggtggtttctcatcctttttaaaaaaattttctcaccagacaacaatattttgtcatttacttactatattttgtgttataaactgggatttttatttttttttttatttttttttgagatggagttttgctgttgttgcccaggctgcagtgcaatggcgtgatctcaccgcaacttctgcctcccaggttcaagcgattctcctgcctcagcctccggagcagccgggattacaggcatgtgtcaccatgcctggctaattttgtatttttagtagagatgggtttctccatgttggtcaggctggtctcgaactcctgacctcaggtgatccgcccgcctcggcctcccaaagtgctgggattataggcgtgagccaccgcgcccggcataaactgggatttttaaaaatctctttttaattacacatgtcctgtccccttccttgtcctctggaaattgagatctctcacttaggaatcattgttatatcagctcattatgattgcatcatagaataatttggaggtattgttccatgtataagattggtagaaatgagaaggactgaaacacttatagctggtgagggaatggaatgatgggcataacactttcttggtggaagtctaaaatggtaagccttccagaagacagtttgaaagattgacagaagttttaaaatgaaatgccttcgacctatcatcctcacttttaggaatttgttgtaagcaaaaattggaaaagtgcatgtgcatatgtattaagagttgtgtatggcaatgcaaatcagcaacagtgagcacattctatttttataatcagaacaaaacaacaaaactaaccaaaggcatggaatcttacttgtgggacagagacagtaaaaaatctttataattggtctgttttgtacagattggcagttcacccctctgttgagttttcaatcatgcaaagtaccttgaaagtacactcatatgcttttgatattttctgcttcaactctcctagaatgtcattgatggcccagaattttaatctccttacttctcttttttctttctccgaatttatttgctatcatgaagctcagcagatacgtgatataaagtaaacattaattctacttcagagtttctccaggttgtaattggtagctgaagaaatactgcagacattttaagttaaatgtaacttgaatttatctgggcactaggcaccttcctttagtattctgtaagaatacaaataaaacttttggttactaagcaataatgctttagggttttgcctttgtttatagctctctccacatctggtgattataaaggggagaaatctgtatatgctctgtaggtgaaaaccagtacttgtcaccagtacatgaaaccaatgcttgggtggtatttgaaatatgtctttccgtttattatggtggtttttttttttctgtttgttttagtaaacccataaaggctctggaatgtctacccacagatatttgtcaagttgagtaagaagaaatcttcctttttaagaactgtgtataaagaaagaagtatttcacacctgtttatcttagcagggtctgcagagagagggagatagattccccattaactctcattcagaggagagtttagaaaagagagtgtatggtgaccttctctgctctctggaagggcactggcgccaggtagaagggcccgctatttgtgtctacaaacaaaaagtcttcctaaatttctcacttttcttgttgagcccgtttgtagaattctttcaattcacatagctgaattgtctacaatcataaaatgctaatatgatacgtttccagaaacatattttaaggcttgtaattttttaaaaaatgaaaaccatctttcagtttgggttcccatttgatgcagttgcagatgagaaatgtctttctcatccttcctagtagattaggcaacctagttgggggatgggacgtgatgtatttgtctcccccaaaggaatgtttaatgatcctcctccttttaagatattattaagtcaagttagtaataagtaggaaataagtaaaattatctttttaactttaaacagaaacagttattttaatacaacttgatatatataaataataaaatatatataatatatgttatacatatatatatatatatatatatatatatatatatatattttttttttttttttttttttttttttttgagacaggatcttgctttgtcacccaggctggagtgcagtggtgtgatcatggctcactgcagccctgacctcctgggctcagatgttccttccaccttagcttcctgagtagctgggactataggcacatgccaccatgcctggctaattaaaaaaaatttttttccataagttattggggtacaggtggtatttggttacatgagcaagttctttagtggtgatttgtgagatttgggtgcctcattaccagagcagtatacactgcaccatatttgtagtcttctatcccttgccccgcccctactctttcccccaaatccccaaagcccattgcatcattcttatgcatttgcgtcctcatagcttagctcccacatatcagtgagaatatatgatgtttggttttccattcctgagttacttcacttagaataataatctcctccaatctcatccagatcactgcaaatgctgttaattcattgctttttatggctgtgtagtattccatcatatatatagaccacagtttctttatccactcgttgattgatgggcatttgggttggttccatgattttgcaattgtttttgacccaatgctgctataaacatgcgtgtgtaagtatctttttcaaataatgacttcttttcctttgggtagattcccagtagtgggattgctggatcaaatggtagttctacttttagttctttaaggaatctccacactgtcttccatagcggctgtactagtttacattcctaccagcagtgtggaagtgttccctgttcaccacatccatgccagcatctattgttttttgatttttttgattatggccattcttgcaggagtgaggtgatatcacactgtggttttgatttgcatttccctgatcattagtgatgttgagcatgttttcatatggttgttggccatttgcatatcttcttttgagaattgtctattcatgtccttagcccactttttatgggattgtttttttcttattgatgtgagtttgttgtagattctggatattagtcctttgtgagatgtatagattgtgaagattttctcccactctgggggttgtctgtttactctgctgactgttccttttgctgtgcaaaagctctttagtttaattaagtcccaactattcatctttgtttttattgcatttgcttttgggttcttggtcatgaaatccttgcctaagccaatgtctagaagggtttttccaatgttaccttctagaatttttatagtttcaggtcttaggtttaagtccttaatccatgttcagttgatttttatataaggtgagagatgaggatccagtttcattctcctacatgtggctagccaattatcccagcaccatttgttgaaaagggtgtcctttccccactttatgtttttgtttgctttgttgacgatcagttggctgtaagtatttggatttatttctgggtcctctattctgttccattggtctatgtgcctatttttggaccagtgtcatgctgttttggtgactatggctttattgtatagtttgaaatcaggtagtgtgatgcctccagatttattctttttgcttagctatgcatgctcttttttggtttcatgtgaattttagaattgttttttctaattctgtgaagaatgatggttgtattttgatggggattgcattgaatttgtagattgcttttggcattatggtcattttcacaatattgattctacccatccgtgagcatgggatgtgtttccatttgttcgtgtcatctatgatttctttcggcagtgatttgtagttttccttatagagggcttttgactccttcgttaggtatattcctaagtattttatttgcagctattgtaaaaggggttgagttcttgatttgattctctgcttggtcactgttggtgtatagaagagctactgatttgtgtatattaatcttgtatttggaaactttgctgaatcttttgtcagttctaggagctttctggaggagtccttagggttttcaaggtaaacaatcatatcatcagcaaacagtgacagtttgacttcctcttcactgatttggatgccctttatttctttctcttgtctgattgatccggctaggacttacagcactattttgaagaggagtggcaagagtgggcattcttgtcttgttccagttctcagagagaatgctttcaacttttccccattcaaaattatgttggctgtggttttgtcatagatggctttttattacattacatacaagtatgtcccttatatgctgatttttgctgagagttttaatcataaagcgatgctggattttgttgaatgctttttctgcatctattgaaacgaccatgtcacttttttctttaattctgtttatgtggtgtatcacatttattgacttgtgtatgttaaaccattcctgtatccctgttatgaaatccacttgatcatggtagattatctttttgatatgttgttggatttttttttagcaagtatttcgttaaggattttagcatctatgttcatcaaggatatcagtctgtagttttcttttttggttatattctttcctggttttggtattagggtgatgctggcttcatagaatgaattagggagggttccttctttctctgtcttgtggaatagtggtcaaaaggattggtaccaattctttgaatgtctgctagaattctgctgtgaatccgtctggtcctggacttttttttgttgatgatttttaaattaccatttcaatctctctgctagttattggtctgttcagggtatctaagctaggagggttgtatttttccaggaatttatctatctctttctagtttacgtgagtaaaggtgttcatagtagccttgaatgatcttttgtatttaaatgatgtcagttgtaatagctcctgttttgtttcttagtggggttatttggatttttttctcttctttgcttggttaatcttgccaatggtctatcaattttatttatcttttcaaaggaccagctttttggttcatttatcttttgtatttttttttgtttcaatttcatttggttctgctctgatcttggttatttcctttcttctgctaggtttgggtttggtttgttcttgcttctctagttcattgaggtgtgaccttagaatgtcagtttgtgctcgttcagtctttgatgtaggcatttagggctatgaactttcctcttagcactgcctttgctgtatcctaaaggttttggtaggttgtgtcatcattgtcattcagtttgaaaaatttttaaattgccatcttgatttcatttttgacccagtgcttattcaggagcagcttatttaatttccatgtatttgcatggttttgaaggtcctttttggagttgatttctagttttattccactgtggtctgagagagtgcttgatataatttcagttttagtttattgaggttggttttatggcctatcatatggtctatcttggagaaagttccatacactgttgaataaaatgtgtattttggggctgttggatgaaatattccgtatatatctgttaattccatttgttctgaggtatagtgtaaatccattgtctctttgttgactttctgtcttgatgacctgtctagtgctgtcggtggagtattgaagtcccccactattattgtgttgctgtctgtctcatttcttaggtctattagtatttgttttataaatttgggtgctccagtgttaggtgcatatatgtttagaattgtgatattttcctattggacaaggccttttaccattatctaatgtccctctttgtctcttttaactgctgttgctttaaagtttgttttgtctgatattagaatagctacccctgcttgcttttggtgtccatttacatgaaatgtctttttccacgcctttactttatgtgagtacttatgggctaggtgagtctcctgaagacagcagatggttggttggtgagttcttatccattctgcagttctgtgtcttttaagtggagcatttaggccatttacattcattcaatgttagtattgaagtgtgaggtactattgcgttaatcatgccctttgttgcctgtgtactttggtttttttgtttttgctttttaatttgtatttttgttttataggtcctgtgtgatttatgctttaaagaggttctgtcttgatgcgtttctaggatttgtttcgagatttacagctccttttagcagttcttgtagtggtggcttggtaatggcaaattctctcagaatttgtttgtctgaaaaagatgtatctttccttcatacatgtgcttagcttcactcgatacaaaattcttggctgataattgttttgtttaaggaggccgaagatagggccccaatctcttcttctagcttgtagggtttctgctgagaaatctgctgttaatctgataggtattcctttataggttacctagtgcttctgtctgacagttcttaagattctttccttcgtcttaactttggataacctgatgacagagcacctaggcgaagatctttttgcagtgaatttcccagatgttctttgtgcttcttgtatttgaatgtctaggtctctagcaaggcaaaggaagttttcctcgattattcccccaaatatgttttccaagcttttagaattctcttcttcctcaggaacaccaattattctaaggtttggtcattcagcataatcccagacttcttagagggtttgttcatattttcttattcttttttctttgtctttgttggattgggttaattggaagaccttgtcttcgagctctgaatttttatcttctacttgtttgattctattgctgagagtttccagagcatttcaaatttctaaaagtgtgtccaaaatttcctgattttttaattgttttttctttaagttatctattttcttgaatatttctcccttcacttcttgtatcatagtttggacttccttgcattgggtatcgcctttctctggtccttccctgattagctatttaataactaacgtccttaattctttttcaggtaaataagggatttctttttggtttggttgtattgctggtggctagtgtgatttttttggggggtgttgaagagccttgttttcttatattaccagagttgggtttctggttccttctcatttgggtaggctctgtcagagggaaggtctagggctgaaggctgttgtttagattattttgtcccatgaggtgttctcttgatgtagtactctcccccttttcctatggatgtggcttcctgtgagccaaactgcagtgattgttgtccgtcttctgggtctagccactcagcaagtctaccaggctccaggctggtactgggggttgtctgcacagagtcctgtgatgtgaaccgcctataggtctctcagctgtggatcccagcacctgttctggtggaggtggcgggggatgcagtggactctgtgagggttcttagctttggtccgtgctttgcttcttattagtattaattttggcccagttctgcaggcttaaccagaaacatggctgggaggtgtcaagaaacttgcaatcatggcagaaaggcgaaggggaagcaagcatgtcttaccagggcagagcaggaaagagtctaattaaaaaaaaaaaaaaattgtagagaaagggttttgccatgtttcccaggccagtctcactaactcctgagctcaagcaatcctcccatctcagcctcccaaagagctgggattacaggtgtgagacattgtgcctggcctattatatattttgaattgacaagtaaaatggtatatattcatgctgtacaacatgatgtttggaatggctgaatcaagctatttaacgtatgctttatcccacatacttacgatagatctgttggtgagaacacttaaaatatactctcttagcaattttcaagtatacaatatattgttacaaactgtatcaccacaatgtgcaatagatctcttgaacttattcctcctaaccaaaatctcatgtcctttggccagcatctccctgcattccctaaagctgattttatacaacttctaaatcaaaatgagtatgttatctttgactgaatcagttcattagccacagaaacattagtttcattttttcatttgctgccacccctcatcactgactttgtttttccccaagactacttaaattgctttggccgcaggctcatttcttcatctggcaaacaatcccaccttgcgtgtctttatcacctgccttggttaccatctgcatcctgcttctaaccatcatcaagtgaatttgctatccaccctaataacctctgagccaactgcagacttctttctaccatgacctccttgattaccttcagctacacttcccttcagctacttattggtagaagcttagaaccttcaaaatggcatgcctgcgcttcccttctttgcctataatctatctcacccagtctctgaacagtaaatattgtgaattcattgtgaacatttaaaaatcgtatgattttacataaatccagattcctagctcctttgaaaaagaagcaaactggatcattgttcttgaatggtggcagcaatggggatttcattgatggggacttcattggtgaaggcaaggcttatttggaggtatcagttctaaaagagttaggaaagagaatcagttctgttttatcattttatgtcatgtagtgtataattttaattagcatttaacaatgcaatcaattaaataaaaaagaattggtatttttaaattttatccataaagcaaatctgaaagaatgaggagtgtttaaggtgagtctcttaagaatgcctgaagagtttcttttttgaagcagggatatgtagttttaaacttcctcatttatttattattatttttgagacaccatctcactctgttgcccaggctggagtgcagtggcacaatcacggctcaatgtagcctcaacctcctgggttcatgagatctggctacctcagcctcctgaatagctgggaccacaaatgtgcaccatcacgcctggctaattttacttattttttatttgtaaggagtctccttatgttgcccaggctggtctcgaactcctgggctcgactgatcttcctgccttgacctcccaaattgttgggattacaggcacaagccaccacgcctggcctatttttttttctaataaaattatattgaattttatttttaattgcacgaaaagaatcaattagtaattttcatgattacacagtatagaatagaacaaatgtgaggatactctgaaggagtactcatctagaaaatgcatctgaataaggcaagcataaaaatcatttttggctacagaaatttttgttaatcacttctggcacttagcacagagacactctcctttttcctcttaagttatatataggccttccctgtgtcagatgatgtcattcactcatgatgaattcatgatgtcattctttcctgcctatcattcatcaaagttaggatgatgggaagggggtgatagatgcttgagggggatggcaaaaggaaagatgtgagtacagtgtctaaatctctggtatggcaggagacttacccccaaggggttttctgttctttatacagttgtaattagaaaattctggacctgaaagcatactacctgagccagctgttattgcttccatcattttacaaaaagagaaattcagccatttggtagaccttaagattaattacgtttcatctcttttctctttgtaattccattttcctccaatcacgttaggttattttcttagtttgttgtattgtttatatttaagaagataaaaatcctactgtaaatagatgtgtcagaaagaatgagatgtgaatttagtcactaacattaatggatctagttcagggagcaagacctaacccacggagtttatggacctgaattaattttttgaaattatttctagatttttgtctttgttataagtttgtggtaggggaacaatttagaaaggcagcaggtaaaaactgtaacatataaatattctatgttttggttttttggggggggtgactgtgcatctaattttgatgcctgagaacatgagcacttggagctacaagcctgtgtgtagatacacaagcacacccacacattctccagctttggtgttcacaaggccttgttctgagtaccatgatcttacggcataaagtaaagcatggattagagaatgtatttggcaaggagatttcctgaattctttgaaggtgacagattccttaatggccagatttaacttggaagttagtaataatcatgataggtaaccatcattttttgtatttacatcatcttatatgttgaacttgatttataactgtcttctttcactcgagaaattacaactttatcctgtcattttcttaaaatgttatcaaattaatggttctagaagtagctataattaagttttagaagtgtacagtttgtcaattgtatattctctcaaatggataataccatgatatagtagatgcttcagtatgaaaacagtagattgtatcaatcagagtcagaaaccacaccagtaatttgaatagggaaacttcagtattaaaattattaactagtaaaagatagttaacttttaaaagactctaaagaatataggactagcaaacatagggaacagctgctacctctagcactgagggagagcacttaagggaggaacagacttggaggagggccccactcaggctggaaattagcccttattggagaaggtgtgtttgcagccgactgggtggtgtcacaggctggaactggtttacaagaagccatctgctgggggtccagtgacgatctcgagtgtgtcatggggcagagctggtgtgcaggaagccacctgctggggtgctgggaggctaaagctggcccacaagagtcttctggctggtggccagtggaacccacttgagggtcagtaccactgggctttgtacatgctgctggccatcatggccactggaggaaggaaaagcatataggaaacaggtctcttcctccactaggcctttgcagtggtccctccagtgcactgtattgacacaggttaacattgtgccagctggcagaggaaaagtatttacagggcctagctccagtatcacgaggcagcacaaaacacgatggatttggtggtgctgagaggcaataaattgttaactggcacagttcatctctttggctactcagcttctacatacaccatctacacacacttgaacttccatgtaataatgaaacagttctattttttcacctatgatgaaggtcagctgccctttgtacaagtgaagaagttctcaccctttcccccaaatgagatgcagtcccaacagtcactgtgtccattgcctgctttattaatttcttctcagatttcattacagtacactgaatattctgttacctaaagactaaatcataaagttagcctctaacaatttgtatataaaataacaaggggaagaaggagagatcagagagaaataattaatatacacaagtatctacacatatacacaaagaacaagcaaagccccctccctccctgccttcctgccttctctcctctttctttcttttttaaaagaaaatggtttcaatgtaatacaattatcttttaaaaaaagaacaaagggaaaatccccaaagctgctatagtccacatttctgtaactagtcatgatctctgacttccttctccacgtgtcattctatatatatttttttcacttagccaaaaccttagctggctggtcggctttacctgatggggtgacctgaactttcattcctgaaggttctgagtcctcagcagtcctgccttttattgattgtcatattgtttcatgaacctctattcttgggcataggagcactaggagtcaccccatgaaccccctgggtttcagacatagacctccttgcccccattgtttagcaacaacccaatattcccttggtaattgggattaatcactccagtcagtagagtatcctctttttctgcttgttggttcagaacctagaatagccagtggcagtctcgtatcccaattaaatggaataattattatgtccccacatgcaataaggtgaaagcattccatccttggggactaagatctccaaactaacagagctcaggggtactgtggtggggatcattaattctgtgagttattaggtataacagtgataggagtcactctcacttcttttttttttttttttttttttttgagatggagtctctctctgttgcctaggctggagtgcagtggcatgatctcggctcactgcaacctccgcttcccgggttcaagcaattcccctgcctcagcctcctgagtagctgggactacaggtgcgtgccaccatggccggctaaatttttttgtattttagtagagacatgtttcaccgtgttggccaggatggtctcgatctcctgacctcgtgatccacccgcctcagcctcccaaagtgctgggattacaggcgtgagccactgcacccagccaggagtcactctcacttctattccttgattaccaaatccatgtattctgttacagggttgccagtggtccgtgattcaaggcatattcttacttcatcctgtaaatcagaaatgctttcagggtgttgtctctcatttgatgccataactgaattttccagtgagtcattacacatttctattaggtgagctgcttctgattggagggatatggggtgagactactcaattccatgcttatgagcccattgcttcattcccttgctgtgaagtggtttcctttgtcggaagcaaagcagtatggaaaactgtaatggtgaataaggcattccgtgaggcaactgatgaagatattgtcggaaacattacaggcagggaaagcaaattctttttgtttttgagacggactcttgctctgtcgcccaggctggagtgcagcaggcaatctcggctcactgtaagctctgcctcccgggttcacgccattctcctgcctcagcctcccaagtagctgggactacaggcgcccgccaccacgcccggctaatttttttgtatttttagtagagacggggtttcaccgtgttagccagtatggtctcaatctcctgacctcgtgatccgcccgccttggcctcccaaagtgctgggattacagtcgtgagccaccgcgcccggctggagaacaaattcttatctaggatacgtgtctattccattcagcatggatgcccccccgccgcccacccgccaccatcacctcctgggaatgggggactgtcaggggctcagtgtctatctccatgttggtagattagatactcagcagtagcaacagacagttcagccttgataaggggaagtccatgttactaagcccacatttagtctccatccttgccatcatggccactttgttcatggccccattgagtaagccttggggtggctgggaaggaggctgaatgacatccgcagagcatataattgtattcatttgattattgaggtctgtgcccaatgtgagaggtctgtcacatcctcttccttcaaattctttgtcaccaatcttacaatcttcttctattcaagtccctgatcattcaaataaactataagcaatcacccgtgaattaatgtaaactcttatttctggccatttctgattacagacaaagcgaatcaccaaatatattgtcaaagtttttccctctgggaggattttccttaaaagctgttctttgggggtcacccctaactggggatgtaagctgtggacgtagactttcattcagctggtaccaatgtatcatgcagaaccctttataaattgagctcgtgttttttctttcttagtcaacttgtggggaaacttggtgttgattcagagctagtgtttagtattccctgaaatatctgagtatgttctttccccctgtgcactgtccatctagtaatggcagcaggcctctttggtgaaggcttggaggaggatttatggtatatgcctgtggcagcactgcagggttatttttgaaggaaacctggccttcccttcaaagggttatgggacaatacactgttctaggcctagaactgggtgtgattctgtgactctccattgtggtgacgtaatggccactggacctacgttttgttgttgttgttgttatatagattatacagtattgtagtaaactgcatactgatttcattcctagggactgcaggataaattagctaccaccagagattcctgtgggccaaagcattttgattaatatgtccctgatccctttgatagtaaatgcaccgatcttgtctttggcactcagtgctgctactttttctgctcttcctgtatcccaccatctccaaagaaaccaggaagctcatctcagtcgtgacatctcctgcggtcttactggtctacaaaggaaaataactacagagtttttcagagatgcagcgctcccctcacttaggtatttttcaatgtcttagtgcaaggagtgtctctggtccttttcaggagatgtagttgaggtggttgggtatgtagttcacacatgataaatccactacattcctatctccttaaacctttggattccatcctccatatcatgccagggaagttctggcatttcaacctcattacaagtttcagtcaaccaaccaagtaagctctcagagacttctggcttcatgagctaacacattcacattcagtccaaaaactctagttaggtgcatctatatccatgaaagcagcctgatgtgctgtatatttcccagcattctttatctaacaccatgggtacctacccccacacatattcccagggttctgccactatatattaacaagggtcttgcaggtttttgagtctgtaagccatttccttctgggtgatgctgtgtactgtgaagcatgttgagatttaggaactgagtggttatgagagatcttgaggagaatgagcatccccttataaagacatctactccaggtgaggctactcagcaaaagttttccagaaaaagaaagctagtctcttgagacataagagggcaagcaacttccatggtcaagggaacctcagagtttctttggggcttgaaattgtttgtttcatcttgaattcaaccagatgttcccctttccaggtttcaggtcccattcttttttaatcagtaccctaactttcacatgagagactgtggttgtaaattcaactgatgttgtaattcagcaacacacccagtacattttttttttttatttctggaaatagtagctctatgactacaggaaataaaatatttttttagagctagtgtggaagctctctggttcttagacttgggctgggggttaaaaacacctcaacttattttcttttggtagatgcttcattgcactcaaaagaattcattgtaccctacaatctttatattcatcattactgccatagcagtcaaggacagcagcctctttgactcccagaccttgtttctgttggcacttcattgcagttaatcacaggtgatagcttagttaattttgatgggactttatgccatggattaccagcatcccatatcccattgacaaggattggtgctgtcctccagtcaaagctcatgaccatactaatcccaaagttctattaatatttttgagggtctgtaaccaggaaccacacttggtaccaactctgtattagagttcatttaggaaaattagtatagagaactgttgcctagtaaaaggtggttgactactgaatggggtaaaagagactctaaagtatatggggatagcaaaggcagagaacagctactagctccaggcctgatgaagtgcatccaaggaaggagcagattggaagagggcctgctccccgggctgtgactgagacctcattggaaaggctgcagctgcaaatggatgatggggcggtgggggttggttggggttccatgggtgggagctggttcacaagaagccacctactagggtgctggtgaggcttgatgtagtgccgcaggttggaattgttccatgaaaagttctgggttgcctgtggccagagctggtgagcaggaaactgcccattagggtgtgacatgccagaacttgttcacaggaatccagctgctggggtgtccaggaaacttgctgaagggtgagctcaactggatctcctgcactctgctggcagccagactgtcaagaggaagaaaaagcagcaacaaacaagaaagatgctccttcctctgctacgacccttccatgcctctattaagaaagcttaaagttgcaacaactggttgggcatggtggctcacacttgtaattccagcactttgggagtctgaggcaggaggatcacttgatcccaggagttccaggctatagtgagctatgattgcaccattgcactccagcctgggggacagtgagaccctgtctctaaagaaaataaagaaaaggaaaataaaaattttaccaactgacaaaagagagatgtttttacagggtccagctcaagtaccacataggagggtaaggtgtggatgtggaactgagaggcagttaatccacaacttgcacattttatagagtactagtcattctgagaaggaatgggtataccattttgtcttccctattttaaggaagataggtatgttgaatccaccattaaatatatcccttatagaatctcttatcttctaaaagaaagcactttaactatgtaatatgttcttgtgtacgtatttcagtcttcagagcattactgtatatcagtgaatcctggactacacctaaagaatgtatattgttttacagctttttagcttggtgagcaggctcatcacagcaaaataaggatctcagattatccttagagcaaccttacttacttgtgtttttctgcttagcagtctccacctcacagtttgaaaataggaagtgaagttaaatgttagatgtgttttttttttttaaataaaactttactttattgaatgtactagcatttcttgtcaaacactaaaaatgtcagtaccctggggattggaagggaagataaattttattcctgagaagagttttctcagtaggctttcttttctttatttccttttatttatttatttatttctgagatggagtcttgctctgtcgcccaggctggagtgcagtggcgcgatctcagctcactgcaagctccgcctcctgggttcatgccattctcctgcctcagtctcctgagtagctgggactaaagatgcctgccaccacgcccggctaattttttgtatttttagtagagatggggtttcactgtgttagccaggatggtctcgatctcctgacctcatgatccacctgcctcggcctcccaaagtgctgggattacaggtgtgaaccactgcgcctggccccttttaattttttaattgtatgatatatactcttccattctgttttgcagtaatctgtacattataagtgagcagaaaaattataccactagaatgattaaaaacaaatgctttcaagcaatataattaaatttctttatgggactataacatgtttaatccaaaggatgaggcattgtctctaaatatatatatttttaaaatactttgtgtaatgtttttgcctgtggcacttatataggatttatataaattagagtattttagagtttcatattatatagttgcggcagagaaaagaatgtctgacgttgggcaagaaagagatgattctatggtattctagtggtgatattggggtaagggtggtttcaaggtaacaaagtaacgatgaatttttcttttttctttttctttctttttgtttttgtttttgagacagagtctcactctgtcacccaggctggaatgcagtggtgtaatctctgctaactgcaacctccacctcccaggttcaagcgattctcatgcctcagcctcccaagtagctgggactacaggcatgcaccatcacacctagctaattttcatatttttagtagagatggggtttcaccatgttggccaggctggtctcaaactcctgacctcaggtgatccacccacctcggcctcccaaagtgctgggattacaggcgtgagccaccgtgcccagctgatgaatgtttctttacaaagagaatatgcatttcttatttttattagcagtctagagggaaggggagtgagaactgcttggactgcagaatgctcttacagactattctaggcaataaagcttgcttcgaaaagcaagccagacattctgtaggcagcatccacacgtttaactctgacattgatttctgcaacatcaagaaggtgtgtgttccctggattttagaaattgaaatacagcctgtgaatgttcttaacttctgtgctggccatgtggttttagaatggacatttaagttccccaccaaaccacaatcccatctgagttggtattgtggttttcttcaaacatacaacaggaagtagggactagcattatgaccattcaataacattaggattctgatcacaaaataaatacaacaaggaagaagaaagcaaatttccattgaaggagaccacccagtgaccatttctaattacagtgaatctaagaaagaatgaaaagatggatgtgtagatactgactgcaaagtctgcagaagttggttcccattggcccactccatttcctcttcatttaagaattctgtgaatatttaaataatgtaattaaggatttactgctctgcccttctcttaagacttactctgctattcataatgaaggaaagatagaagaaaaataactttataaataatttattcagaaacagaaattttgctttttgaagattctgttaaaaagtcgatctttagaattagcagtatctttcaaatttaagatcccagcttacaacaagcacgttttcattttgaagagtttttggcagagaaaaaagatatgggaaacaactggtataagataggagaaaaagttaaaatatattacatttacagtaaataaaccgaacctttcttctttcttggagaagccttttaaaaaattgcctaattctcaagtgagatgggtgtgggaattggaaataaggtactaactccaaaaatgcatatgttggttgggaatacatcagtaaaatttatcctatgttaggacaaaaaaaaaaaaagtaagacataaaggctgccccataattcatgcatatcaaccaataataagaatacctgcaatcccttattgaactcttcccatttgtcaggcattgggctgagtgccctgtgtgcataggtaacaccccagtgggttaggaattattgccaggacgcaggtgaagagatggagagaagtgaacatacatgcccaaagtcatatagttagtaagtgatagaatctagaccttcgtacctgccatgcacacacacattatttcaactgtccctctgtcaaatgaaccatacctatttttttctcatatctcataccagttgaagcctttccacaccgagtacaatttcatgttgatgcaaaagattatgaaaattcttgaaatgatttcaataatttattttcctctgacacaaggttcatctcacactcctcctccttcatgccttctccagtatttccaatgatagttttctaattgcagtttccaagaaatgacattgatttgagtttatgcatctgtaaaagatccaatcacagcagcatatggaaaacattatagttgacttatttatttatttatttatttatttatttatttatttatttcagatagagtctcgctctgttgctcaggctggagttcagtggcatgatgtcggctcactgcagcctctgcctcctggtttcaagtgattctcgtgcctcagcctcctgagtagctgggactacaggcgcgcaccaccagcccagctaatttttgtatttttagtagagaggaggttttgccatgttggccaggctggtctcaaacttctgacctcaagtgatccactcgcctcaggcccccaaagtgctgggattacaggtttgagccactgagtccagcctaaattgactttaatgaaaagtttccatgctgttctttgcattaattctcctttagctgtttggagactttgcttaatctcatgattttagtacattgttgagctgattctttcctgaaagtgcaaaataatcacttcctgttcaaactagattccctttaaattacattaaataagaacctgtttttcctgtggtaattttaaaatttaaaaatttcaactattttatatgaaatatgctccttcaaggaaccaaaaacattcttcagatcaattttagaaatcttttctttttttttttttttttttgaggcagagttttactcttgttgcccaggctagagtgcaatggcgcaatctcggctcactgcagcctctgcctcctgggttcaagcgattgtcctgcctcagcctcccgagtagctgagattacaggtgcccgccaccatggcctagctgatttatttttttatttttagtagagacaaggtttcaccatgttggccaggatggtctcaatctcgtgacctcgtgatctgccctcctcggcttcccaaagtgctggtgagccaccgcgcccagccaattttagaaatcttaaacatttaaatcaaagttgtagaaatatgtaacactatatgaatacttactaacagttttttggagtatttactatgctaagctcttgcatgcattatttcatttcattcttaccacaatcctgtgaggtaagcactatcatagctcatcaaatctaagatgcctttggtttaaaatattatgcaccactaagaaaaaatgctgccaatggaaactgtaagatgccaccaattgtaatacagccccagtgtcaatgataccaaaagaaacatgcatcttacaatccatgaatacaacagcattatcactgttttacatctgaagaaactgagacatagagaattcaataattgccagagatcatgcagcaaataggagcagagctgggatctgagtcctggtctgactagataggtcttgtgtttgtaactgttgcatttgtgctttcataagtgctttcattaagcgatatggaggtatttagaaatgaaactttaccagatgttttatctatacttgacctattaaaatcaagttggaattgccttttctaaaattacgcataatcagaaattataattgaagctcacttaagtggagtcaagaacttggggccaaacatactattacaaaaatagaaaaaggacatgaagagacatttcacaaaagggtagagtatttactgttgataaagataaaaatgaatgcagatactcactattagtaaggacttgggaaatcaatactctctaaatttgtttaaggaacctctaaaattgaggcaacataagttgatatatttccaaagtgcagaattgcattatgcgtcaaaatgtgcttacttttgacctcggcatttcacaactcagaatatatcctaaggttatggtcaaacaagtgcatctgatgaatgtgcagagatgttcacttaagtgtttttattatcatgaaacatttgaaacaacctaaattttcaacagtaaaaaactgggcaaataaatgttggtattttcattcaatgaaaattaagctagtatggaaaacaattgtctagacccatatttactgacatggaaaaatgtccatttttttaaataaagcaccttatagacaatatagatttgcttaatgaagaactgccctgagataatatccattaatgtttattattctcaaaaatcagaaacaaaaagggtaatgagaatatgtcagtatttttatgctatcaaggagacagggatactcatatttttatcctggactctggaattagttgcttccctctctgatgtcttcatctgtaaaatgagagttaaaaaatagaaagattgaaatctttccagttttagattttaaatgcacgttcactaaagtgcagaattaaatatgatatgagaatgtgttggatcctgtccaaagtatgctggttaacagagaaccaacatgttagggtgtgatcagtctgggacggtgctgagcactgagctgtgaaagtgttctatatggaacagactttgcgattctgttctcaggacactgtctagtagataaaatgagaccagcagtgagacagtgggaattcttgctgatgattgttttatgccatgtaagtgcaaaacaacaactttaactgcaccaggattcagaatgtgacaaggttttaggatctatcaaaattctactgaaacatgtggctatgactaaaacaaataagatgcttctaagaacagattgtgacttgtctatcagcccctttgaaaacaatgtgcatgctatttattagggattgtaattacctcatggagtaatggcatttgcacagtttttgtctgcctcgataaaaacccttggctgtgtctgctaacttggtgaaaaatcgcagcaacagaggcagcccaaggatcttaaatcatcctgtgcatactctcattttgtttttctgctgtggcttttacccactagaggggatagtgcattgtctccagggaattagagactgtcatatatgccttatagaatacaaaggagcttaagtaatatacacacatataaagttacatgtacagtaattgacattaggtgctccattaaacaatgaaatgccacagtgtaccagttcttcaggacatgttgccatggatacccagtgtgatggagatagggaaagagttgcttaggaattcaacgatttcattttgaggtggagtgaaaaataaactgcccagagataggaaccatgaaaccagtcatatatacaagtagttgtttttgaaattgtcaaatgaaaacatgtttgaaaatgagtaccaattaataacagttattttatattgtctgtaagccaaagggctaggcagggttctttatttcagctaggaaattatgtggtatattagatatttgcagaagaaagtattttaatcaaagctgaataaaattcagaaaatcatgtgtagaaatatagaaagatggcagtggaatggtaggaggcaagttctctaagggtctgctcaggtgcactcagtgttgtgaacctcaggttgccttggggttgatgacaaagcaaagatttcagaaaggagcaagttttaagaataaatgtgatgtgatagaagcagaggcaaggttggcagctaactggtttggtgtgatttcatggtttgcaaccaggactgagtgtctgattctttgattttctagagacattcctaatttcatccctaactctccccagataaattctcatctcttatcaaaaacaaggtccctggaatggaaagtcagggaactccctgaggaaatgagtgtttagctgtattctcagtcatgtaggttttgttgatcatagatatttttgaattgatgctttcttgtccccatctctccttcccttaattcaagtcatacttatcactcctttcagcctctggttattccccctttctgattcatctgtcatatggacctcaaatttaaaaagaagaaaaaacagatcagatcatgtcatttctgcacaaaaatggagaaacttttgttggttctccattacctatagaaaacttctaatccttaatatggcatttagtccctttacaaaagtcaccctcaacaaagctttcgtcttctcctccggctgactccccaccccttgcaccccatgtaggctgtgtatcagctttaagagagggaagaatcctctccgaatgagcagtgtgctttttcggactccagctgaaatgcatttctaccccttccctgcccctcaggcgcttcttgtcattaaaacacccttccttcaaagccctagcccctccttgcctccacccaggagagttaaagtttttctctgttttccacctctgccaagcatttgtcttcagttgctttttgtaagcttttcccctcccctgtcagatatgtagcgtggtgttaaagggatgggttcagtatagtgtagtgactaggagtgcaggctcagaagtggttgttgaatttgaatccatctcagctgtaccacttgttagctttgtgacccagggcccattacacaaccactaaatctctttcttcatctgcaaaatgaagttaaccttggtagcttgttaagggaattaaaagagaacacacaagaagtgtttagcacagtgcctagcacatagtattaaataaatgttagaaatgtatcctgagcgtttctcttttccacttccatgccctcaacagtactttacatacagtaggtactcaaaagtatttattgatttaaaaatgtggctcactcctacacagtccttcaatgtttctctacttaagttggtgatagagatatataaaatttagggagtcatctttctaaatagtttcctaaattttacatattttaaaatgggaagtatggtgaagaatgtgtatttttatttaattccaaaattttagaagatagtttagtagcaaagcaatgtaaacatctgagtcctttacctaaagaagcttgtatcagtgtttttatccatggtgataaaaagtgtataagatctgaaagcagattgggtaacacgtagagacgatgcacagtttggaaactacagtttccaaattaacactaagttcttggaagaagctttctcacaataactgtaactgaaaggacccagtgaaatgagagtagatgccagagtttgatttagagagtgagagtcattcagggactgtggcatctgtcatacattagaattttaaatacaaccataaattaagagatagttgagagcataccttcagagagttaaagagcataccttcagagaatatgaaggtatgctgtataacattatagtatgtttaagttgaacaggaactcacaagaccaacctttctaattttggctgtgcttcaaaatgacgtggtgggcttgttaaaacacacatagcccacaacaaggactctgattcagtagttccagggtagatccgaggctcctgtgtgtgtgtgcattttaaatttttttcttttaaacattcatgcgggcggatcacgaggtcaggagattgagaccatcctggctaacatggtgaaaccccatctctactaaaaaaaaaaaatccaaaaaattagccgggcatggtggtgggcacctgtagtcccagctacttgggaggctgaggcagaagaatggcgggaacctgggaggcggagcttgcagtgagccgagatcacaccactgccctccagcctgggtgacagagcgatattccatctcaaaaaaaaaaaaacaaaaaacaaaaacattcatgcctgatgtagcaggtcagtggactggggtttgagaaccactgattgaccctaaccagagattctcagtatgggattattttctacatcatctggtaatctgcatattttaaatacctctggtggtaggaatcttatattaagacaccctccttgttttcaatagctatctttttttttttttttgagacagaatctcgctctgtcctccagactggagtgccgtggcgtgattttggcttactggcttactgcaacctccaactcccaggttcaagcagttctccagctcaccctctctagtagctagaaccacaggcgcatgccaccactcctggctaaattgtgtgtgtgtgtgtgtgtctctatacatatatatatatatatatatatatatatatatatatttttttttttttttttttgcagagacggggtttcgccatgttggccaggctgatcttaaactcctgacctcaagtaatccgcccgttttgtcctcctcccaaagtgctgggattacaggcgtgagccactgcccccagcccattactgctgacttagttggtcttagttagaggttgctttactttaacgctgcccattggttttagtactgtcctctggagctacatacattggaactgatacttcctccatgtggcagccttcagatatttccaggcagctatgatgctctttttacttttattttatttaggctacagagccctttccatccttattatgcttaatatatgccagaactgtgctggaagttggagacccacagggatcttacagtcaaactgggagaaagaaacttgtgaatatcttcagaacagaggaagtggtttaaagtgtggattcgggcgtcagacccatgttgaaatccctagctcagccacgtgactagcttagtcctcaggcaagttctttaacatatttgtgccttagtctcctcatttctaaagtgaggataacaggacctgcctcaggacaatgcttggcatatagtaagtgttcgatacattttggctacaaaatatactaggggttataattctgatagaagcaaagaggatgtattactaattggatggcaaagtttatctggtcctgaaataaaaatattgaaaaaaagtttccgtatacaaattaggcgatttgtaaacacttttacaagtacataaagagcatttaattcttgtagagttaaataattttattcaatgtcctattcaatacttccattaataatttaggtagcatctgattcactctgagttcctgtaacagtcggaagagtaattgacatgttaaaaggtgcaataagaataagaacctgaaaagatttcaacagattagagcagtgggttaacagacggaaatgaaagtcctgcatggagactctggaaagctaaggattgatagaggatgaggaagatgtggcttaacagaaggacattttatatttggggcttattatgagttaaaatgtgatatatttgccagaaaagttaatgtgattttcaaactgtgatgggaagattttagaatcctgaatgaaggagatcataccctattcttctgtgtttaaagttttagatcttttcctcctttgctgtttgggaaatcagccagcctctctgggactaggtttctgcacttataaaatggggataatttctgcccagttatatttctctgaattgtaaatgtcaaatataatgaatgcaggagatatcattatcactctagacaattttatcacattttttcatatgcttcaaaacccttttccttgatatgagtgacaacttagtatcaccagtttttattaaccatgtataattttaattaactgaatttaaattaactaaaatcttagggattgtagcatatagattattagacttgctttaaacactcagtagaaatgtgagcatctaagtggttggtaaatagtgaattatttttcactgctttttagtttagatattcattgacaaacctgtgtgctacactgaccaaggtgttgtagaataagttgtactgaataccttaacaacatcaatgctaaaattagctgtaacaaaagcagcatgtgccaccttgttgaatagcctgtgttccacttttagggaaaaaggataccccaggaatatagggaaagaatagagtggcagtttctttttacagcatttgctgatggcacggaggaatgtgatttttggggtgtggggctcctttttcctgttcgttcatgtttctttccctctttttgacttagtcactgtcataacagaaaatgcataatatggagatcaagagcctgcagattacaactctaattatgttttaaacccaaacatgaaaattagaattcttttacacacaatctgacagttttccatcagctttaaattggcattttggattgtgttctctgcagtgcctgaagagcctcgacagagaaggaaagaagcagagggtgagaaagaaaggaagattctaaatgacaatcttttgaatagtgcaagttcaatccctaaaacaaaaagcaagatcttttttcccctaaataatgtgctctccggcttcacctctcatcctgaggaacatgaaagagaacgtaaaagaggtgacccaaatcacagagtgcctttgataggagaaattcagctgttttgaacactcacaatcaaaggaagtggtttccctaattacatgaactatgtgaaatctctcagaatagctcttccaccccaggattccttgcactttagaagtttgcataaaagctcacatagagaatcagatgcaaagtgtttgattcagattttattaggcagaagagtgcccacatccatcctgcagtttgccagctgcttaggttaggaccactatacctggttttgatgtggttgtctttcaaacctgcaacattaagatctttgttctatccttttcttgcaagaagcaccactttttagggagagtagcgatgaaaatttttggaagattggtcttctcaatttctctcctgacctaaaaaggattgatggctgtgtttgtgaactttacgtgggaaaacatgctttcctgtgtgtttgtagctggcgagtgttaaagcgttagatttgattaagctcttcaatctgtttaaaaatggttaaatgtcacaatgacttaccttaaaatttatatatgcaaaattccccatttactgtcaggatctagactaggaatctgccaaaacacctggactaaagaataatagtgattatggcttattagatcttttgtgccttggtagtcaccttgttactgagagatacggtgtagtgtagatgtgtacagaagagaattataaataccctatgttctctgtttgggaaggcaagtataagtatgaatgcagaagacagaagcatccattttaatttaaatgtcagcttgagaagatttttttttttctggttgagtaattttaaagtaagagaaattgtctagtatgtaattacatatgagtaagaagtgtgcatgttttattttgtctcttttctctccctctctttttttcctttttcctgtgaataggtatgttgctcttattgtagtttataaaatattcttttgagaatctgtgtgtcccaaaaaagaaaagggaatctatgagcagaaatggaaggaaattttatttttacagtttttaaagtactggctttaattgtaacccacataaaatttcctaatactagtgctgttgacacgtgggcatcaacatttaagtaacagaaagtaaaagtgatcctcaaccatacaagccacaaaaatctacttgaacaattacctagcaatttctttctactttaaccatcctcatttattccaggtaagtagcttatttgaaaagacacgtagattaataaatatttgtgattttttgttcttttttgagacaggatcttgctgtgtcgcctagactggagtgtgcagtggcgtgatctcggctcactgcaacctccgcctcacaggttcaagcaattctcctgcctcagcttcccaagtagctgggactacaggcgcccgccacccaacccagctaattttttttgtattttcagtagagacggggtttcattatgttagccaaagtgatcttgaattcctgacctcgtgtttcgcccgcctcggcctcccaaagtgctgggattataggcgtgagctaccgtgcctggcaaatacttgtgattttaaagggatgtttaaaatctgaaagtgtccatgattatgaaatatgcactttttctattttgtgtgttttgaactcctaattatggatgtgttaaggtttggatattttgtacacagtcatagcattgtaatatggggaagatttgaaagatgatgaaggattgacactgtagtgtaggttttttgcttaacaggtgggttttcacataattgtgaaaagttctgttctcttagaaatcgaatacaatacacaaactgaaattttaatagctattttagtccaacagccccaagccctcattttaacaatcagtaatttgaagttcagataggtgatgttcagtagcaacagattcagtccaagggcccaggtctttggtttgctggtttggagctcttacaccctgttaggttccctctgtgtctgttgctttttaaatgatactcaactgcctactggatgcttgtgacaagagagaaggtttgatattcctgaatgatagccacttatttgataacactttaacattagcaccaaaaggtcattttgttttccttcttcatctggtacttctatcagctagggccatagtaccacatgaattgctgttctagatcaagattgtagctaagtcatttcagacactgcgaattctgtatctgtttttaaaagtccacaggctgtctggaagtgggttcaatcatactcaccattcagaagttctgcttaatggctggcttaagtaacttttgttaacgtttgaacttggtatcctcaaatgatagtatataatattactcagtgctttgccatttgtaaagcactgttacttacattatttccttgcaaatgatgaagcaagtgtgtatgattcccagaagcacactggagaagtacagtgcttaatctgaggtttttctggctttggacccagtgtgtgctctactcataatagaatctcagctttggaaaggactttaattgaccatatttccgatgccttaatgtcctccgaaacattactgccacaaatgggcatttacctcctgtttgaattctgattgcttatgaaggagaactcagtagcctcctgggccagtcccttttatctttgggaaactgactattagaaagttcttctctgagttattctgagtctataccatatgctgtctaacagtgcttgtttgaaccaaggataaaaggatcaatgtaatgctgtaatatgattttaaaaacaacattaaaattatactcttcagaaaactcttacaaaatgacatttattaggtgcctactttccccctgattgttatcttacttataagtaaaataacttcatttattttagctttttagttttctgtgaatttttaagttctttttcttgcttggtggaatctcttccaaaaataaaaaatgaccagtgcttacttaagtaaaggaaccaatatggatatagttagtaaacgaaaagtagattcctaaatattttattttacacactcagtatcatgtttctttttaaagtttctattcatagccatttgtttactgtgaccctgctatacttacacccacatatttccatgttatatttacttcctagattttaaatttttatgttaaaaaagtaatacatgttcagtgtaaaacaagaaatttcagcagtatgcaaagtaaaaaagcagttttccttccctgcaatcctatacttaattttatttatttatttatttatttattagatggagtttcactcttgttgcccaggcaggagtgcaatggcgcaatctcagctcactgcaacctccgcctcccgggttcaagcgattcccctgcctcagcctcccgagtagctggaattacaggcgcgtgccaccatgcctagctaatttttgtatttttagtagagatgggattttgccatgttggccaggctggtctcaaactcatgacctcgtgatccacccacctcagcctcccaaagtgctgggattacaggcatgagccaccacgcccagccacaatcctatactttaaaatcattagtttgtgagtaactttccagattttttttttgagatggagtttcactcttgttgtccaggctggtatgcaggggcacaatctcagctcaccgcaacctctctgcctcctgaattcaagtgattcttctgcctcagcctcccaagtagctgggattagaggcatgcaccaccacacccggctaattttgaatttttagtagagatggggtttctctattttggtcaggttgttctcgaactcccaacctcaggtgatccacccgctttggcctcccaaagtgctgggattacaggtgtgagccactgcatccagcccagatgtatttttttctctgtatttataactatcgctaatactattccccccataaaaatggatcatgtgaagagggtggcatgagggaaccttgtgatgaaattttcctgtatcttgactgtggtaggaatcacttgaatgtacgtgtatgacaaaattatgcggaactaaacatatacacacacacacacgagtgcatataaaactggtgaaatctgaataaagttggtggattgtgtaaatgtcgatttctattgggagaaactggttgaaaaatatataggttctctctgtattatttcttataattgcatgtgtatctataattatctcaaagtaaaaacttaaaaaaactagattatgatattttatatgtatatatatcataaaaaggtgtcccaatgtgtaagttgtaaatcacctcgcaacttactttttgaacttagtatactgaggcacttttttatgtgactacacgtagagctaccacattccttttaataacttttttattttgtatttaaataatatttgtttacttcacatttactttttatactaaattatattctcgtgtagtattattagaaaaactagacatgtgaagtaaaacatattagacatgtgaagttgtaattagcagacaaaagactacaaagcagcttttataaacatgttcaagaacttaaaggaaaccatggttagaatgagagagcagaatcagtaattcagcaggaagatggaaactaaaaattctagaactgtaaaactacagtctctttaaatgtaaattgtactgatggggcttaacagcagattgaggaaggcaaaagaaaaggtcagtatatgtgaagacagattaatataatttatcaaatctcaagaccaaacaaaaaaaattttaaaaattgagcagttacacatgagacaatgtcaatctaatatacattaatggaatcacagaaagaaaggagagagagagaggggatggatagaaaaatatgtgaagaaatgatgacttcaagtgccccaactttgatgaaaaccatacacttacagttccagcaagctcagaaaaccccaagcaggataaattaaaaatgaaaaccagaaacaccacactcagtcacatcatagttaaactgctaaaaatcattgatgaaaagagaaatgtcaaaaacagccagaaaaaaaagacacattacataaaggaagcaataccagttacttctcactagaaacaatggaggccaaatgacagtggaatgacctgtaatatgccaaaagaaaaaagataactgccattttagagatcaatacccacttaaaatagtcttcaaaactgaagatgaaatagacatttttagataaatgaaagctgagataatttattgccagcagatttagttatggttaatattagggtaaatacaaatgatcattttaaaaattcttttaatttcttcaaaagacaacagctaaaaggaaagttgcagtgttatattatgggttgtataatgtatgtacgttaaaatatataacacatggctgggcgtagtggctcacgcctatatcccagcactttgggaggccgaggcgggtggatcatgaggtcaggagatcgagaccatcctggctaacatggtaaaaccctgactctactaaaaataccaaaaataagcccggcgtggtggtgggtgcctgtagtcccacctacccaagaagctgaggcaggagaatggcatgaacccaggaggtggaggttgcagtgagctgagatcgtgccactgcactccagcctgggcaacagagcgagactccgtctcaaaaaaaaaaaaaaagtagtatatatatatcacaatgacacaaaggatggggaagtgagcaagcatcttacattttatgtgtagcacaaaattaaatctaagtagactgtggcaaaaatatatgttgaattcttagagcaaccactacctacccccacaaaaaaacaaaacaaaagaggtatagctaaaaagccaatgaatgaatgaaaatgatatactaagaaaaaaattgttaaaacaaagacaggaaaggaaaaacaggggaacaaaaaacaaatagaacgaatttttaaaaaccaagatagtaaacttaagcccagtaatatacataattacattaagtataaatgaattaagcaccccaattaaatggcagagattgctaggctggatgaaaaagcaagatccagccaggcacagtggctcacacctctaatcccagcaatttgggaggccagggcaggaggatcacttgagcccaggagttcaaggctgcagtgagctgtgatcacaccatcgcactccagcctggacagcagagctagaacctgtctcaaaaagaaacaaacaaaaaacaaaaaaataaaacaagacccaactatatgctatctacaagaggtgtattttaaatataagacacagatctgttgaaagtaaaaacatgaaatgggaaaagaggggtatgcaaatagaaagcataataaaggtgtagtggctctattaatatcagacacagtatggacttcaggaaccaaaagtattactaaagataaaatgatttaataatgatgatttaaaaagtcagtttcttaaaagatataacaatcataaatgaatatttatcctaataacagagcttcaaaatacatgaagcaaaactgatagaactagaaaaagaaatagacaaattcacaattacatttgtaaattttaaatatccccccctaagcaactgagacattatacttaacaactacaaaatatacattatcttcaggtgcacatggagtgttctccaggatagatcataaaataagtttttataattttcagtcttttaaagggatctgccaaaaaacctacacctaacattttaactcaacggggaaatattgaatgtttttctccctaagattaggagtaagacaaggatatctgctctcatgatttctgttcactgttctgtagagatcctggtcagtgcagtaagacaagagaaagaaacaaaaggcattaagattggagaggaagaagtaaaactgtctttatttgcagattaaatgattgtttacataaaaaattttttaaaaatctacaaaacaaatactaggactgatcaatttatttaacaaagttacaggaaacaagtttattatatttctatatactagcagcaaagattttaaagacaatgtaaaaaaaatttatttacattagcattaaacacaaaaaatacattgaaataaattcatcaaaagacatacaaaacctctatgctggaaactacaagacatttctgagagaaactttaaaagacctaaattataggcatgtataatcatgcctataatcccaccacttagggaggccaaggcaggcagatcacacgagcccgggtattcaagaccagcctgtgcaacatggtgaaaccctgtctctacaaaaaaaataaaaataaagaaaggaaaagaaaataaaagaaagaaagaaggccgggtgtggtggctcacgcctgtaatcccagcactttgggaggccaaggtgggcagatcacaaggtcacgagatcaagaccatccaggctaacacagtgaaaccccatctctactaaaaatacaaaaaattagccgggcgtggtggtgggcacctgtagtcccagctacttgggaggctgaggcaggagaatggtgtgaacctgggaggcggagcttgcagtgagccgaggtcacgccactgcactccagcctgggcaacagagggagactccgtctcaaaaaaaaaaaaaaaaaaaaaagaaaagaaagaaagaagagaagagaaaagaaaaaaaagagaaaagaaaagaaatacaaaaagtagctgggagtggggggcatgcacctgtaatcacagctactggggaggctgaggtgggaagattcattgagcctgggagttcaaagcaacagtgagccatgatctcgccactgcactctggcttgggtgacagagcaagaccctatctcaaacaaaaaagacctaaataaatggagagacatgcgttttccataagtccagttgtaagactcagtattaaaatgttactttcctccaaaaattgatttgtagaaaaatcaaattggaggattcacattacctgatttcaagacttaatccaaagctctggtaattaaaacagtatagtattggtataaagacaaaaatatagatgcaacagaatttcatatttagacccagacatattataatccattgagttttaacaaacatgccaatgtaattaaatgcagaaaagaaaaatctttttaataaatagtgctggaggagtaggatatgcatatgaaaaaaagggaaccttgacttctttataccaaatgcaaaaattaattcaagatccagggtaaacctaaatgtaaaagcgaaaactatagtacttctataagaaagcaaaggtaatctcttgtgacctttgatagccagatattccttagacaaaccataacaggtactaaaaataaaattccagcctgggtgacagagcaagactccgtctcaaaaaaaaagaaaaaaaaattggtaactagagcttcatcaaatccaaactctgtgcttacataaagaaattgtttgaaaaacaaagatgcaatctactgactgggagagcatgtttataatgagatatatctgtcaaagcacttgctttcagaatatttaaagaactcctgcaagtcaatattaaaaagataacgattttcaaaaataggtagaggattagaatagtcatctcacaaaaagttatatgaataatcaataagcatgtgtgaaagtgttcaatgacagtggttaaggatatcaaatgaaaaccacagtgagacccatttcacccagactagaaaggctaaaatttaaaaaacccaaaacacccagtgttggtgagaatgtgagtcagcacattctcatatgtttttggggggagtgtgaaatggtatcacctctttgggatgctctttgctgtttcttcaaaaattaaacacctaccctatgagtcatcaattcaacttataggtgtttacccaatagaatgaaaacatatatccaaaaaagactagtataagaatatttgtagcagctgtttataatagccaacaattgagaacaactcaaatattaacaggaaaatagataaagactgttgataaaatggaatactaattagcaataaaaagaatgaactactgatatatatatatatctcaaaaacaaaatgttgagcaaaaaagactacatcatgattccactcacgtgaagttcaataaaaggcaaaattatctctgatggtgaaagcagaacagagcccatgagggttgggtactgaagggtagacacatggaaagatggaaacattctgtatcttgattaaggtcatacataggtgcatatattttcaagactctaccttattcacttaaggtctgtgtattttattatacataaattttacctcagttagaagaaacaaaaaagtttcaggtttttgttgtttttttttttaaggcaaaggaacaagccagtcaagtctgttgccttttagagggattctccagaagcgccaatcaataaccaaatgtgtgtgtttgtatacatgcatacatgcacatatacagtgtacatgcacactattttattcatatatgtaatactgaaggtgaattgaagtgtaattcatataccttgtaattcatccatgtaacatgtacaattaagtgttttataatatattcacggttatgaaatcatcaccacaatcacttttagaatatttttatcacctccaaaagaaatccatattcatcaagcatcatttcccagttctcctcaagtccccaacccaagacacccactcgtctactttctgtctccagagatctgcctattctggacatttcatataaatagaatttaaaaccatgtggtctttgtatacaagatttttgtggacgtgtattctcaattctcttgagtatatatacctaagagtagaagtgatgagtcacatggtaactctttaattctttaagtaactgtcagagggttttccacagcagctgttacattttacactcctcccagaagggtatgtgggttctaacttctctacacccttgccaacacttgttattctctgtctttttaattataaccatcctagtgggtgtgaagtggtttctagttctggttttgatttgcatttccctaatgaataatgacggtcagcatctttccttatacttagtggccatttgtagatatcttctttggatacttatttgaattcttggcctatttttaattcaattatttatctttttgttattgagttgtaagaatttgtatatattccacatactagtcccttatcaggtgtgtgatttatgaatatttattgccctattctgtgggttgtcttttcactttcttgataatatctattgaagtactaacgttcttcattttgggggcattcagtttaactttcgttgcttgtgcttttgttgtcatatctaagagggctttgcctaaggtcatgaagatttacttctaaatttcttttaagagttttatagttttagctcatacattcatgtgtgtgattcattttttgtctgttttgaggaagggatctaactttatttttttgtatgtagataataacttcttacatcttattagccaggatatgtcatatggccacatttagcttcaagtggggttgggaaatgaaattttgggggtgcatattgctattctaaacaaaatagaatgcaaccagcagcatctgccacagtgtatactgtttttaattttgactcaaaatagtataccaacaaactccagccttttttttctttttttgagacggagtctcactctgttgccaggctggagtgcagtggcacgatctcggctcactgcaacctccgcctcccgggttcaagtgattctcctgcctcggcctcctgagtagctgggactacaggcgcctgccaccacgcccggctaatttttgtatttttagtagagacagggtttcaccatgttggccaggatggtcttgatttcttgatctcgtgatccacccacctcagcctcccaaagtgctgggattacaggcatgagccaccgtgcccggccactccagcctttttaaaatatgaatttggccaagaagcattgtctgtaactggccccaaaaaggatttttaaaaaagttgtctgattttgtttgttaatatgcttatatcctgacctctctgaaaatctgactttgaccgagaagcattatccataagtggcctcacagaaagactcaaaaataaattttctggatttttgttagtatggtttttctgaagttaatcctacaagatggaaggaatacactgtttcttatgcctctacccaactctctgcccctttatcctcccctgtcccccctcacaccagttctcgtctgtctttgttggctaacattacataattttaatgggtttaacaaacatacccttaagtggacatgtttttggcctctgtactgaaatctcttagtattctcccttgctcttgggttagaaaaccttcttgttaccactttctggtaaaattttatgctatgagaggtaggctgtttcatggctttcagtctaggttaagtgccagaacatgttctttattttactattcgaaagggacttggaatttattccactatctcctgatatccttaggatgagtggtgtgagtagaatgggtcctggtcatgctttatagaattggcccttgagcagaccttcataaacaccttgctaaatctaggacagcaggaaagacaagaaaggggcagagttaaccagctggtccactgagggataaagaaaagcatcccttccctgcctccttccaccccaggtcgctccaacctcctgacgatgcctggaagcggtgtgcagattgtttaacaggaaatgtgtgggtatttgttattttgctgatctctatggaatgtcccttactgaatttcatggtttgccaaatttggcagagttcttcacttctttgactgtatagctctgaggtgtgagattgatgttcgatgatgaagggaaacctaagtgggtcctgaggttccattaatacctctgccttcactctgcctcttcttctgtttcctgctctcccagattgagccaggtgtttacaaaaatctggtcaagggctgattctataaagctgacttcctacactgaaaataaaatctgtggtcatagaaggaattttgaaccccagacatctgttgtagacgtatagaattgatcacaatgtaggataggtagaaatatttataatgatagtgctgaaatcaatatttggagcttaatatgtgacaggcagttttcctggtgctttacatggatgtactcatttaatgcataagaatagtaaagtgtattctcatggtacttttcactgtacaaagtgttcttgtatttatttgattcttataaaaaccctgtgaatatgagaccagagtagactaaagagacatgacaactaaatgcagtgtggcaccttgggttggatcctgaaatgcagagaggacattagtggagaaaatggtgaaatccaaagtctggagcttagttaatagtaatgtactatatatagtaacataagatgttaacaatgggtgaggggtatatgggaacactcctatatttttctctgaatctaaaattactccaaaataaaaaagtttatttttttttaaaaaaaacccttatgatctagtcaatgcaagtctcattatcctcattccccagatttgtactgtttggaaaggctgagaaccttgctcaatagcacaggggggaggtggtaaaagaccaggacctaaactggagtccttgcattcttacctgagtgctgagtactgaggagtactgccttaggaagaatgcactgctttctgcctacgtcatctccgcgcatcctccccacagcctttcgagggttgagaggtgatactttcattttacagttaagagatcattgccattcattctcactactggacaaataactcaaaaatatgtttcctgttgacttcaagtgactattgacttccatatttgaatggagaatacagtacatattttggggcccatttgattaaaccagtccaactgttgaaatctcatttagggagtgtatagagatgatatgatgaatgatggctaatgcccaaaggcagtagttttgaaaaagaatagtagtgtagtggtgtcttctgtgatctctgacacagaaatctgtgaatggacagaaaatagaaacacaagaattgcccccatcaaattcagatttgttctgcaaatgtggtgattgtgagtctaaagatggtacgccagattccatatcctgtaagtggaaaagagaagtgatgttcaatttctgtcaacatggcaatttattttttaaaatagcagggtgacttaagagatttatttggaagcttgcagaacaaggcttactaacagcttgtggtcatctcagtatatcttggtctttggatttagattcttttgccagttgtggcctgacctgactatgcaggatgacatgtgttctaacacttttccaacgctctattctctagattctctttgatttgtggtcagtgtcctacacagggttgtttcagcctcttctctcataaaagagagagtgctattgctgtcagtctgtggatctgttttccagcaattgattgttcaggctgatgttctgtgtatccgagttcagttctgcatatccttaaaaaaattttttttctttgagacaaagtcttgtcctgtcacccaggctggagtgcaatgggtgatctcggctcactgcaacctctgcctcccgggttcgagcaattctcctgcttcagcctcctgggtagctgggattacaggcacacaccaccatacctggctaattttcatatctttagcagagacggggtttcaccgtgttggtcaggctggtcttgaactcgaccttgtgatccgcccgccttgacctcccaaagtgctgagattacaggcgtgagccaccacacccggccaaaaaaaattgttttaatgtaggtacaatttctagcagctaacatttattgaggaaaaccatgcgcctagcatgtactttacatgggagtttggtccttgtaactgtgttaagtggatactggttttattttacatataaagaacacacttaattgagagacctggaagaccacacagctcatacatgatagagctgaaatttagctccagggttttcagactccaaggcaactaggctacagtttagcttgccacagaaccactcacttgttattagacaataacaagtgttggcaagggtgtagagaagttagaacccacaaacccttctgaggggaatgtaaaatgaaacagctgttgtggaaaaccctctgacagttactcagagaatcctggctacatattagactcaccttggaagctgggaagcttctaagaagcacccatgcctgagccccaccctataccagttaaattagatttaagtcagaatgttagacttgaagagactagatcattccatctgtcccttttacttccacattttgacattttatcaatagataagctgacgccccaagtcacacagtcattcagtatcagaagccagcctagaatgcaggtgtcttgattgtgatcttaaagttgcttccatactcagatcaactactactaaatatgttagaacatttactgtatacaaaggcctaggcatatgtctagtaataggtgtttatttatatgtaatattatcgaaatgtgcaggcatgtacatctatgtgattttgagaatttatattcctatgtcatgattgaattcataggctttgcagccagattgcctcgtttgaattttggcttcactgcttctcagctatataaccaagttacttaacctctctgttccttactttcttagtgacacactggaataacagtatttctcctatggactaaatgagttaatgtatgtaaagtgatgagccagtgttgagacacaggaaatgctccataggtgtcagctattgtaatgtatgagtcagattgtactcagcttacaacttctgaaactccacagttattacattcattcattgcaaaagaattataataaactatgtggtctgcctcatctgtctcaaattttatatacctttctataggctcttaacagggtctatactctcatgcttcatagcccatgattttttatctcctggaaaacatgttgatgttctaatttattttcttcatctctgggctcactgttggaccactacatctcagctcagttcagcaatgaccttctgtgtattttgttaataaatgtctcaggctgccagaatgttgctctgatgtagattggtatattgcatcagtcatcaccaggtttatatttgtttacatgcagaacgattcttgtctcttgaaggtcatatttagctgataagcagtattcagaaaatctcggattattttgtctgggacttttagtgatgattataggctgttacatgggaagagttctacctggagaactcagaatacagattgaagcctgttgtctctgatctcccctaggttctaagctttgttgcatgaaatgtatttgttacacaaacactgcttcagtcaacaggcatggaagaatggaccagttacagtgttgttaattaccacttatcgaatgctcttaaaggagcccttttaaaaaaacctttctgctcaaagatagtaaggtgttaagtagagtgacagtcagattaaggacaccccgctgaatcttcaagcaaagagaaaaactagaatttggggtgagacggtatttagaaataaggagataaaaatctgagctgaaatagatacagcaagcaagatcaagacttgcaccacaagttacgtaggtcaactctagtaatttgacatagtagaagtagaataggctattttgaaaaatagtttcctactttaggagatttgaggctcccaagaatatagtgaaggcacactctagggaatgctggtagctgcccaaacaggtccctgttgaagtggcttctgatttatgcatttggaaatttaatcttaagagttcagagttgaatggactctcagggatgctaaatcacatataatttgattgagactaaataattaaaccatattgctaatctctaagttttctatttttagataaggtgtatgggaaacaaacttataaaagattgctttatgaatgtgaattcagagcaagagcagttagtaataggatttgaatatgttctgataccacattcagctgataatcgatttacctacccttcaacaggaggcccaccttactggagaagttgttacgcctcccattttcacccctcccctgttagggcttatcatctctttaacttttctctaagtctttgtaactgactgtccgtgactacctctgaatactcacacaattttattaaatatgttaaaactttctatcaagttattctccatcctcatggcctgaaagggtctttcactttaggatgacttgacatgtctctgctgacacccatttagtaggttgatcatttccaaatttccaacaatgcatcactgtttccctggtgttcatctgtcactggaagtgttcagtcagtaggatgcctgtttcttagaatattactaagagggttacttcattagacaactggagcagatgacctttaagttctaacttatgggaaagtagtgattcttttacctctgtaggccttgctgatcctggaagatttctttgaagtaaacctaagaattagtcatttcacggtatctgcagaagatttgtcctaggatttcctagataccaaaatctgtggatgcctaagtcctttgtataaaatgatgtagtatttgcacagaacctacatgtatcctcctgtataaatcatctctaattactcatactacatattacaatgtaaatgctctgtaagtaattcttatcacatatttttacttgtattattttttattgttgtattgttatttttaaattttttccaatattttaggtctgtagtcggttgaatccacggatatggagcccgcagatacagagagtcgactgtttgttttcttgctttttaggagtcactcccaccgaaatttgacataaatatcagcttggcatatgttagcagtcacactgctgtgtgttagcaattccattacctgcctgttaccctatcactacaccacattctagccaaactaaagtgctgccgtttctcaggcatgcaccccgtcccagctatgaacccaaatggaatccattctcttttttttgagatgggatctttttctgttgcccaggctgaagtgcagtggcatgatctcggctcactgcaacctctgcctcccaggttcaagcaattctcttgcctcagcctcccgagtagtttggactataggcgtgtgccaccatacctggctaatttttgtatttttagtagagatggggtttcactgtgttggccaggctggtcttgaactcctgacctcaggtgatccacctgcctcagcctcccaaagtgctggtattataggcatgagccaccgtgcccagcctaatccattcttcatggtctagttgacactgtccattacctcccaacttccctaattttaatacagatccttcacgtgttttgtacttctgatggttgttatgtggcatcttgttaataggtacttttatttttcccataatagtgggtaagcccttgatagcaggagtttatttctttttatttgacttccagcactctgatgcactctgccatccttgttttaattcgtatcaatatataaaataatgtagatactaaggacaatatcagaatgttaaggagaggcatggttacatttaatgttaaaactcagactataacctatataggatacttgaaagaaaagatcagaattccaagttacttagggaaactttagcattactatagaaatccaaccaaatataatgggattagggtgccaatagaaagtgaggaaatggaacgtggtgtaaagtattatttcaagaagttttggtgttcaggaaagtagtttgagaaggagggaagggtcaagaaaagttattttttggagagatgaaaaacattttcttaggcctagaggatggaactagaaagagatggaatatttcagaaagaatattgatggagagcgatatcctgagagaagagggggaggtaaaatctggggaaggggaggggtacatttttctctgagacagaaagaaaggcgtaggtgtaaggtaggagtgctgagttctaccagtttccctaatgtgagagtattcatagtttccctaatgtgagagtattcatagtaatctattgaggatgaaaaagcaagagtactagaagacatgagaagagctgaggtgtgttgtagcttactcatgaaaattatcttgtatatttcttgatattattgtccgtcttttccagctagatagtaggctccatgaggaaaaaggttttgctgtcttgttcaccactgtccttagcgccaaaaaatagtgcctggcacatcatatatacttcataaatatttgttgggtgaatgttgaatggagagtgaaagaggaaactaactggagatactcaaaatgattgctttcatcctttagctttcaataaatgtacagatcataactacaccatgttaactgtttcagtacagatctgtcagaaaagcttatctgaaagtactgaggggcatagaaaggtaattattggatttttttccatacttagagattggtagcatggggactggaactttagggttttggcaagtatgttttgggattatttgaccaaggagtgcaaaatgttgttgtggtaccctagcgactcttccattaaacggaaccttgatctctgatagcttgatagatatggcattaattattagctgcttacacagtaatattctcctcatcttccttaggattcctgtattgttagatgtgccactatacccagcttaaaactacatttcccagcccttcctgaaaatagaactcatttatgagatataggcagaactttctagatgagattgctgagaaagctctctaaaagaagctgacctaagaggacaccctggtgtactttccttcttgctgcctggaatgtaaatttaacggtttggaacttcaggggttacactgggaccaccacacaacctcgaggatgtaagccagtgctaaggatggtagaataatgaattgttgagctgccatattgggattctttcagccttcgtgttttgagacattttattatttcaagactgatttgttataaaactctatcttgtttaaagcactgttattttggatctctgtttcttttagtagaaccccatttattagaaaggaattgagggactagaagcctcaacctggtcaaccgaagagctgatttcatgggagtaagcataagagattgaggtcagagaagggtttctaagtgaggtggctgggtaatgaaagggtctaagacagcagtccccaacctttttggcatcagggactggttttgtggaagacagtttttccacagatagggcggtggtgggggatggtttcaggataaaactgtttcacctcagatcatcaggcattagattctcataaagaccgtgcaacctagatcccttgaatgtgcagtttacaatagggtttgtgctcctctgagaatctaatgctgcctctgatctgacaggaggcggagctcaggcgggaatgctcgctcgccagctgctcacctcctgctgtgcgacctggttcctaacagaccactgttggtaccattacctaagagatggtcataaggagctaaagtagaatgctggtgaaagttcctggcgtagacaaagtcaaggaaatagtatttgtatgtacagatgggaaaccaagaggtaaccctttgattaggccagtgtttctttgagttttggtttcaggggccatcaaggatctgtgaatctatggacccctggaatcttcttttaaagactgcaatttgagatacactataaaatacagtcaacccttgaacaatgcaggggttaggggcaccaacccctgtgcaggtgaaaatatgggtgtcccttttgactcctttgttagcgaaaggaaagatggtggctggagtgatggttattaagtatgagacagttcattcaaatggaggcgatctgttcatcaagccattaggggagaagtgatcttttgcctttaagagtggagttgccttaaagtgggattgtagttgaggactagaaagaaaaagactgaaagacttcaaatcccttccattcttaatattctatgattccagattatctttactatgtattagttagggtttggtaccttttttttttttttgcaattaataaaactaaaactatctgccagctatcacccatatgcctttagttactgtttgtgctgacagaaccccaaaacagtaaaatcattaatgtagctgaagaatccaagtgttcaagacactgtctaattggagtctaaaagatgttaaaggactttcagactcttttaaaattaaatttgctaaattcttttaaatgattttgtagatttccataataaatatggcaaacatttctcttatgggatgtaaataatcaaactctgtttcactggagagtaatattataaagcacttagctaatcagattgtgagagttgctcaaaatttctaaccatgtaatttttgcatagagagagtgcctcctgctgtgcaattaactggttttattagctataaaattggttgatgctggttggcctgatggcctagtgcctgtagggagttagatcttggttcttgacctgattctgcacagttgagtgtcaggaagacttggaaatcttatagtggggacagcagctcaggccctaagaggaagctgatgagttgtttctcacgcttctgtgactaaagggagctttggaactttctagaccagttaatttttccttgttcgttttattctgtattcaaattaggtttgtgaagtggagtggtatggtttactgatgataagcagggctttgagatcatactacttgtactaaaaacctggctttgccatttcttgtaccctcgggcaagttttaaagtttctccttgcctaggtttcttcccctgtgaaagggtgattaatagtaagccctaactcatgtttgctgtgagaatgtaagggttcaatctacaggaagtttttggcctagctcacagtaggtactcaatacatgttagctagtattatagagtctgcaagttgaaatctctttgagcaggggaaagctttaataaaaaatgtttagaaggacctatgattttactggactttttttaaagggagaaagggggaggagaatatataaaaagaggcagaggcaggtgacctggcatcagactttattacatttactaggcaagtaagcttgagaaaatcaaatcaaagacccaattttctcaacacttaaatacaatacaatatctcatttttgagagtcaagtaagataaatgctttggaaatgtcaaagtgctatatttaggtaaaaacataagtaaacaaggacagtcgaatataataactacatgaggctaattaaaacaagcaaaatatgtaaatggaatccattgatggaagacataggaatttactcataagcttgacttgcttctgaatgatcattgattataaaggaaggagaaagatgtcagagaaaggacttagcattggtggagcaacctggcatttgctgggcactggagtaggattactgtctgccttttacagatgagaaaactgagtctcaggttaaataacttcctcaaagtcacctcactggtaagtggcagagccaacgttgtaatgaagcctatgtgactccagaggctgtcctaatacaacatggttaattacctccaatccatttgtcacatatttattgagcacctactctgtgtgctgttaataatacattaattttttcacaaaaatggatagaaatgtaaagcatgaagggatctgaatgacaattttgtgcaatcaagtcattttgtaggaaggaaaaaaggcccagagtgaccaggtcgctttagggccatccattttggaacagaattaaatttttactcacctagtccaatgtttgattaagttatattgctattcaatttcgtagatgcctaatccttcattagttccaatttgaagccttgtttggggattttctttggggataatttccgtatgattgcttcgaccaagttgcataagttgtttgacagaaagccgactgaattcttgtctgtgtttttgtcacccaaactgagtacgggttgtttcaatgtattttactctttctttctttcctttctttctttcctttccttcctttccttttcttttctttccttccttccttctttttttttttttcctggatctttgttgcccaggctggagtgcagtggcacggtctcagctcactgcagcctggacctcctaggtgcaagtgatcctcccacctcagtctcctgagtagctgggactacaggcacatgccactacgcctggctaatttctgcattttttgtagagatagggtctcactatgttgcccagactggtcttgaactcctgagctcaagttatctgcctgccttggcctcccaaagtgctgggactgcagaggtgagccaccacacctggccttactttttcatgttatcagtgacattctggtgtgaacacaaagaatgtaaaatctctttgcctttttgtgatttggaaatagctcttgaatccctggtcttaaatcttcactctgtttcatccagtttttgccaccctcctatcctgccaggtgagtctgcccttagttgggtatgtacttaactagagagcagctctagatccctggagggaagcccaggctcctcccaagtgactgcacacagtgagtcggctgcatcacaccaggaataccattgagcaataggagacttcccagcactggtgactccatctcagttgcttaagaagagtggggaaatgactggtgtattttttttttcatagcatttgtaactgtttttcttccaaagaaaagtcttcatgatgtcaaacatcattcagaatataggatgtattctattatgggtttgaattcagttcatttatccttctttattgccctgaatactaaagagcatcatttgaaaaagaacctatggaattgtgaagtttgctgctttttatgtgactgtgactgaatgggtcttgttaagcccaaagtgactcaaagggcatgacctgtgtataactctctggtgattatatacaggattgaaaatcctccaagcctgcttttaaagttgtagcacagcagttttagacatagaaaggctggttttccatcttgtcatacaggtaagaatgaagttttttatttttatttaaaaaaagccctggttatgatactcttggggtaaaaatgcactgaattaagcagcattttgttttgtttttgactcagtcaagatcctgggatcatgaaccttttatacttttgataactgagattgaaaactctccttcgttttctttataatcagagcctgaaacaattagcaggcaagggaagttctccctacatctttcctgaaagatctagctgttttgacgttatagatttgtaaatactgttttaggagtttctaaatcaataatttctccttgcgttcacattctgctgccaagtacaatagttctggactctgtagtgataaagataagaggtatgctgcactgaggagaccctggttcttttgttgtggatatttatgatactggccctggcctaggaatggagcttgtgtgcaatgtggccccactcctgagtaccaggggtccatctgtcagcacacagcaaagaagcacctaccgtagctttcaggtcgaataatgggtattgaatgtggacttggcaaaaggctggctcatctgtagaggtgactttggaaatacatggcaaaatgtattgggtagaaaattggaaatagagggtttaaggttaagtaagcctttcatccttgcttaatcctaaaaccctacatttaagtacacggcaaagaaaacgtacaatgcaaaggcaagggcatgcttgaagaatgcaaagcagcaaaggattctcaagaaattgtgctcatgtaattgccttgggcaacagtgcctacaaagaggcaaagtgcagctgtccaaatcctcattcttgaagtttaaatccacagtgaactagtgaacataactctgaactgtgcttcctactgcaattatataattgattgactgttactcttatgaaatgtaccctaagtaacccttaagcatgtaaaagagcagaatgaatactgaagcaaattcatacctcccggcattttactcttctcactgtacggttcagggttaacatttgctaacataggctctccataattatttaaacacactgaatatcattatcatcaaatactgttcattcatcctttaaatgttagtgcttcctatatatagggtatctgacttttctcactcatgtggtattatactagatattttataagaggagcaaagtaggaaaggctcttctaaagggtagcagaccataggagcagacacaagaagggagaggagcattatgtaataaaatgctgaaccacatgcataccgagtaggttgaagtccatctagagcccacgtgatttccagtatccacatctttagtctcatagcttctcagaacctatggccttctgtaagagtaacctgaatgaacgctggtttgttccagagccgtatcgggagaaaatcacaggtcagtggttaactaaatgagtttttatatgcctaccgtagtcctgggaaggtaaggaaagagcttcactttttcctgacccaatcctagggagaatctttccatgcaaataaatattttaaatttcgtagtcatatgttcttatatatattacatataacatgcctgtactgctttttctgattataaaaattacatagacttattgtaaagaatttgggaaacaaaaaaaattacgatccctattctttctgccacttagaaatagatgaccacaataatgttttctttcttccttgccttttttctatacacataatttttatttttcaaaaatgtaggatcatctcctatattcttgaactttgggggaatatagtgaccctggatcatattggcattttggagatgcagtttttggagagagccttggaccttggatgtagagtgcagtgaagagatggcttcagctgagtgactggatgaaccactcttctttctcttactgccacactctgatgaaatgatagactcctacaattgatgaggaccggctgggcatggtggctcacacctgtaatcccagcacttttggaggctgaggcgggcggctcacctgaggtcaggagtttgagaccagcctggccagcatggtgaaacctcatctgtactaaaaatacaaaaattagccaggtgtggtggtaggcgcctgtaatcccagctactcaggaggctgaggcaggagaatcgcttgaacccaggaggcggaggttgcagtgagtcaagattgcgccattgcactccagcctgggcgacaagaatgaaactccgtctccaaaaaaaaaaaaaaaaaaattggtgaggaccttagagatcagggtccgtggagtagttatatgcttaaataccacacacactagaggacttgaaggagtaattgacattcatgggcaaaagaagtgtaccttgtgtcagtgccacatcacatgcagaagcatggaccccgctgagacacaatcttgctgctaggtggagggaagtagctgttgacaatcagagagaaaagcctgttctgagtataagatgtaagtggaacctgccagccttatgatgtggggcttcataaacgattgctttcattctatacccatcaacaggttgttgttggtatctttgctttctttcacaaaaataagtgaactcaattttatttttacaatatttatcacaaatacatatagagtacataaatggaatacaaaaggtgtaaaacaagctttttaacttttaggtttaggggtacgtgtgcaggtttgtaacatgggtaaattgtgtgtcatgggcagttagttgtacagattattttatcacccaggtaataagcatagtaccctataggtagtttttcaatcctcaccctcctcccaccctccaccttcaagtagatccctgtgtctattgtttcctactttgtgtccatgtgtacttagtgtttagctcctacttttaagtgagaatatgttgtatctggttttctgttcctgcctttgctcacttaggataatggcctccagctccatccatgtttctgcaaaggacataatcttgttcttttttatggctgcataatattcctagctccatccatgttactgcaaatgacacaatcttgttcttttttatggctgcatggtattcctagctccatccatgtttctgcaaaggacatgatcttgttcttttttatggctgcatagtattccatggtatgtatgtaccacattttctttatccagtctacctttgatgggcatttaggttgattccatgtctttgctattgtgaatagtgctgggacgaacatgtgtctttatggtagaatgatttatattcccttgggtttcccccattatattccattacccagtaatggaatgtaagtatggaatataagtaatagaattgctggattgaatgctagttctgttttaagttctttgagaaatctccaaactgcctttcataatggctaaactaatttacattcccaccagcagtgtatgagcattcccttttctgtacaactttaccagcatctgttatttcttgacttttttttttttttctgagacggagtctagctctgtcgcgaggctggagtgcagtggtgcaatctcggctcactgcaacctccgcctcccaggtttaaacgattctcctgcctcagcctctggagtagctgggattacaggtgtgtgccaccatgcccagctaattgttgtatttttagcagaaacaggttttcaccatgttggccaggctggtctccaactcctgcccttgtgatctgcccgcctcggcctcccaaagtgctgggattttttaataatagccattctaactggtgtgagatggtatctcattgtggttttgatttccatttctctaatgattagagatgttgggcatttttccatatgcttgttggccgcatgtatgtcttcttttgaaaagtgtctatgcatgttctttgcctactttttaatggggttgttttttgcttgtaaacttttttaagttccttatagattctggacattagacctgtgtgagatgcatagtttgcaaatattttctcccattctgtagactgtttactctgttgacagtttcttttgctgtgcacaagctcttcagtttaattagtcccatttgtcgatgtttgcaaaacaagctttaaagacacagaatcttttaaggagtctatggcagctctccaaaattaaataaacaaaataaaatttgggattaggttgaaaaaaagttttgaattgaaggaaaagagtccttctgaagatggagatattttttaactgttggaaatacttcaaaggaagataattaaaactatgatatttaacttcttttaatatctctgaatcagtcgtttggaacctgtgtgttagtcgatgtctggaaacatggcaaactgagctaatggctcgttttcccctgtaaacttatagaaatgccgataaaacaaacaacaaaatactcacgacctcccaggttaatcaacaaactaaaacttctgtaatttttctgataaaggaaagaggaaaggagaaaggaactggccccagctggaaacaataagagcaggcaaacaataatctgtagagacattttggtaccctaataggacatgactattagacatttttatgaatagaccttgattcctccgtttatatctcagattggggccctttattttatggagaatcttagagcctgagttaaaattggcactttgggaggccaaggcaggtggatcatctgagatcaggagttcgagaccagcctggccaacatggtgaaaccctgtctctactgaaaaaaaaaaaatacaaaaattagctgggtgtagtggtgcgtgcctgtaattccaggtactcaggaggctgaggcaggagaattgcttgaacctgggatgcagatgttgcagtgagtggagattgcaccactgtactccagcctgggcgacagagtgagactctgtctaaaaatgtatatatattgttgcagtctgtcccagtcttttcttagatcctccaagtcctagtttggaaaattacatgtttatcttatggatacttagaccgtagtttgtataactttaagatgactattgaatacatagactctgatcactcatctctgcaaaaatttagaataccattttttaaacttttgtattgtggtaaaatatgcatagcataaaatttgctatttcagcgtaattaagtgtataattcagtggatttatttgtttatttagacagggtctcactctgttgcccaggctggaatgcagtggcacagtcacaactcactgcagctttgacctcctgggctcaagccatcctactgcctcagcctcctgagtagctgggaccacaggcatgtgccagaacacctggctaattttttatttttagtagagacaaggtctcactatgttgcccaagctgatctcaaactcctgagttcaagtgcttctcttctcctgcctcagcctcccaaaatgctaggattacaggcatgagtccccgtgcctggccagtggcatttattatagtcacagtgttgtgcacccatcaccactgtctgtttacaaaaattttcatcaccccaaacagaaacgctgtacccattaagcaataactcctcattttctcctcccatcagcccctggttacaacctctaatctgctttctttattgctgaatgtgtctgttcaagatagttcatataagtagaatcatacagtatctgcccttttgtgcctggcatattttacttagcgtaatattttcaaggcccattcatgatgcagtgcatatccaaacttaattcctatttacagcagaaataatgtttcattgtttttatatatagcctcacattttatctgtcagttgataaacactttggttgtttttaccttttgtttattgtgaataatgctgctttggacattgggtccaagtatctgtttgactccctagaaaagcattttgcacactgagaaatgtgtagatcttttatatagaaaattttagtcttccagatttcacatgttgactgaaattatttctgtgtaacttaaatatacataaacataaaactaagaattaactccttataactctcatatacaggtaaattcaaaaccaatttttcaattaaacaaaaataaaatcaatacagtttaaattaacgattgttatccaattatatttactgaaaataaatggcttatgttggttttaatagtgtaaaaagatatacttttgtatgatggaccattattttagctttcatcattttcatgttttccttttaacagtgaacacgtttttaaaccactaatccattattttgatgcgcagctcatttgctagattatcccagaatataaatctggaaaacaaaggaaaaacagcaattcagtgacaaattatttactacacatttattgcaacagtttttctgttttttttttttttttttttgagacggagtctcgctctttcgcccaggctggactgcagtggcgctatcttggctcactgcaagctccgcctcccgggttcacgccattctcctgcctcaacctcccgagtagctgggactacaggcgcccgctaccacgcccggctaatttttttttgtatttttagtagagacggggtttcaccatattagccaggatggtctcgacctcctgacctcgtgatccacccgcctcggcctcccaaagtgctgggattacaggcgtgagccactgcgcccggccaacagttttttttttaatgagctcttgcaagcaggtgcctataaaggcaaaatccagagagtatatctgcttgctgtcagagggtgattgcaacaacacaggttttaataatttggttaacctcacacttgtttttattggagcttatttgaattgctgacatcatgatgtcatttgaccttcatttattacaaacatatcacttacttattcagtctgcctctgtttactgttggcccatttccatgaaatcagtacagcactctaaaataacatgttgtttttattatgttaaatcagattcttagtttattatataagaacctaaaatcttatttcatgaaaatgtcatttacttggaaataaaactgcaaatttttttgcaaaaaatatgagcacaacaaggggatagaggataatgattgttattttgacattagcatttgccagcctaacagctgttagacatgcttaccggcacctgaaatgatcaatcctatctcctcaagatatcacttggcaatatcttaaatataaacatggaaactagctggcacactgaaaatcccatcatgctgcattgtaaagtggtcatccaaggattcagaatatacttgtatttattctttattgatagaaaaatctttaatgatcacaaaattcaggtgccccaaagaatattccgaaggataacactgcctcagtttgacaaatactggttcaaacattaactctattgctttactcacattgaactttaatgctttattcacaaacagttggtcctaccacttaaaatgggggctttgtgatttccaaactgcacatacattctatttttacaaaaaactttatttattatttctaataataataaataaactttatttctaataataataaataaactttattattatttattattatagtaagaagtagggttgccatgtggatgaatagttgtgttgcacaaataatacatcttcttcctagttgagaaactaaactatgagaagaaggttgcttgatgaacacagacccctctatacacacgaggcactcaataagtattaaggaattgtttgattaagcagcgatagccccctttgacacatgtattactataagaaaacactgtcaaatcaagcttgataagcgtctcatgcaatcaatgatattctttatctcaatttcatattgaccctatgccgaccctcaaacttgttttccacctagttacaccaccttcaaaaccagtttcgcagctgtttttaatgaaatcccaactcttatcctatgaaaaaaactgattagcaaataacactaattcatagtgtacacattcccaaaggggagtccctttctgaccaaagtgtctccattttcattaactgctgacattcttcttgatgatcctctttctggggtggggacttataaatctccagtctacttactgccagtaatatgcctttcattgaaaaatactgaatattttctatatttaacttacgtgattttatacctcatatttataattcttgattagccatattttatctccataaaagtcataaaatattgatgaatataagatttatgtagagatcatctttctattgacattagcagatatatattatagtatctggtttttttgttttaaaaattaagtttaataaatacaacttatttttaccatgtcactcttcagtaccactttctaatatttaacacgtttcaaaatgtataaatacggcctcctatcgaatcaccactgaaggtcaagaatctacctttatatgtttatagtaccttgcatacagaaggagaacaataatatattttgcataaatgattagataaataagtgggtattacctgaatacccacttattattgactcatctaaccaacagaagttcagtctggctgtagcctctcagaacagacattttgcaaaatatatatattggactattaggaagaggaccttcactgtaaataaatggggtatctcttcagtcattctcctccattatcagtcaggtgggcttgctagcaagcgcctcttttatcgcttcttcaaccccattttctttttaaattttcagaaagcttcagtagaaatgtttcaactttcaagaaagacagctttagcagaatcacatatttgttgggcacatatatacctttgtaaatgtacatagaagaaaactaaggccgggcatggtagctcacacctgtaatcccagcactttcggaggccaaggtgggaggattgcttgagcccaagagttcgagatcagcctggacaacatagaccccatctcttaaaaaaaaaaaaaattaattagctgagtgtagtggtgtgtgcctgtagtcccagctacttgggaggctgaggcaggagaattacttgagcccaggaggccaaggctgcagtgagccaagatcacaccactgtactctagcctggacaacacagcaagaccctaactcaaaaaaaaatgagtaggaagcctgttttatttgactattataaatgtgaaatgttatgcaactttgcattttattttttgtacaggcagaaatactcagtgtcctcagtcacagaaacatcatccagttttatggagtaattcttgaacctcccaactatggcattgtcacaggtaagaattcagtgtttgacttctttctttttccaattacctagctttagattccttaatatgctaaaatgcttaatattaggctcagttatgaattgtgtgttactgtcagatgtcacttttgttgctataaagcattaataaaactgattatatcaatataattaagaatagtgtttccacttctacccatgtttaattgtgctaattatatctgcgtaaatgctatttaaatgcactcgcagctgcaataccaatatttcaaggtgccgtttaactaaaatttcatttaattagctgaaatgaaacatgttttttgtaactctgtgaccttttataaattaagatttcttgagctattcatgttgtaattctttgcaaggcattttaatcccattagagcattctttcttcaaggtctctgacataagaacaatatttttcaggtttggtcaactaagttggtaatgaccttgatctaaattatcacataatttggagcagcagtttataactgacagaaatacgctttctaaaaagcagcacatagaaagttttgccacatgaaaatacagaaagacacatatcttcaatactttatgctcatatttgtataatccactgaatagcttgtaggtctataatcggttttacaacaaataactttgatctttatcttggcaaatctttgattaaaacaaagtcaaacaagaaaacctttaagtattagccacatgttctcggtagaggtgagaacctggattgtctttatagaaaataacaacaaaacaccctcaataaaaaggattgtattaagtactttctataaattatctcatctaatacttagagtaatcctatgagatcgataaaataattcctattttactagtaagaaactacatctctaacttaagcaacttttccatggtcacctagctagtggtagaaccaaagcggtataaatttctcaggctgattctccacagaagctcctcttctatgcaagctaggttctggaaggctgtgagctgactggttcttaaactcagagagacatggttactgttataccatcttctggcggcaggtagtttaacatgcttttactcttagtagcattttaacctaagttattaagtggagggacttttatccccaattcactgtctttagatttgtgactgaaatggggcatgtagcaacttttatcttgagtctatatttcttataaatgtgaatacccaagaatgggttatattgttggttgagggggaaccatacctcacattttaagtcagatttctgatttaaagttaaacctttctctgacccatataccatgtggctccttttttccgtgtccattgtatctacttctttttactagttatatttactttttaaatctgaatccagtgttctgatcctcgtttgtggctgatgttattcctccctaagaaagtgtgacactcccaagagactagaaactctgtttcttattatatactcttgatgtttaatgctttttgaaaatatttttggccaactaatgagctattcatgaagttttctagtttcttgaggtgagggtgaaggatagaaaagggaacttgagtggtgatatgaaattctttctccaagagtttactctcagtaggaagatatcaaacattcttagccagcatatttcccctaggtcatctcatctgaaagagggagaaagaatccaggaagttttcttccattcagtatttgtatcagactagtcaatcctttatttcattcatccctttagcattctctactcatacttgcacctacccaaattcttcagttaaattgattagttttttatggatctatatctctttccctgtagagccagtaagtaagcaactggctttacattgtttagttaacattaaacctaaagaattaaaacaacacaagtttcagattatgaggcagtagtagattgtatatttatagctctcttattgacctatgagattgattattaaagagacctgttaggtgagttttaatgttttgaatgtattgatttgatatgattatctttgttcctagagatgttagttttaattaactaagtgcttgtttatgtgagcctttcagcctaccttgtacagctatgctctgtgcatgggtagtagaaaatatgacaactgagtccagtttgggagtgaagaaatcacatggattagtgatgacgacacttactctgccactggaaatgagcacaaataagtcttagtatgaggcagttaagagagaaacaaagataggtgggaaaactgaccttgatcacccagccccagccagatacccctctgtgaaccttatcatatttatcaaatagtggaggctctgaaggaggaagcttggatggcttgaatccattcaatttgaggtagtttttttttttttaatagaaaaggttgttgcagcaggcagctgttgtcattcatgctgagaacttgaaagaatgatttattagagtggtggaatggaatgagcaatggaatgggaattgtgagatgtgagatcttgtcttgattctgccagagcttcatagatgggtcactgatgatctctctctgtctcagttttctcatgtgaatgaagggactacaatacatgatctctgggtgtgtatgtgtgtgtatacttgtgcatgtgtgtttgctgaaacttttttatcacagacatataaaacctgcttatcaggggagccagggaagagactaagaggtagctgccaatttatttcccttggaagggaaatgaacatctttctcccagatctacaaagaaatggggtgacaagaaactcagagtccaaagccaaaagaaaagatacaataatggatcatcttttcttttcttttcttttttttttttgagacggagtcttgctgtgtcgccaggctgagtgcagtggtgcaacctaggctcactgcaacctccacctcctgagttcaagcaattctcttgcctcagcctcctgaatagctgggactacaggcgtgcgccaccatgcccagctaatttttgtatttttagtagagacggggtttcaccatgttgggcaggatagtctcttgacctcatgatccgcctgcctcagcctcccaaagggctgggattacaggtgtgagccaccgcgcccagcctggatcatcttttctttgatctttggaaacctcttcattctgtactactcccattcttttatttctgtgtgtgtgtgtgtgtgtgtgtgtgtgtgtgtgtgtctgtgtaaaacataaatatgtgagggcagggggagctcctgggagatgaaggaaggagttgctggataccagaccatgtagctcttttgtagcaagccagattggagaggaacccacacccaaagtatctggtaatctaagagtaaagaaagggtggcagactgggttccagggttctggtgagaagtgatttaggatcccagatgcctggaaattgctttgttctcaggggctgatctcttaagttacctgttctgcgttagcctctattactcgtctaagagaggagactagttctgcatgatttctcagcaggcccaaattctcattaaacccagccaaggaaaacatactaatttttaagtgcccaatctcatttcccttaacttgatcttgatttattttaagcacagatacatctaatttgcatgttttgatattgtgctagtctttttttattagtcaattagagacaagtgtcacattttgttataacacatttcagacatttgcgtaaatttattctattagttataatttaaatgaagcttggtcttggtgacattttattacaaagagatttcgtggtaatggtatttgtttcaacaattcaacaatactgatactatgtttacatttttcaaagccagctattatcaccgtaaaactcaaagggaagaatcatcttataaatgaaaaggaaatttctgcttaatgtggttcttaatgacttcaaaaaaaatgaaacaaatactttatactaaaatccagtaaactactttctacagagaagtggtttgaaaagcatgtaactatatgtgtatatagtgagtccacaatttccaatgggaaaaccaaaaggatgaaagaattaaatgcttatttaaaatagttaatatgttagtttagctatccacgtacctaaagatgacattttatgtgaaataaaggtaataatattgcctttcttgcaacttcaaagtcatgaaactattttatttaatcatgtatcttttttattatactttaaattctgggatacatgtgcagaacgtgcaggtttgttacataggtatacatgtgccatggtggtttgttgcacccatcaacctgtcatctacattaggtatttttcctaatgctctccctcccctagcattaaataaacgcccccgacaggccctggtgtgtgatgttcccctccctgtgtccatgtgttctcattgttcaactcgcacttatgagtgagaacatgtggtgtttggttttctgttcctgtgttagtttgctgagaatgatggtttcagtttcatccatgtccctgcaaaggacatgaactcatccttttttatggctgcatagtattccatgttgtatatgtgccacattttctttatccagtctatcattgatgggcatttgggttggttccaagtcattgttattgtgaatagtgccgcaataaacatatgtgtgtgtgtgtctttatagtagaatgatttataatcctttgggtatatacccagtaatgggattgctgggtcaaatggtattccatgtcttcatcatcattagaatgactttttaaagttaacatggttttcggagtacaatgtcttcactgtagtgtaagatgtttgaaatatcatgctttggggaaatctctgtattatactatctctggatatttatctcaagctacaagtacccaatggcataacattaggattgttgaatattttagtcccatatgctatatttgtagtcataactgacagcttttcaaagtgatctttagaagacttgttttcagtgacatcccgcagttggaattgagagttcatagttccaggaataattgctctgtgttaaattttgttgcccctccctacttccctccctctcttttgtcttattcatataggtgacctttataagctttgaaaaactagctttgattgaggtcatctcagacttatatatttttccccaaacagtattttgttgttcaaataaattaatggagagagcatcttaaaatatgagggattttagaagtatctgaatataagttgactcattcttttcttaggtatagttttacaggactgcagttgccatctttataatatccacatgactgttccaagtgtaaacatatttatcttaagaactgtgtcatgcctaagagccattcgtaggttgccgcttgtctgtaaactggcctacttgtccttatgaataatgagggctgactaaacttgattgaaacgtgaggaactttgtgtttgtaaaagttagcagtgtttcttatttcaagggttttatggcattctcttgcttattctattaaaccttttattctttaaaccttacagtgggccatatgtatgaagtttataaagtattaatgatcttcttaaccaaaacaagaaaaaaattccaaagagttcccagttctctactgttttatcatctcaaaagtttaaataagatgttctgctgccattgttgtttttactgtttactatattagcactttctctgatgtgctttggaggttgattgatgaatttcttaggcgttttgctggaattaatttatgggtgtttgactagatggtgaagagtagactgagagaatcttcaagtgaccatgtcattgttttcttgctgtcttgtcttggtgattaagatgcaattctttttaaaaccaaatggcactggttatcatgtttcccaaatcagaaatctattttagttaatattttaaagaaatatgaagccacagcaaaaaccagtattatttttactacagagtgttaatggatgtaaagaggttagcgagatatagtgtttaattaatgatgtttattttcactatatttaatgaataatctttttatctcctttaaagaaaaataatgtttattggttaaaggtaagaaataatagttaagacaccaatttaatttcaagatctttgactgtattatgcattgtacaatggatttcacttttcatgaaatgcctcagttttcctacttttatttttgttttttattaccattcaacttatggtttttctacctttaaaataaagataatgatgaataaaaataaaaacataacattgtataaagcaatacgtttttgttcacttttgttaactttaaaatgtatgtagatatattaatatatcacaacaatagcataaaggataagggagggaatggagttatattggagaaaatcttctatattttattgtaattagattagtattaaactgaggtagactgtgctaaattaagatacattttatgatcccttgaactactgctaagaaagtcattcgataaatataataaaaatcaatcaaggatttaaatgatagattaaaattttttattgcaaaagaggacaataaaggaggaacaggagactaagaaggacaggggacatgaagaaaacatggcaaatttaaacccagctgtatcaataatcacattatatgtagatgttctaaacacttcaatcaaaaggcagagattgtcagatcagattaaaaaataaccagatccaattatgtactctctacaagagacatatcgtagattcaaagatacaaataggttaaaagtaagaagatagaaaaagatatgccatgcagacagtaagcaccagagagctggagtaactatattaaatttcagacaaaatacagcaaagataagaaatattacttgagataaatagaaccatttcaaaatgataaaaggatcaagacatcagaaagacatagcaattggaaatgtatacacacctaaaacaggtctcaaagtatgtgaagcaaaactaactgaattaaaaggagaaataggcaattcaccagtaactgatttcagtattccactctcaataattgatagaacagctagacagaaaataaaatgggatatagaagacttgaagaacactctcagccaactctacctaactcacatgtaaagaatacatattttttcaagtacacatggaacattctccagaatacgtcataagggaggccataaaataaatctcagttcatctaagaggactgataccatacaatgtgttttctaatcacaatgcaattaaaattgaaattaacaacaaaaggaaatctggaaaattcccaaattttggaaattaggcaacacacagctaaatacctactgggtcaaagaagaaatcacaatagatttttttttttttttttttgagatgaagtctcattctgtcacccaggctggagtgtagtggcgccatcatctcggctcactgcaacctccacctcccaggttcaagcgattctcctgcctcggcctcccgagtagccaccatgcccggctaattttttgtatttttagtaaagatggggtttcaccatgttggccaggctggtttggaactcctgacctcaggtgatccacctgcctcagcctcccaaagtgttgggattacaggcgtgagccaccacacccgtccagaaatcaaagtagattttaaaatattttggagtgaaagaaaatgaaaatgtaacatatcaaaattatagaatattaaaattatagaatgcagataaggcagtatttagaaggaaatgtatagctttcaacacctatatcaaaaagaagaaaatctgaagtggataacctgagcctcaacctgaagaaactacagaaagaaggaccaattaaaaccaaagtgagtcaatgaaaggaaataataaagattagaacagagctcaataaaacagaaaacagaaaagcaatagcaaaaatcagtttattagatttgttaatctttccaaagactaaaggatttattaatctaaagactagactaaaagtttagtctttgaaaagattaataaatttgacaagcctttaactagattgatcaagaaaaaagagaagataaagattagcaaaatcaggaatgaaagaaagagcagtgctatggctcctgcagaagtttataaggattataaagaaatgttatgacagtctttatgccaataaattagataatttagatgcagtgaacaattgtcttaaaaagatacaaattatcaaaacagaagatctgaatagacctataatttaaaaattgaattaggctgggcgcagtggctccagcctgtaatcttagcacttgcggaggccaaggcaggcagatcacttgaggccaggagttcgagaccagcctggccatcatagcgaaaccccatctctactaaaaatacaaaaattagccaggcatggtggcacacccctatagtcccagctactcaggaggctgaggcatgagaattgcttgaacccaggaggcggaggttgctgtgagctaagatcatgcaactgcactccagcctgggcaaaagagcaagactgtttcaaaaaataataataattgaattagtaattttaaatatttccataaagaaaatcccaggccaagatgatttcactggtgaattctataaaatgtttatagaagagataacatcaattcttcccatactctttcagaaaatagatgccaatattctatatgaacaagcagtattattctgataccaaagtcatacagagacataagaaagcgacagaccaatattcttcatgaatatagatgtaaaaattcttaatcatattagcatactgaatccagccacccataaagaagattataaattccaattagaatttatcccagaaatggaaggttggcttaacatctgaaatcagtcaatgtaaggtaccataataaacaataaaatcatagaagataaaaaccctatatgatcatttcaagattcagaaaaagcatttgacagacaacactcactgacaataagaaatatcggccgggcacagtggctcacacctgtaatcccagcactttgggaggccgaggtgggcggatcacaaggtcaggagattgagaccatcctggctgacacagtgaaaccccgtctctactaaaaacacaaaaaattagctgggcatggtggcaggtgcctatagtcccagcttctcaggaggctgaggcaggagaatggtgtgaacctggaggcggagcttgcagtgagtcgagtttgcaccactgcactccagcctgggtgacagagtgagactccatctcaaaaaaaaaaaaaaaagtttaaaaaaagaaatctcaacagactaggaataaaagggaatttttccaacctgataaagagcatctacaaaaacccacagctaatatcttattccacggtgaaaagctgaatgttttctccccaagactgggaacaaggcaaagaagttctactctgacatctattcaacattgtactgaaggttttagccagtgtgatcaggcaagaaaaagaagtaataggcatccagattggaaaggaagaaataaaactatcttatctgacaacctataggtagaaaatcctaaggaatgcgcacacacacacacacacacacacacacacacacacaaaagctactaaaactaacaaacatgtttagaagggtcacaggatgcaagatcagcatttaaaaatctattgtatttctatatactgagagtgaacaacctaaaaattaaattaagaaagaattccatttacagtagcatcaaaaagaataaaatagttgggtataaatttaacaaaataagtataagacttgtacaatgaaaagtacaaaaattgctgagaaaattaaagatctaaacaaatagacatttacatatttatggtttagaagattcagtgttgtcaagagggcagttctccccaaaatgatctataaattccacacaattcctatccaaatcccagcagacttttttttagaaattaacaagccaatcctaaaatttacgtggtaatgcaaaagacctagaaatagccaaaccaattttgagaaagaactaactttgaggacttagactgcctcatttcaaaacttataaatctgtagtaatcaacataatacaatattggcacaatatctacagggatatagaccaaaggaacacaattaaaattctagggaaaaagcctcacattgattggcaatggattttcaacaaagatgccaagacagcctttgattgctgagacaattagaaattgatatgccagggccgggtgtggtggctcacacctgtaattccagcactgtagaaggctgaggtgagaggatcgcttgagcccaggagttcaagaccagcctgagcaacatgacaaaatcccatctgtacaaaaaatacaaataaaaattagccagcgtggtgatgtgcacctgtagtcccagctactagagaggctgaggtgggaggattgcttaaacccaggaggttgaggctgcagggagccaagagtgtgccactgcactcaagcctgggcaacagagtgagaccttgtctcaaaaataaatccatatgccaaaaaaaaaaattagagccacacctcagaccatacataaaaatgaaatgaactcaaaatggatcataagcctaagtataagggttaaactataaactctcaaaagaaaaatagaaaatcttcatgctttggggttaagcaaagagttcttagaaatgataccaaaagcacagccataatagaaaaattgagaaattggaatttataaaaattaacaatttctgctctttgaaacatgatcttaagagaatgaaaagacaaatgacaaactgggaaaaaatatttgcaaatcatatatatgacaaaggacttgtatctagaactaaaaaaaattattagaactcaataaaacaacccagtgtaaaagtggacaaaagatttgaatagatattttgcttaagaatatataaaaggggctaataggcacataaaaagatgcccaactttgttagtcactagggaaatgcaaattaaaagcactgtgagataccactagtgttatacccgctacaatggccataatcaaaaaaacagacaatactgctgggcacagtcacatgcacctgtaatcccagctacttgtgaggcagaggatggcagggaaggactgtttgacaacaggagtttgaagtttgagactagccaaggcaccatagcaagacccctttctcagaaaaaaaaaaaagacaatatcaaatgttggtgaggatgtggagaaactgaaaccctcatacattgctggcaggaatataaaatggtagagcctctttggaaaacagattgatagtttctttaaaagttagacataaacttaccatatggacctgcaatatcagtccctgaaatctacccaagaaaaattaacatatttacacacatagacatgtacacaaatgttcataggagcattattcgtaatagccaaaaactgggaacaatccaaatatctatcaactggggactgaataaaccaaatgtagtatatccatacaacagaatagtattcggcaataaaacagaattgaagtcttcttatatgcttaccacttgagtgaactttgaaaacattatgcggccaggcgcagtggctcaagcctgtaatcccagcactttgggaggctgagacaggtgggattgcttgagctcaggagtttgagattaccctaagcaacacagcaagacctcatctctaccaaaaaaaaaaaaaaaaaatcagcctcagcatggtggtatgtgcctgtagtcccagctacttgggaggctgaggtgggaggattgcttgagcctgggaggtggaggccacagtgagccgagatcaaggctgcagtaagctgtgatcacaccactgcactccaacctgggcaaaagaacgagaccctgactccagaaagaaacaaagaaataaagacattatgctaagggaatgatgtcagacacaaggaacaatttgtatgattctgtttatatgaactatccagaaaaggcacactggtagagagaaaaagcagattgtagggctggtgtgagagtgatgattaactgcaaactggcacaagagaactatttgtagtgatggaaaggttctaagactggattgtggtggtggttgcccaactttatgaacttactaaaaatcatccaataatatacttattgcaggtgagtttgtggtatgtaatttatacttcatttttaaaggatttttctcacttttttgaccttctgtgcttaaattttgagagctcttctaagtccttatgtgacaacaattgatttgtttacactgtcattaagctgtctgatttatgcatttaatatctatctcataagaataacaacttttaaagaaatacctatttatatacatacctttgtttcaaatttattcttccaacacctctttgggtttctcagttccagctaaatggcttttgattctcaactgaagtttactattcattgtaagttactgtcttttgtttgacagatatttttctggatgacattaacttttagaaaccacaccatggaacaattttttatatatttttgatgtcttttgttaaattctttaatgtattttctcaatgaaaatataaagtcttatttctgaaatgtatcttgattttaattatatgcttatctttccttttaaaatagaatatgcttctctgggatcactctatgattacattaacagtaacagaagtgaggagatggatatggatcacattatgacctgggccactgatgtagccaaaggtaataatatttggtatattcttatagaattagtggggtgcattttcccctcctgaaatggggacttaacatcagaaaatgttttattctgtctttagatgttctttttccagaccaaaagtagtaagaattccacagctgatggtacagataatattttaggtcattgcctttccactcctgaattccttttatcttcctcttaagactctactttatttctatccacgaaatctagttgtagcttcagggcagacatgtttgtcatgttttgtgatattataattgactagcttgcttgacacattaaatggaaaaatcatagttctgttgttctgaaagtctctacttagactcagtatccagaaaacatgatttattgtaggattagttctactcattttgtatacataatatgctaaaaatagaaaccacttgcaaaaaaaatttttatttgtcctgccatgtaaaagcaattcagattttattttacatttaatgtaaacttacttaggcatcgctgttggaattaaatatttttaatacaccaaacccctaaacaaagtgcccagtcttttttctcatacattcttgcatagatgaatgctttctaaagcaattcaaacttcatttatttttatcttttttttttccattttcctaactgaacatttctgggctttatttgtaactgtcagagttgctttggaaacaacttcatctaaataatgaacaccgatagttatatttgtattctagcaacccctacaaagtgtgtctgaattttcctggggcaattaactcctctacattttactactccattctctacaagcatctctttacaaagcaaatataatgtgatttagcactcagtaaggggagcaactcatacgttgatttcactgtgtgacttccaaaagtagcagtctttcctttggggaattgtctattttaagtttcatcaacacctaccaaattcttcaaatagggaaagtgaaaaaaaattttttttgagtttcatgctagatgctgctgctgaatgatgcctcattacattataaaaataataagctctgtgtttagggtggtgtacctgagactttatgttaatttgcttaattgtgtattgatgcatcgggcatctcaaatcatgcttaaactttcatattcttaaagatattttcatgtaatatcatagtgacttctctgtatgtcagtagaacacaaggaccagctctctgtaagcaaggtgatgtgcctttattggaggctgcctgagcattgtggaaatacccttaaataatgtaaatgcatatataggtagtacttaacttacagcacatcaccttacacacgtttgcatttagggtgctcagccagttacacccatgttattactttattggcacttagaatagatagacagcaaacaaaacagctaacatcagtcactctgcttcctgctgtgctctacttaagcatccctgattcccagcctgggaaactcttctccctgcacccccttaaccacatgccacatcatcccgactgagggataagtctcttggctccacatcagctgagtcattcttggtgttttctcaagagtgctagtgctctgcatcagaagggcaaggaagagaaggaatcgaattaggtagcaaactgggcctggtgcagtggctcatgcctataatcccagcactttgggagtcccaggcgggtggatcacttgaggccaggaatttgagatcagcctggccaacaaggcgaaaccctgtctctactaaaaatacaaaaaattagctgggcgtggtggtgcactactcgcctatagtcccagctccttgggaggctgaggcaagagaatcgctcaaaccccagaggtttgcagtgagccaacatcaagccactgcactccagccagagtgagactcagtctagaaaaaaaaaaaaaattaggtagcaaactggtaccagagttaaaaataaggaaggagaggccaggcacggtggctcacgcctataatcctagcactttgggaagccgaggaaggtggatcacctgaggccaggagttcaaaaccagcctgaccaacatggagaaaccctgtttctactaaaaatacaaatttagccaggcgtggtggcgcatgcctgtaatcccagctactcaggaggctaaggcaggagaatcacttgaacctgggaggcggaggttgcggtgagccaagattgggccattgcactccagcctgggcgaccgagtgagactctgtctcaaaaaaataaaaaaagggaaggagagaatgggattggacccactgatggtgtccaaaactgcagattaataaaatcccttttgcctgtctggctaatgtgtttgacctcaggtgagaagagtgaggcagagaagaggcttgtatgtttatggacgcaagtaatacttaacatttaaaaatcctttaagatggcccattaaaaaaaaaaaatcaaggctttaggaatgacttcagctttctctgataagctgggtgtagaacttaagaatttaagagattaagtaggaagccttgatttttgttgattctgtttcaaattcagctatgtacctttcagtttaacctatgattgaatccactggagcaatgatatgttgagaaatcagagaatgaatattttaagcaaaggttgattcatgcattttaaaataggcattgctcagcatcattgctgttgagacaatatcttctcacaaaaaagattctcttctttctagatgtgaggataatggagggtggaccagcaagtatatctgaaattgctgcaagctaatcagcaatgcttaaaaggaacaattaaagcagataaactccaatccagtttcaaaatggtcaccactcattccagttctccccaaaagtctcctcagttacacctgccaattctttttttaaggaaaccctgaatgtacacctgatgaaagtatttttcagccttcttaattgtttgcaataaatataaggcagaattatagatggatctacaaaaacattaaatagaattttatgtgtgtgtgatgactattgtttatatgaaatattatttaaatgtatactatgcatcgtacactaatactttatggtacttttttcttataatcttccatgaggaaggaaagtgcctatatttaaagcttttgtatttgagtcttgttttttgaaatccttacttgtcagcaagtgtagaaactatctctaccagtaatagtaattatacagattctacctgaaaaattattaaggaatttgattctaaagcaagagagaggtaactatgaaatccagtcatatagattattaaatgctacccaagttgtaactattgaatttttgcagtttgagggatgtagaacttcttatcagaagagaaatttcctttatcccagttacatcttatttaagatcacataattactaatacttgtgttaacttgactcttcagtgatatcattcagtgatatcattaaaaggcaagagtttaaattttctttgtcctttcatgattcttcaatatatcataattaaaatagtagaagaataaagatttaaaaattaacctctctatatgctttaaaaagcctaagcctcttattaaattattttcaatgcattgttcattttaaaaagaagcctatttgatttggaggtgagggggaggctatttctgccattagttagaaaaaacaacttgagaaataaagaggatatattttagtagaaaatcatcctttttttattctaaaggggtagacaatacgtaaatacagaaagagtcaaaaactactaaggtggtaaccataaaatgtgtctttaaagtataattttatattcaaaataataaagctctataaatatgatggaaagaattttggagtatgttgaaatacagattatctcaaagatttatccttgtaaaaggaatgaaatactttgtaactactgtatacttttttatctgaagatcataaaattatttaccaaccgtaactaatcagtcctcccagttctccccaccactaccccacatccactcccaggtcttgttggaatgggtactgagaaaaagccaagctgcagccaggtaaccatagacatccagaactttggtaactggacatcagaatctgcagttgggtacctgcagacaaccagatgaaaaccacaaattttactcagaactttggcagatttagaaggtagttggtagcggaataccttagtcgtggagccctcctttcagtggttactgtgctattttcatgcagactgcagaaaattaaggtgtccttattaggtattgtaagaagctagatttacccacagtcaaattccaacctctaagagattaaagcttataaatttgacttcacatatacatgttactaatgtagacatattctgttttcattttatcagtcatggaagaataagacatgtgaattagtttctgctcttgagttctttgaaaaactatgaaaggtaatactgatgtaatgttgaaaaatattaataggcctttatttcttcttgtgtgaaaaggaatgcattatttacatatggaggctcctgtcaaggtgattcacagagacctcaagtcaagaaacggtaatgtagttatgtttttattttacctattttattacaaattacatacacttgcatgtagaaatgagcatcattcttttacatatcttttgtaacctactattggactcactgctgataccatggaagcctttctactgtcaataaataacaaaaatctcaatattatttaaagaagctgcatagtatttcactgtataaatatagcccagaatgtggacatttgaattgtttacattttttctctgataagaaatgttgggcttaatatttcagccaaatttttcaagacatccctaattatttccctagaatcattttctaaaagagatactgctgtgtcaaagtatgcagtcatatatttttagtcttctatttttaggtggctttgtgcactatcaattttgaattttgttcttgttgcatctgaattgcgtggtgtgaattgttgatgccagtcatgcctgtattacctggagtagtgcccagaaatgagccacatgattggaagtttggaaagtaaaggctctctttttcttctttctcttcttctgtactttctaaagcttatttatggccctgtatcttataatttggagggtgagcattttaaaataacttgcaggattagacattaccttcaagtaggagtggtaacagaatgcttcttctgttacatcacttcagagttatctgagaaaggcagtagcattatagcactagctaaagtaaacatcagagtttgccacttttctgaataccctccaatcaattaattatttacatgctttctaaatgctccttctcagtaaggaggaagcgaactatctatttttaggagatctttaattaaaacgagtatatgctaatagtgtgatccttagaatgggtggtgatgacaagtagtggaagagaaccagggaatgaatcgatcaggtacccttgcacgtgcctcaggactgtgaggtttgtgtgtgtgagtgtgtgtgtgtttagcagggggtgaagggatgggggcggggagggaagttatcagcacctgccacttatcagtagtccaggttggaccaccaatttaaccctgtctgattgtcctttcctcttctaggttatcatgtattctttggttcttcttagacttaagcttcctggaactaagcacttttgatatatggtcagctaacaggaagtcattaggaaataatctaggctgtagtagaaaagatcagagttttatgaatttgtaaattttcagttcatgctcagaatttcaatttaactatgttatttgacttcagtatatcttaaatcttctacaaaagaggaatgattaactaaattatggatttttccctgctatcattatgaagactatataacaatggagagtgtccccattttaaaaagttacagttatatgtattatagttactaaataggaacacacatacactgatattgaaagaatatagacctaacttatagcaattctttttcccttggaaaggtaaccagagtttcactttctatgttatgtatttttataatggcagtttttctagtgagcacttgttaatcttataatgagaaagctgaatataaaattaataatatttacatttctatttgtaaaagtttgtagcttattacttatagtaccaggtttaccctgaggctattttcaaatattagatcatacaaagatcattttccctccttggtaaaatcatcagtaactagtaagtattgatcatctatcatgttcaaggcactgcacggtttacaaaagaaacatctgaaacagttcttcagaactttatcctcggactcatctcctcttatgctctgagtcttgcactcccataaaagccctatttacatattaacactcaaaaacagatctcaacttcaaaactatttttctatctgctgattagacacatccacatagatattttttaagacactaaaatatattatgtccaaattaatcttttcattttctccctaaccccgaaaaatcatccctgcatttcttttactgagtggcaatactgtttgcccaagccagaaatgagataaatagtagttacagtttaaagccagagctcctattctaaccattaatctgtattgcttctttatctgattttatccttgagttcgcttccttctcccccaatatccagccattcattaagcctaggtgatcctacatcctaaatattttttgactcggtcaacttttctcctgtcctttgccactgccttagtacagatgtcctcatctgtctcctggaccacaaaaccttgagtgccaagtgatgcccttgcctccaggtctattcttctctgacatagtctcccctctgcacctttgctcatttcatccctccacataaaattgttcattggctttctctttctcttcttgacctggcacctaccttccaaaattgccatacattttttgtctgctcctgagtttttgcataggctctctcttctgcctaggaaactactttcctccctcagctctcctcttcctggttaactcctgtgtttttcaggttttagcataagcatcatttcttacaggaaacttcatctgaccgccctcgacacagatatcattgttctttggctctatagtattgtttctctcatcatggaatctatcccagtttgttgtagatgtttatttaattgtctctctgataagaatataaaccccctgagagcaaagacagtggcagacttgcttacagtcctgttccacagcattatacatggcgttacccacagtagcctcagcaaatatttattaaatgaatgaatgtatgaacaagtgaatgaatgaatattctctccacctttaacaaaaatcactcagttgggaggaaaccatatatataatatgaagtagtaaagctaatgactacctcagtatcacattggcagtacatgggcagaacccaggtaaaaatttggttctcctaactactactaatttgtgcctttcttactggacagtactgcatttggataaaacaagtgtctcagaagcctttttaatcagtacctaatggaattaagtttttgttttaatgtcagcccccttttgcaaaatcctcaatgctgtaaatacattgatttcacctttcataatcccatattgaagacagaaatagaagtttatggtttttttcagtagaagacagctcaaacaaattagatgattgtcataatttatccttttttctttttttagttgttatagctgctgatggagtattgaaggtaggactatttcttttacttaaaaaaattgttaatttcagatgtagatttttgtaactgataatcccttaattagccaataagtagaaagttgacactgattcctgttttctcagatctgtgactttggtgcctctcggttccataaccatacaacacacatgtccttggttggaactttcccatggatggctccagaagttatccagagtctccctgtgtcagaaacttgtgacacatattcctatggtgtggtgagttcatttctcatttcttgtttactaagggaaatacaaaaagcaaacactcaaaagaagagagatacagtttaacatggttttatttttatttgagactgtactgctggtggaatgcctaaagcagcaccattggagaacgcttcctagttgccaaaatgtttaatcatttttaatcatcggagttattttgtcctgtgttgagaagaaaccaacaccacttccaagaaacaaattaaatggaatccgagatagtgttgggctccgctttgcctgtgagaatgattttttgcagggtggtaatgtgactgtggactctctctgtaatttcaatggaaatgtggatcatttggaacaggacttcattgtaatggattgcttaaacagtataaaatcaccaatagatctgccaagcgagttaattaccaggaaacttttgagtctcaactattaaactgattcatcggtttctaaaagtccaaaagaaaatgtacttagcacttaccagatgaccttgtccatgtctgctgccagtcttagagtagcagtgactatctgaagcgtgactctaaggcattacataagaatcacagcagagccacatagagaatagactaatgagggggtggagtgctcaaggaagagaccacaggaatgaatccgttaaggagcagaagctcctggaggaggaatttggagatgggccatttcctgaggaataggttatacctgcattatcagagagaaggaagtggagtgggagagttctttgctggaggaaggaattcatttgttgccttttgttgaggataaacttttccctaaaatgttacgtattctttaaaaagtccaaaatagttttggaattccctgtctttacatctcatactgccctgctatttatactattatactgccctgctgtttatactattacttcctaaaagggcattttcatagtaatgggtaaagaagcagcctgttttaggtccaaatcagcctgtctcttcgtcctgaacttctgtgttttcttactgcaggtggtagccaatgacacaagaggagattcacgttgtcagacctgttttgttttgttttgttttctttattcggtctctaggtatttaatgctggcttcacaggttttggacttgtttcagtgactagctttttgtaaatcataacacatcctatgtataccaaattaataaagattaattttgttagctattgaaaaaatcatttcaagaatgaaatatgtttttgaccgaaggctagaattttaaaggtcagaaggcaagagtaacatcaggcttaatacctgatatccaaaaaaagaaaaaaaatcaatacctgatatcccttgattctggtttcttaagaatgaagactataagctattacagtgatcaaatatttctcataagtttcagaggagactagcttataaaactggtctcctatgtcaaatgttactacattctaaccatcatacattcatctgtgggatattctgaaaatggggtatttgtagcaatttaagactctttgtaagattgttttctcttgtgaaagtgcattccttcatttataaccaaacgtttatttactgaggcacacaccacctgagagtaatttaaatttttcttagcctgcttgttgggaacggcctctcgttttgtcctgttgaaataggaacaagcaaactttttctagaaaggaccagataatatatatttttggctttgagggccacttacagtctctgttgcatagtcttcatagatgccatagttggctttttgtttcttacaacccatcaaacatgaaaaagccactctgtattctgcagcaggccatcgttgcgggcacctccctggaacaagagggcttgggaagatgagcagcgtggtttaggaacgtggcttgaccgttcagagtggctcaccaggagcccactgctcccactcctttaatgtgcatgtgtatataaatgtatataaacatgtttgttggtgttaggtatatatgtatgttggttatagttattgtagactgttacagcttttaaattgtttgtcacatttatatgaactagaagacttttgaggttcatttttgcacttatgagtccacacacatacagtgcttttacttttaaaattctccccaagtgtttgaatttccttatctcaaaaatttttgaccttaagacacaactatacatacattgaacttttagcctcaacattatttcatatatgaaaacaaactttatgctgccttctttcaaagccttacagttgccagggctttggtgtgaaatgcccccctctgcttttcctgagatgaagtacaatcttagtaccagtagccaagcacaaattccttttcacacataaactataaaagatgttaagagtgacttctgtttgcagagcttaggatttttttcctgtatcattttaaaatctcttcatacattccacattgaccccatttcttaaacatagtttgagtcaacctttctggagctgcacattttcagtgttttttattaaaaatcttttcacttaagaaactatgcaccacatttcagtagaagggcttgaacacgtctctttgtggattagcttttctctctacttgtgtgctgaccctacctttgcttagtttggtttggttttggagggatttaacaaatgcttaacaaaccatcctatggagtaatttcacttactgaaacaaactcgaccaccagccactgagcatttccagtgttgctctgtatttacacactggatgttgctctgcagaacctgtccaccccatcatgtgatgtggaatatcaattctgcattcatgctagagccttcccttacctggtggaaacagaaatgccatttcagtgagtgagtctattttaaaacagcttctgctgtgtgagtcttgaagacagaggtttgcttggaatgctggtttgcctcacagaatgttgtgtcagcagaattccattcagaaaagtgtacagatgctaatttaattataaacaagaactcaggactgtataggttgatgcaaaagtaattgaagttttgccatttaaaagtaatggcaaaaactgcaattacttttgcaccaactaatatttaattctgacctcttctcattctgtttgttctaaataaacaccattaatgagagaaaaaatacgaggtatgctttccagcgactttttatttaaacaaccacaggtatttttttaatgaagaaagcattatgtgttcaaagtagatgttatagaaaagagcaggtgaggatagttgttaaggttgggaccatgttagttttagaagtttgtggtccataaacttggaaaatgatacctattttaattcaaaatgtggttattttgaattttttatgtcttttcaaaaataggtgagtagccaagactcctttgtcagtaggagcatttatttgcattaaatatcccattgttcattgggagtctgttctgttcattgaaaccccctctacacacagcagtcacatacagatgaataagaccattaaaaaaaaaggttttttttttaaaatccacccaaaaaactgcaatatatttttgctttttgtttttctaattttttagactgctgtaagaatttagcccctactactcccaaaaccaccagccctccccaggttgataaacctttgttgcttcttaacaaatggcaagactcactaaccttgtactgccttaaaataaatgtgctgtgaatgccagaagtggattttatgatccttgctcttaagctggtaaactttgctagggaggcaattgtttccctccattttatgagaaatgagatttttctaccctcttatgagaactcttggaggactgaacctggaagagtgtttagtatgttatccacaaaaaaagaaaagcaaaaatcactgaaagaataagccttctgagaacacaaggcctagcctctctttaaaaaaaaaaaaaaaaaaaaagctattctaatgacaatgcagaaaggattaccttcttagaagcttctcagccaaaaccagccttgaaaacatagtggcttaagagacagcatggctgcctggcttgtctgtgagcactgttccagaacaagctgggctcaggtaatggctttctattgtttggaaaagaaagggcagaaaaagtacgtagtcttttccaagtttctattctgtaaactgaaaacataaattttccttgtgagcacagtttaaatgtgaggacgtctcaatataaaatgagtcggaaaatatttttaaggtgaaagatcacaataatatttggcctgaatcctcataactggtatttttaggcatcatttaatatatttttagacctccaagtgacttcctcagtaaagttacttttgtatgccaaatgttatttttgtttagtgtggaaaaaaaaagctgatgtcctatcttataccacctgctttttgatacatccccaaatccagggaattaataaaaggaaatcatgagatgtgctgatactggaattaaactaaagacctcatttgggcttcaggacatagcagctaatgaccccacctcagacacttttacatccatcaagtaactccctcagctgtagtagctcttcagagacacagagggagtcaaatggaattggcttatttttttctttatttttcacggttagagctctcagagaaatataacttaaattttattagattttggacattttccagcagaatattttggaatcaagaatgacgtaaatgtttttctggtgttgtccccccaaactcttggatttgcaatttacttcacaaaattcagtctgtgcatgtgtgcacacatgtacacggcgtgtatcatacctgcaggccaaactcagaagaggcactgctcatctgtgcgtttgggggtctggagcgtttgatttattggaggctaactccctgttcccattctccttaggaatgccacatccattaatttacttgcccttcgtatcttttcccctccccagccctagccccctgtggagtggtaattgcagccaaatgaggggctccatttcctgctcagccctcttgctgcccagcctccctccctgtgtaggtcagggtgattgcatacctgttctgtcacccttcctttacgtgtggtgttcactagaattgtccccttgtgggatgccccttaccttttcctaatcacttgtgtgactcaaatagaattattcagtagctcctctaaaggagtaccttacacacttgattaaaagcccaaagaggcttcagtgaattttttttctcctgcttgagcagcatctgccaatttccctgattttcctgctaattatcttcgtattagccagaattcatttactgtgttatggttgaaatgagactgagcactggctgaggaaatagtggatatggagtgaaaggtttctatgatttgcttgactagagagtatgtgtgctccatctacgttcctattagaaatgagcttttgtttttaaaacaagggaaatctgagtcgaagccactggttctcttcctgcttctcccagggcgccatacctaagacagggcctgtcgcattctctcaagtactgtcactttcccttcactcacattaaaaggagtcaagagcctgacctttggggtgagccagcaggttcatagtctggctctgtcactggataactgactgtctttgggcaagttttttttttttaactttttaaatagttacctcacctataaaataagggtaagatgtatccagtaggattgctattaatcatggtaatatatgaaaagggcatctggaatataataagtactcaataagcggtggtggtttttattattaggactattactgataaaactagaattgtttttgcactttacagagtattggtagactcacatttttgaactccatttgtataaacagggaaaagtaacatagtatacaaatctccattactcagtgtttcaagagaacccaaaatcagcagtattcctagcatcaatttgctttctttgggcattccactcagatttaataatcatactgatctcaagaactgcacaaagatgaacacacacataagctcactttcacatagtcagcttatatgtatagaaagtgtttattacatcttagagtatggtataatagattatattgtaggtagatgaaaatagatcccttagaccgactcattttgcgggagatttctccaaaatctaaaatgtaacttgtaaaatctaaatattacaattttgcaagtatctaccattgtggggtaggtaggttagccagtgatttggatttggggctcagttatttttgatgagaccattattgaaccttttaaaatattgttgaattcccagttattatttcctagacaaatgtatcagaaattgaaggtagaacgagttttaactaacaaaatatacaatctaatttgtgagaacataaaaattctgataatttatgagatgacattaaatcagtcaggcccattggtttcataaaattttaagtctggctctagatgtcctaatttctaaaccaggttttttctttataaaaaagaacgtaaaaagtatttaatatatagaagaagttgtgtgcttaattgttttgcccaagtttctacagttggggttggttgtgtctggtaattagatacaattacatgttagataaggtctcagtaatatgtaccaaaaaatataaagtacaaaaataaaaattccattttctttttgttccaggttctctgggagatgctaacaagggaggtcccctttaaaggtttggaaggattacaagtagcttggcttgtagtggaaaaaaacgaggtaagactacgtttctccattcaggtacatagatcagaaaacagtattggggttttgcaaaagactttttcatcttcttcaaattgaaagtaagttcacgcttatggaaagattagcagtaggagctaacacaaagggtcaaagtgatgttattcctcatgaatggaccctttacatctaattgttgcagcttcacgtcgtgatgctgtagatcaaaaattgtacaagtactgtactagtttctcagtctcaattgtaaaacctaggggtttgttcttagtgatgaaagaagccattgcgtccaaggtaggggaacagtttaactccatctcctgcgtttaggacatcttttttactggccgggagttgatatatctgtaagagaccttcagctacttcaacttacctctcccagcaggagtcactatagtacaagaaactgtcgcttagatgagaatttcaaaaataaaagaagaaaaaatagtttcaaaaaagggaaaaattacagttttgccacctacgttgaacactacattgaagatgagctcctcactggaattggcgaggcagtggcataactgttcgcttcttcatgcagagcctttccatttcaaaagaacttcagtggcgtaaacaccgtttgtgctgtgtccccagcctcgcttctcttcttcccacaaattgaggctttcagttagttggacctatgagcctacatcagagaacatggtacattcatatcaaagagagcaactacattttgaaaggtttaaaattgtgactgaaacgcacagccatggaaattctcagcataaggatgaagcatccaatatcaaggtattatgagaacttagatcatgtaatggaagcaagcagttgtctttgcaatgcaaaactactttatttcacaaaacttcttcatttccaaatcttatctgtgctctccacaaagggtaagactgcaaccttagaataaaataatttgcaaaaaggtgaatatataaaaatattcccttttaatgctctaaaagaattagattcatctgcttcccaggtgaatgcaggaacaaactagattaatcaaaaagctgctattgactaggagaaaccaagtttccatcttttagatcacataatccagagttaccatataatttttcctcctgattcattgggagtggatgaaatgttgatgatagctgaaactgatgggaaagagctgccaatttaagaaatgaaaaggagttatatgcaagaatgtgccttactcattgtttcacaggagctgttctgttttaattaaaagtgatagtaattcctcatgtgctattaaataagatcttacacacaggatgactgatattgtcgtcatatgaggaaacacttgtttctgttgtatttcttttgccagtaagatgattagagatcttgttctgggtttacaaatgaaagcaaagaaaattactgaccttgtgtagactctggaaccaaaacattcagtgtaatcttttccctctgcactattccaagataaactaggagaaaggttgtttttttttttttttcattttgttttgtttttgtttttttagctaactggaccctccaaatatgtataagacagaataattaatatttttaaataatatctaaagggtggcagaatagatataaatttaaagcactttttaaaacattggagtatccgtgaaggatttttaaagctgaagaaaaaaatgaatttagaagctgcctggatagttgacttgaggattggaatcacccatgaataaccttcagaacctcttcaacattatacatgcagaagcagtcttttttctccccagagatcccagaaagtagagtttactattttattcatgatatgttctgatgatcagctaataactgatgaagactactcaaatacttcccacactgtattcattaaatataatagttagttgaaaaaagcctacatggtgaaatacattttctcaactttctaatgaacttcagtaaaattgggtattacaaggatatttatctgctattctcattctgtacaatatttatttgtcaaaaatatggaaattaagtttcaatgtaagtttcaacatcatcatttaagaaggtatcttcatttcacctcacaaatggaggtatccatttccaaaataaattctgttgacatagcataaagataattcacaagggtttatttcatttcataacaaaattgaggctttgacttaaacataatttacaaaatcccttcaacttctaattcttttactgtatttttactattgaatattttgggttatgggttgaaaagagaaagtcgtatttttaacaggcctcatttaaataaagaaagacatgttcaagtgttcaggaagacattttaaatgttatctagtcatctataatatctatatccaagtattagagttgtcttttttttaactttttattttgaaataattatagattcacaggagtttgcaaaaatattacaaagaatcaaaaaattagctgggtgtggttgtgcatacctgtagtcccatctactggggagactgaggtaggaggatcccttgagtccgggaggtcaaggctgccaccattatcataccactgcactccagcctgggtgacagagtgacaccctgactcaaaaaagtttttttatttttagtagaaatggggtttcaccatattggccaggctggtcttgaactcctgacctcaagtgatccacctgcctcggcctcccaaagtgctgggattacaggcatgagccaacgtgcccggccaaaaaagttttttaaattaacaaaaactaaagaaatttgtgtactcttcacccagcttccctcactggtgaaatcttacatgtctgtagtatactgtcaagaccaggcaattgagattggcgcattactcttacccagacaatagaccttattcattttcaccatttaagattactttttgcatctatagaaaaatcaatactttctaaaaattatatctgaagatctttgcttctaatcccttaataataaaataagatgtttaaacagtcatatttctaatattaaatcctattaaaactagattcataaagcactgctaaactttacaaagtaaacaatgaacctttatagaaggcatgaaattaagagggcattactcataaattttttaaatggaacagatggatatatttgcttttgtcatttccatggtactcaatcagtgatcattcagaatgttctggtagcataatttctatttttataaatacttaaattcttacatatgtgtttgttctaaataacaaaactatttgactaacagaaatcttcataagacttaatccactgttcttgactatactttagaaaaagataaaaacttgacttaaaaaaaattttacatcttatgtagaaaatggtgcaaaaatgaatatgctcttttaaaaatgtcatgcctaatttagtgattgggaaatattttaatttgaaacttttatttaaaaatatttgttttaagtagtattgcaaacctggtgctaagatctggttatttcagaatgttttcatgtattaggaatgcccacagttatgtaatcaggacttaaataatttgaattctattttaaagtactttttaacgcaccaaaataatccattgcataaagtgtctgagtctagatttaactgatatttggccatgtcagattatttaaaataattgtgtttccttgtgtaatgacttcgatgtggtatctaaacagtttttcagtaagaaaagatcacagaaatgatcatcctccatattcagccagctcacattcagttctcaggaaaatgttgagacaaagttgtactgaaaaatgttacccttgacgaaaactcattatttttagttacagagtacattcaagtgcataattgcaattatagtctacttttattaattcccagcccccaaccattttatatttaaaaaagtaaacacctgaatttttttttaaccttcatcaaaaggtctgcagtttacagtaaaataatagtacagtttaatacatcttgtcctattctgtgaaatcacaagactagaagtttgaaagtgcttagcacggcctttagtttggagagagttgttttgtttttcaactttgttttgattttaggattatctgtaattcagaatacaggttgtcagttttcttgtcaaggcaactatgtttctagcttctcatagcctcccccaaatccagccaagttcagttttaagttttttatttgcaaaacttctttggcaaacagaactgtggaataagtcttaatacttattacagcagttctcaactccatcacacccaatgctcattttataacaactatgttaacaaccccttacactcccttgaggtgaaattcaaaggtaacacaactacctacacacattatattgtaagttaacataatgctctaactgtaatataaaagagaaataaatgaaagatgttttccagtgtacaaatgctcaagcatgaccacaccagaggagattctggaacagttttaggggataaatagaactcagcagctacaaatgcacccggatggagttgggttgtattaacgactccagtactgggagtagcactgttgttgttatgtcagaaatcatgataaagttatgaatcatgcaagaatcaataagcctttgatttattttatttggtagatgcattctgcagagttcagtgtatcttaaaactgttcaaaagaatactttgtgtttatttgtaagttagagttagattctaggcccagaaaattataaacttcattgtttgcttgttttacttacatgaatgtaaatggggcatttgaaattttgtgggatacaggggagttcctggttatgcaggatagtatggtatattgaattgtctagcattcctgacctgttatacttaaaagtcggttgcaacccaccagtctctaaaacaaacacaaaatgcttctgtggaatagaggcaccacaagttctatgagaagcaccactgtaggatgttagaacaggaccatcctcacattataatttttgttgtatcgggtccttaaagtatatgggtttgaccaaaacaaagccgtaatcagtcatacgttcagaatgtcttatttaccactgagaaatgcagagtttttaaaattatctctgtgatctgtgctcagatgttttcagagttgtatacctactgccaaagctaaactggtttctagttacctggcctatttacatatatcgcaagttgcctataaacatacagtgacatatggttttatatttaatatttaagttccgacttgccccctcctactgtagttctgtttagatattttatgttttgttgcattagttgtactgaacctgacttctccgttcactacagttccctttcaagaaaaagtatgagtctttagagattacagatctaaacataaattgtcacttgtcatatattaatcaatggaagctttaaatttcatgccttatgttcttaaaataactctattatgacccttcagatacggtgtttgctgacattaatgaataaatccctgttttattttgttttgtttccctctctctattgtagagattaaccattccaagcagttgccccagaagttttgctgaactgttacatcagtgttgggaagctgatgccaaggtatacatatgtatttttgttattgtttagaattctgaaatttctcttgtttggctttcagtttttaaaacttagggtaataaaattcattacaaagcaaagctggattgatgctcctatgagccccagattgactgttaaggttttctgttgacattctgcttaatcttgatctctagagactcattattaactcattctcatagcacgctttgacattctgaattcagtataaataattttattattttgtttttaatttttagtaataactattgcacctatatgctattgagatggctaagacacagtacttagaatatgccaggcactgttccaaacactttatgtatgttaactcatttattcctcagaatatctctatgaaatagatgcctcaattatcctcatttaacagatgaagaaccaagacatacagaggttacatcatgagctcaaggccacacagctagtaggtagtagggctggacatgaactaggtctggcacagtccctgctcttaaccactgcactattttgcttttctagccaaagagcagacaaaagtagcacttctagagcatcttgatatgtactgcctgtccagcttcagtgatgtttttgagctccacaatagagttggagaaattccaaagcttaggctttcatgtggttatcacatttgagcatgaatggcccatatcctttccctgcaaagatcattttaaaagactctcgcatacatatggaaatgtttacagatgaaatgataggctagtcttggatttgcttcaaaacaaagtgaagggaaatggatgatggtatagattaaaatggattggccatgataatttttgaagctgagtgataatatatagaggttcattatattgttatctctacttttgtatattttggaattttccataatgagttaaaaaataaaaaataggctgggcgcggtggctcacgcctgtaatcccagcactttgggaggcagaggcaggcggatcatgaggtcaggagatcgagaccatcctggctaacacagtgaaaccccacctctactaaaaatacaaaaaattagccgggcgtggtggcgggcacctgtagtcccagctacttgggaggctgaggcaggagaatggcatgaacccgggaggcggagcttgcagtgagccaagattgcgccactgcactccagcctgggtgacagagcgagactctgtctcaaaaaaaaaaaaaaaaaaaataaataaataaaataaaacatattctcacagattaaagattagaataagagagcagttacactcaagaaaggaacaaaagttttatagtttaaatttgtccagttttttgtggaaatagaggtattaaaactgatcttttaaacagagactaaaaagaaagactaaagaatcaaatttcttactgaatgtaaaccctgttccaatctgacccccaagaagaatggccataaaatatactctgttcttctacaatatgtttctttaatgggaataactaactcagaagcaattggtgagaatggagactggggactatgttagtataacacagaattcatgttgatggttcataatgtttcccaacacattgttctgcactgagcacaaagtgtaataatgcagccaacaaggcagcaagggaccagtgccatgaagcctgttcactccacgtgctccttcttggcttggcttggcttaacttggaagaatttgttgctggttctcccagcaacaaactgtgctgcgtacatgttgcaaaatctttgctttcactcctggtctttagacttcccttacccttttttttaagtagagtcctagatattcctagtattatttttactaaagaataatctttttaaactgtgttagtattttatttaggattgttgttctttttattagtatttgatgacacagttgcatggtttttgaatggtctgccctgctcctttttagtacatgattttgtagaatggggatttttaagcattaagagaaatgcctacactttgcaactagttcagtagaaactataagcacgtattttcaagcttgctttaaaacatttattttatactgttaaaatggtatcatactaccccttccctacccttcttactagttatatgtccattgtgatgtagaagtcattttggacatatgtttctctctgatacataaatagaaattttgcctgaaattatttgcattgaatttgattattgcagctagatctctataattgtgattagatttcagtatgcaaagcaaattttgagtttcttaattgagcactcagtaccacattaattaaaattctaagaatgtacatttatggtacatccaccttacacaacaagaacattaggcccagtcttgaagctgtgcagctggcatgtctttaaatgtagtaagctaacccttctttaggaccaaagaaatcttgcattccagccacatgaagtataaaggaagtttaagattgatttttattttctaaattcatgtcattttattctgattaaacagtgacatgtcccctgtatttgatttggttatatacctggccacggcccacatttccaactctctcactgctgatctcctctagacacaccttacatactttcattcccaaacaagttctcttccttctttactttctcctctgaatacttcatcatcaagtcttccttggttattctatttatcccaccccaggcttagcacttttcctaaaccacagtctgggccttacctggtacagctgtatttttaaagacatattttcttcctagatggacggcaagctttataagggtgtagaggtaattgttacatgtatttgcctattgcacattacatcaatttggaaagtggatgccaaatttgttgttgcctgaagtagccagaccacagtaaatttcctgagtggtacatccattttctggctagaaatacgtagcaattcaaccagaagttagtgccagtcctatgcacatatgtagagcaataaagtactttcttttttttttttttaagtccttaaatttttagagtattaacaaacatctagattaaaatattcagcccacctatagaactgctgttcttttgcaatgagggtcgggggcggggtggtgatgtatgcaagagaaagctgatattaggtaaatgtcaagtccttctagtggcttacaacaggtgctcaaaatattttattgaagagaaggagaaaaaaaggaaaggtgggtattggttcaggtcctaaaatgacatttctaaatagggaaaaaaataagttggtctcgtgcagtggctcacgtctgtaatcctagcactttgggaggccaagacaggcagattgcctgagctcaggagttggacaccagccaggcaacacagtgaaaccccgtctctactaaaatacaaaagattagctgggcatggtggcgcgttcctgtagtcccagctacttgggagtctgaggcaggagaatcacttgaacctgggaggcagaggttgcactgagccgagattgcaccactgcactcctgcctgggcaatggagcaagacgccgtctccacaaataataatagtaagttgaagtcataagttcaataggaagtagtatcttacccttatgtgataaaagatgttgaacagtttatgaacagagcccttggttctgtaacttgcttcctgtgtgatgctgggcacttcctactcttctgagacttgtggtccttacctataaaatgaagataacaaatagagaaataatgtatgtagatgcttcacaaatggtcccagttttttttttttttttgaataagcaaatcctatgtgatgcctaaaaggaacctaatccgcttcagaggaatttatataagatcctagacaaagtgttgtattctgtaaccagaatactcatagaatattattaccacaaaaatctacattgttatcacctcttaaatgttcactttgataacctctatccaagagtaggttctgactataaaattaaattttttctagggatgctggtcatccaattacagaagagtttcaccttattttaagaatgattaaatgtagggaaattattctttaaaaattcattagctcttcctgctgcttttccttgcaaaatgaaaatcctttattatataattagttcttatgcaaatgattaaaacatttttcaggccaggcacagtggctcatgcctgtaatcccatcactttaggaggctgaggcaggaagatcacttgggacaaggagtttgagaccagcttgggcaagatggcgagacccctctgtataaaaaactaaaaaattagctggccatggtggcaaacacctttagtccccgctacttgggaggctgaggcaggaaaattggtgagcccaggtggtcaaggctgcagtgagctatgatcacaccactgcattccagcctgggcaacagagcaagactctgtcttaaaaaaaaaaaaaaaatcattttaaaacctgatacatgctgggagaaattaagaggaggacaaagttaaagaagataaatagaacatttttcaagcttcctacttagggcattttcctctttgcttattagaaggcttaatatatatcagtaacatttatctatgtgtgccctcttcaaggaaagacacaggcacacacatgcacacaagtgcccttgaaagagaataataatggcagaactcattatatatcctaggtttttatatttctgagaaatggaaaaattgcttttcttagtaatgtaggaagcacttaaatcctgagagcaagccacctcaacattgtttcttcttgtttttgtgctcttaaattaaaatgcatgttttaattgctgcaactataatttgttcagtaatggcgtaattacgaggcatgatgaagagagaatgtgcatcatcctttttattatctttctctttttgttttaaccttttgtctcaaccttggctagagtctaaagagatagactagaatagttactgccagctcaagaaacacacttaaccactgctcatttctagtgaacagtaccttacagtgtcttagcactaaagctaattatgacagaaaataaatattgagaacagtgaagttatgatggctttaaaattggggttttttcttgtttttactttacttttaggttcaggggcacatggccacgtttgttatataggtaaattgtgtgtcatggaggtttggagtacagattatttcctcacccagataatcagcatagtacctgaatttttttttctgacaaaccaatttggaaaattttattagttccaatagattgataggtagatttccccccaacgctttatcataaaaatgttcaaacataaaagtggaaagaattttacagtgaacactaacatcccaccacacacagtctactgttaactttttactggctttatcacggagatttttaaaggacttcactgtttccttttaggagttcttaaaagagagaattagttttctcccttcctggacaaaaaacatgaattatcccaaccttaggccacacgatagaaaacagcatctgaatctctccttgtgaatagttcaccgaaaataaagaatagagctccctaaacctgagtgatctgatgattgtaaaataactacatcaggacattgtatcatgttttattttgttatggtgggttgagtttattactatgcttgtagtatctacgttttctcttaaatatctcctttcttaagtcccagcgaatgattacttattttctcttcttcagaaacggccatcattcaagcaaatcatttcaatcctggagtccatgtcaaatgacacgagccttcctgacaagtgtaactcattcctacacaacaaggcggagtggaggtgggtagccccgacagcaggccacagcgtctggctttcaaagaccatcactcgtctcaatgaagaagtgaaccagagatctgaatgacagtcctgatttctgaccatagcttagggaaaaagaaaaggttttttttatgattttggaactcttataagtcctgcatttcataagcaagaaatagtgtttctccaagcttgttgccttgtgtaagtatttgaaaagaatattgaggccggtcgcggtggctcacgcctgtaatcccagctctttgggaggccaaggcaggcagatcacctgaggtcaggagtttgagaccaccttgaccaacatggagaaaccctgtctctactaaaaatacaaaaaattagccaggtgtggtggcacatgcctgtaatcccagctactcaggaggctgaggcaggagaatcacttgaacctggaggcagaggttgcagtgagccgagatcatgccattgcactccagcctgagcaacaagagtgaaaaactccatctcaaaaaaaaaaaaattgaaatcctgtcttctgagacaaaagatggttaccagacatttctctgtgtttactttgttaggaagctttgtcctctgttgtgtaagaaacaagaatactgtttaccttgaaattcgctgagcactgtgtctgctagtgaagggggatagggagacatcaaaaatactcttaaaagaaaacttgatatcataaatcctattaaagcttgttaaataaatttagtaatgagaaaattgtattgcatgagtggaagagtaaacccaggatgaaacatttgagccaggtcacatgatgcatgactataaatagcatgtttggaagctgacattattccccccctgactcagcggagatttaggtaacttcatctctgctcccgatagccgtgggcagtaacatgacgccttacgccatctgctgatgccaaatgaatactgcatgcactttgaaaattactgcgttgtttactcctgttactagatacttctttgggctttctgtttgttgttttacaataaccttatttatttttattcctttgaaatatcttatctagggctagtgaggtaaatgaatttttatttagggatacaaaaattatacagtgagctcaagtctaggtataagggacttttttctgggctgagataattaacaaaacagaacatttaagtaatatttgttttttgcagtaagagatcagtatacatgtcatcagatcattctcctttaaaatccatatatgagttcccattactcttaagacaaagaccagaatacttggcacagtggctcatgcctgtaatcccagcacttcaggaggccaaggctggtggattacttgagcccaggagttcaagcccagcctggtgacagagcaagaatcattctcaagaaatgaaaaggaccagaatacttaagaagactcaccagaccctcattactgtggcctcaccagtgtcagcttaagaagatcattctccccttaatttctggctttcagtccctcaacagatgcgtatttctccccttttcaggatctttacaagcagtttcctctctttgaagcttatcccatttcagctgtgtaccacgcctgccgtcacaccccaccttaactcctgttcatcattcacatggcagttgaataacacgtctgcagggaaacacttcctgaccccaggccagatcaggttccactttatgtgctctgagagcatctccttcataggctttgctgctattggaattaagaagtaattcgggccaggcacagtggctcacgcctgtaatcccagcactttgggaggccaagtcaggtggatcaacgtcaggagatcgagaccatactggctaacgcggtgaaaccccatctctactaaaaatacaaaaaattagccaggcatggtggcgggtgcctgtagtcccagctacttgggaggctgaggcaggagaatggcgtgaacccgggaggcagaggttgcagtgagctgagatcgcgccactgcactccagcctgggcgacacagcaagactccgtctcaaaaaaaaagaagtaattcggcagttagttgtttaatgtgtgtctcacgggctgaaatataagagaggcagacaatcacgtttgttcatcactcacagcatcaaaatgtgccttgaacacagcatttgctccgtaaatatttggggaagcaagagagaaaattaccatggtggtaataatataaaaagagattgtgatattatacaagagaatataaatatgtatgtttgccatgacaaaagtacttcttatgttcattcattcattatccattcattgaacttctgctggtgtgagaacgactgttgccattcgggtactgggctgtagcgatgagcacaagagtcccagggcatgtggggagctctccagcccaagtgtccaatgttaaactattaaatatattcaaaactatcgcatttctattttgacaagtattatgacagagaaatatactagatgtctgagagcatatggccatgaaatctgatctagtccaaggacatagtaaaaggattttggagaaaatgctatttgatctattaccgaagggattagtaagattttaataccaagatagggagtcttttaaagtatgtcaacaaggccaggcgtggtagctcacacctgtaatcccaacactttgggaggccgaagtgaaagactgcttgagcccagaagttcaagactagcctgagcaacgtagacctcatctctactcacaatttaaaaattagctgggcattgtgactctaacctgtggtcccagttactcaactcgggaggctgaggtgggaggatcacttgagctggggaggtcaaagctgcattgagccgagatctggccacgacactccagcctgggctacagagtgagatcctattcaaaaaaaaaaaaaaaaaaagaaaagaaatgagaaggctgtgcaaaaatgtagggacacttattcagcaaaacatcactgaaaagggtaaaccagaaatggtataaagtgcaataaacagagaattaaaataaatttaaaatgatggtatctccatatacagaatatgatcattcctaaaatcacagatctgataaatgatttcaaagtagaccctacagtctagtttgtttagaatgtttctattttttataaaataaatatatattattgtgtatatgtacacagagaaaagtatcaaaaagtcagtgttatcactgggtaatgggattatagagagtgttttttatttgtatatctttattccctacttcttccacattaaacatggactagttggatgataaattcaatttttaaaatgcttgaagatgaaagtgagggaaataaaattgatgattgagaacgggggggaaaaggagatacaagacagtgaagtattttagtaaaaggcgtacagttgcctaaggggcctcctcatctttcaggaactgttaatcctgttctgagagctggagagagaatatatatcttgacctgaaccagtaaaccacagtttgagaagcagtagagctgttttcactgaagcaggcaattggttaaaaacaggactgtaatagtaattttaataataaacacagttgtcacttattaggttcttaccagatgcctgtacttcatttagattttcttttttaatccccatagcaaccctaaattatatcacagatgcaaaggtaaattgagtaacttgctcaaaatcatacagaactgagaacagaacccagtacagaatacagtaacagaacccaggtggtctggtagcacaggcctgcccttgcacccatgctgtacagtgcggttactagacttgtggccgttgttgtgctgtcttctcattagcatgcaatattcacttgactgaattcctttttagctaagagaaatattacagggcatgatcattttaggttattaaggtgtctaactcaatatgtaaactgctgaaaagaattatatgtttttatcagataatctcaacatttcaaaagacaacacattcagactactcccctttccccccaacttttatctagtgtctgaaaccacatgactagtgtccaaagagtgttttagtaaattagagtcaccgtgatcacagtgcagcctgattccaatcctgctgtggtgtttctggcaaatgattattttctggcagagcttcctctacatacagaccagatgcaacttgtatttttagaaaactgaatggttattctgaaattctttttaaaactacattattaaaaaccacataaactgtgttctttcctttgacctaataaatgatgataggaacaaaatctagtgtcagacttttcctcagtcatcagatcttcagcttatttctcctcccattgacttactagcaataatggcaatgagcattaagaacagaaaatgtgtcatcctgttggtcctgttttggattttcattaaccatgtgactgtagacctgtggcaacctgcactgaatgagccatgcagtgttgtgatgagcgttccgatctgtgtctcttggcaaaacacttggttggttgtgtttcccgtggtgaccaaagtactctcaccatgacgtgcgttcttaaaaaaccagagatcaaaaatgtaacctttgcaattgcacaaatcatgtaatatataacacatttaataaacagattatacatttatcatgtaatatatattctatatcactctttttacaaattgaccttttatttcaaagtaagtttctatctgaggaaagaagataattacggttcattgcctgtttttggcatatggaaaattgatactagttgacattgaccttgattggatttggcttacaagaagaccataattttcatcaactaagacatttaaactatatttttagaacaagaagtttatataaatatatcaacaaatgcatttgatgcacaacaatgcaccaaaaaaaccaagggagcagctgttttttttgtcatctccaggttggggttacatctctaatggcatataacctcacacacgatttgactctgcagtgttgggagtgctgttggaaagctgagcctgagagacagattgaggaaggagatttactcggtgtttgtttctgtgtcacagctttccgtccatttaactcttgatctgttttctggaagtgctcaaaatcgcagtaggctctcaaagctggaacttgagatgcatctttggcttaaattacaagtgaaatagaatgtagtggccatttaccctggtctaaaagaacatcagtcaatctgtctcactggcaggggtgtggggactgggtcggcagaagcgctgtgtagatgctgtccccaggcctctgccatcgcacactgagggcacccagctccaccacctccttgctgccttctgaccgcctcactgactgaagatggctcactcttttctttttttgtgacaaaaatttaccctaaggtttttcacgtttttttcccctcagtcctccattgaaaaataaaaactttgtttacgtgcataggcataatatttttgtcagaaatatcagggataaaatttggattttatggtacagtcataattctgaaaaattgctgattcactgccttctttagggacagtaatgggacttatagccttttatgatttttcagatggcaccagtaaaaggcacagggtgttgatatttgtgggcagtgcagcagaagctacttacacctgattgctgcctcccttgctctgaggtgcatttcagacgagtagcgaagtgaaatgttgagccaaatccagacccacctccatacctgttcagagttggattttgccagtgaatgcctgaactttttgttttcattcacttagttattatctgtaagagcattggaatgttccagtaagagtaaactgttcacttactcttattctccctagaaagaaaaaggcagactttggttacatatattcattaacttagatgtgggggcttctaccttccatagtcaacgtctcaatcatgattatgccatcacaacacaggattgcctcagtggcacctggaagcagtagctggcagcacccagcagctattctgcaatagtcacccagttcccatcttcttctgcatccttctctccagtgccttctctagccttgacttccctctcccctctccctcattctctcagtattgtggcttacttaaaggcttttcagaaactcaagggaaagagcttccagttttcaaaacatagatttagacttaaacattgcaacagccctaaaggagaaaaacatttgtgctgagccatggtaccagttccactttctgtgaagaacagatttctgtaacatggcacatggttccaagtggtgaggttggttggcctataggcacaaaggggataacttcctttaaaaattattagaattaaaaggaaccttagagttcatctggcccagggttttctacacttgcttgattgtaaaaattactcgggtcttttacaaaataatgaaaattccagggtcccacccaggcctactgactcatgagctctaaggaagggtcctagaaatccatgttttgctgggttctggtgtgtttttttttttaaaaaacaagttgcctatgtaagtctaaggatcaggcaggtaggagaaccctaatgtactataaccaccaccccttacaaccaaggaaactgagacaggttagtcaattgattgcttgggttactcagccaatgtgtagcctaaagtgtcatctcaaccacttactgatggtgtgttgttgaccacctaacctgaatatcattttcccacctatactatgagattaatacctgtttcttgggactgttaatgggaataagatgagatcatatataacatcacttacgaactgtaaaaagctagataaatgtaagcatttactaaatggctgtaccaggacaccagctccataggttatgctgcaccccagtggcccttcaacactttgttgaaatattttgagcttatttttccaagctagaaactacccttgatatttaaggacatgaaagattccttctcctccggcagttacctggttgattttaaagcaccagcatgtgtcttttactttgattagcattctgatggacccactaagcgcttgatgtctcttaagtaaagttgagacttacaccagctatccccgtgcaggtgcgaaattgaggcaactcttgagaggctaaagaaactagagcgtgatctcagctttaaggagcaggagcttaaagaacgagaaagacgtttaaagatgtgggagcaaaagctgacagagcagtccaacaccccggtgagtaccctcccccttcgccgtctttccacatgcggctctaggctgcgcagctgagcatggcagcatggcacctcttcccctgcctcccgccgccccctcctcatttcctgcctcgcgcccgtgtattaaagggcccgcgtgtggactcaagcagcgttcatacctaatttcaattaataaaatgccagagatttaaaagaaaagcttatcctatttctggctccttccttaagaactgttattctgtcagtgtgtttatatattagaattacaataataaaatccgatgtattttcacaccatctgctcagtctcagaacatgcacctcggtgctgattaactccttctagtcactcagtcattaataactgtaactccagcagctcactgactaacagagtctttgatgtgtcagaacttaaccatgttttccttctaaaatggagctaaccatgatgacatgcaaatgagaagcattaatatttcgtactcaatttagtgttatgatcatgggcagcaaaatattggaaaaagattctctctggacaagctttcagtatttattacacctaggcagtatcttgttttctcccaagtcttgtatttagaggaatataaaaattatttttaagcatttcactggttatacactaaccttgagcttacatgctgatatattattcaagtctaatcaaattttagcattctttcctattttaaatggcataacattttcaggaattaagtataaatttataattgttttttttcccagggtttttaatgggcaatatttgttcacttaaaattacccaagtaatggtagattaaaagtaaacatatattttaaattcatttttgatagttgctatggtgatgccaaaaaatactgaaatgccgctcgttttgtgatcttcaaaaagctttcctatctttaaaagtcttaatcttcattaagcagccagtgcccaattgcaaagtattttccagtgtctaaagaataaaatagtttgtctccttcccaacttgtgtggagaagcaacctgatatccaaaaaaggaaaataccatgaagctaaatgtttattatcagattcaacttggaaaaaaaggactttggttctccagggaattccaaaatgaattgaattgctatccctaacactatcatggaacattttaaaagtgcaacattttatctgtgaatttaacttggcttgtgagaaagacgatgagggaagtttcctgttctggctgagtggcagcaggcagcctctgaaagcctcactctagggatctgcacaggagcagtgcttctcccagagctcatgagggacaggagcaaaaatgtgacctcgtccctagagcacagcttctgaagtctgcgaggttttgttttgctttaaaatgcattgaaatctaaagctgtaaagcattgcatggcttgactctttctaaatgtagtattgtaagaaaaaactttacccattcatatatgcttcagaacctttctttagtttattggcatcagttttgctaagaaatgggctgccttgcacacattattgctcttagtaacatagttgcgtaataaataataaagtgctctacaataaggctctgtgtgctcggtaggttgcctgcttgagtttttaaccccacaaaactttctgtgaaggaactgctctgagggctaccgtctaacaatggacagcctgcagcacaatctcaatgagattttcttcttttttccttatgggagataagttttctttctttacagtacttgcttttaatgtgtcttctgcttagagctggtatttctgaaggaaagaaagtttatgttcagatattttgtaagtaggtattttcttttgtcctcacatcagtttctgtttagctttaactgagatttcttagagaaagatgaaataaacattttaaaaaggaagtggctggaggtttagctttcctgtaggtggcctcatcttaattatgtaagtttaacatttatgtaacttcataaaaaattgtatcattgaattaatttcaagggcactattttctttcctaaaactaaaacattagttaaggatatttggggagattaatcctttatgcataaatatggatgtttattttctaattatagttgaagcttgatgtaaactttttatttattttaagaatataggcttatctgagacacatttatagagatctttagagtcaaacctcatgtgaggaaggaccctcaaaataatgcaatgagccacaaagagttcctgagactatctaacaattgaaaacgaatttcagaagctgagaagtttgactgcaagggaaataacatcctgtttccaatgtttaaagatctaaagtaattgttttcttccatataatggatacctttgagttgaattatatgaaattaaagttattgaactaacaactccaggagggtttttcccaaaagaacaagctacttttcaaaaactcagctccaacttcactttaaaaattaggaaattgaggccaggcgcagtggctcacacctgtaaacccagcactttgggaggctgaggggggtggatcacgaggtcaggcgttcaagaccagcctggacagcatagtgaaaccccatctctactaaaaatacaaaaaattagctgggcgtggtggcgggcgcctgtaatcccagctatttgggaggctgaggcaggagaatcgcttgaacctggaaggcagaggttgcagtgagctgagatagtgccactgcactccagcctgggcaacagtgctagactctgtctcaaaaaaaaaaaaaaggaaactgatcctgaatattaggtaccagaatatagaggtcatcccagtatattatttgtacattatttatcataaatgtatccatattgaaactatgccaaaaacataagccttgatttgcttgtttctcaaaagaagaggcagtaacatttttcatgtgctaacagttttacccctgaaatagatatgcccaaacatttatgggaataagttggctgttcaaaataattacgtaaagtagaagataatgtctgtgaccactgtgagtggtgacatcttagaaaaaagttcggttgaaagaagaaaacttgaatattagagcgtattagaacaatctaaattaacactattttcctttcttcccagttttcatgtgtttacatacttacgtctaacttaaatgtgagacagaatctagaatttgttcacaagtgaattatttaataatttgaataaatagtattacatcagttctggctacaataaataaataagtggaagcaagtgaattctagactaatttttagtgtatattcagagtactaatccagataaaaagggagttaataacccacatttccctagaactgtatagactgctgaactgttttttgtgcttcctctaagcttttcttttgggtacaaagtttcttaatttttcatttgagatttaatctctgcttaatttatttttttaaaaatataatggtcaactaaatgtttccttatgaaagtgaaattgggaaaagtcaagataaatcctagaaactattttgttttaagcaaaatgagggcttaaaacttgcaacttcttttccatttgaaatttggcttgctgtggtgctttgcaaacttttggttgtgatttatcctgtcattcataaattatggcaaatatgctggagccaaatctgccattaaataaattctcacataattccctacattcatttatttcactaatcatttacctcctgtgtagtgccaactaattttgtggtatctattttcctgatttaaattggtcctaatttctctttttacttctgtcctttcttcccttttgatagcttctcttgcctcttgctgcaagaatgtctgaggagtcttactttgaatctaaaacagaggagtcaaacagtgcagagatgtcatgtcagatcacagcaacaagtaacggggagggccatggcatgaacccaagtctgcaggccatgatgctgatgggctttggggatatcttctcaatgaacaaagcaggagctgtgatgcattctgggatgcagataaacatgcaagccaagcagaattcttccaaaaccacatctaagagaagggggaagaaagtcaacatggctctggggttcagtgattttgacttgtcagaaggtgacgatgatgatgatgatgacggtgaggaggaggataatgacatggataatagtgaatgaaagcagaaagcaaagtaataaaatcacaaatgtttggaaaacacaaaagtaacttgtttatctcagtctgtacaaaaacagtaaggaggcagaaagccaagcactgcatttttaggccaatcacatttacatgaccgtaatttcttatcaattctacttttatttttgcttacagaaaaacggggggagaattaagccaaagaagtatatttatgaatcagcaaatgtggtgcctgattatagaaatttgtgatcctatatacaatataggacttttaaagttgtgacattctggctttttcttttaatgaatactttttagtttgtatttgactttatttcctttattcaaatcatttttaaaaacttacattttgaacaaacactcttaactcctaattgttctttgacacgtagtaattctgtgacatactttttttttcttatagcaatacactgtaatatcagaaatggttggcctgagcaacctagtaagacctcgtctctactaataattaaaaaactagctggcatggtagcacacacctgtagtcccagatacttgggaggccaaggcaggaggattgcttgagacctagcaatcagtcagggctgcagtgagccatgatggcaccactgcactctagcctgggcaagagaacaagatcctgtctcaaaaaacaaaaaaaagaaagaattgatagtacaaaatccaacaacaatactgagatgatctaagaaggttataacaaaatgctcttcagaaatacctaagtgctgagaatttttagtactaaagagcacagctgctcaaagtaaagcctgagcagtgttctcagtaatgtatttgaaggaaaaataccctgatttgaaaccaacagcagatgttgcaaactttcataccactgctggccatggaagcctcttaacaacacactgtcatttaaggctgtgcttgtgctttatacaaagagaaagaggtggtcttaaggggatgcttccaggggggtgagttcatgcctctcctgtattttccagcaagtggggtatgtgtggtggtttgttttttagaggggcataataatccaggattctaagcatatgctcagctattttaaagaggaaattaaatattataaaagaaatagtaaagataagttatcctcacttaggcaaaagcacaggtcctttccatatcaagtttagcctaccagggttgttttttgttttaaccctgcttaataatgttggtgttttagaagtagatacaggcactgctctgaaaacctggctagccaaggatattctcagaatgttatcacctgtttgtcaaagcttgtttaaattataaaacacttttaattatatatatgaggcaaaagaactaagacttttttcaaactaaattagaaaggagtgtcattatttgactgttaaaccaaaatatttttggtgggtctttttatggaagtttaaagaaaggacatcctcatagatatgatctaacagtatttctaactatatttgatcattaaaagcctcttggaatttgaagcgtgacgtgtttctaatgccccttgagaggtgaaaaataccacataatgatcagtatgctgtgccagcttcatttggggagaaataactagtagaaagttctgggtgtgaggtgtacagcagtctaggtggcatagtgatgaagaaagggatcagagtctgactgtcactcagaatcctgggctcagttgcttgacaaccttgggaaaattgttttatctttgtgcgtctgtttgctgatcttcagcgtgggaataataacagtacctacttgaaaggatcattgtgcggattaaaagaaataatatatgtaaagcactttaacacagcaccaggcccacggaaagtggctaatgttagctactatgaatggtgccagtgaagacactgaaaaataagtgatttcagtaaccttctggaaagctatcagtttcaaataatattttctctgtagtatgagatgaaattaaaagtggatagctttcaggaaagataaagagaacatgcttagaatgtaagctaaacagattttttctgttgctctttgaaaactatgagccctggccagcttaacctggtctgaggtgagactaaacacaaaaacagtagataaatctctccctaaaagatggattcccccacatacccatgctactagtttctctgtctattcacacatatgtacaaatacatgaacacagcctgtctgtgctcagacatagagaagtactacctgacttgagtcaatgcacccaagaagaaaagcttggagtagagcagaagggagggcttgggactcctgtctttccagcatgccctggggtgcagtggtcagccacctgaagagagagccaatagcatggggtttacaaggcaaagatagtcattcattcaacacatattcatagagctccttctctgtgccagacactgttctggaagatagctagatgaaaatctttgcactcacagagcttacatgccagtgagtgaagatcgatgataaataaagcaaatgcatcatatgttcacatttgataagtatatgccaaaaaatgaagccgggaaggaggacaaggcccatgggtgggtgttgaggtttttaaagtgtggtcaggaaaggccccactgataaggtaacatttgagcaagtctgaaaaaggcaaggggatctttggggctaacttcgggatccctgcactttatgtaagaatgtaaacctggagtctcatttaagaatgatcagcaatacgtttagaacatatgaactgaatgaaatggacattttttcttaatttacgtataaatccatatgattatacataaagttctgatgcattaataaaagcagccaaatagggccaaagagaaaaataacaggactctgtactggacctaactttatcattaattaggtaatattttcctcatttctttactgctgccattttcctcaccagtattccagagatggtcatagctcattactctaccaccaagaacctaaaaggaattagaatacagcagaattggcctcagtgaagagcttaaaattgttctcctcgtagaactggactattgatcattaccacgtgacgttggctctattactttctgttcccaatgtccttctagtggtttgaaaatgttaaaacatccctaaaatctaaatcatataatcagaattctatagtgtcccactctatctgtaaagatcatttggaagactttagactctattaattttaaaaggaatatttattagccatatgcagaatttctaatgatgatattgtacagcttctaattcacttttcagatcagtgtttgaaatggcaattatcagtgttggatttagttccaactacttgatttacaaaaatgtacatttagagaaggttaaaagaaacagtgagaaatgtaaacattcaaaatgataattgaatctctcagttgtgggaataattatcagagacatgcaactgaaaatgtctcacctttcatctttttttcttaattcataaagttatcttgtagaatttgatgagaccctccctagtcattctcaactggggcggtgctgtcaccgaatggtgtttgagagtgttggggctagggcacatttttggttgtcacagcaactggggtggcatttgctgcccagtgccaggaatagtaacattatgaatgccagggacagtgtgctcagtaaagtcttccatccaaaaggggcagggcacggtggctcacgcctgtaatcccagcactttgggaggccaaggtgggcggatcacctgatgtcaggggttcgagaccagcctggccaacatggtgaaaccctgttgctactaaaaatacaaaaattggctgggtgtggtgtcacatgccagtaaccccagctactagggaggctgaggcaggagaatcacttgaacccgggaggcagaggttgcagtgagctgagattgcaccactacactccagcctggatgacagagtgagacttcatctcaaaaaaaaaaaaaaaacaaaaaaaaacaacccggtagcattgtcccttccccactgacaaacttatcaaatccagaagctttagagtttcgtctctaattatttttctcctgaacaaaattacccaagtcaaaacaaaatgtatttttagaattacggcagcatacgacctgaattttgtgagtttcgtggctttatcttaaatcaccatttccctaaaaacggtttctttctccttagaaatgctggtggcaacttgatgaaacagccaaatgcaccagggcaggtcactttcccattacactgattccacaattaaaaaaaaaaaaagaaaaaaaactcattgagatagctacagttctataggttaatttaaagcctcctttttctactcatttttgaaagcaaaattacattttactattttacataaccagtgaaaagacgttgaaagcctacagctcactgtttttggtgctctggaaatgttgagggtgggtttttaaccagtgatttttaacgtgcagtgaatttgttagacttttaaacaccagctaaggtagtcaaacttgatccccattaaaaatcaaggaattaggggtcgggggagggtttaggagtgatccagaatgacctcccagaattactgtgcgtacaactttatttttcagagttttcattggaatggtaagagttttatgaaagacagttttaaaacttattctgagttaaatattaatactttaaaaaattattgtactagacttatcgcagccttttgaaagtagcagagtttcatcataccacatatataacagagcataaattttctataatcaggcaccttttgctgcttttgagtaagactgttttcctgtttaagtgttaagcatcgccagacataaaaatctattctctcctctcgattgtagcatagcctgacagctctagatacagcatttctatgatgaaaaatgagtatccatcaggaaatctagaagactagccgtgttttctcagactccacctttgtttgcactctgttgcctgtgaggagctttctggcatgtgattatttacttcaaaactagagttccaagcacctacattaattattttatattgtgtgcagaatagtatatcttttaatgtcagatatgatacactgcacatattgcttttgcactcttaaaatttttgtactaaataatagaaaatatttatattctttgagtgtgagctttgaatagatggcattatcactttattgtttttttaacaaaaactttttctcaattattctattgcaatgttattctgagcaagtcctatgccaaatatcttgtataatgtttgtatggaagattaaattttactcttgtgtggtaagactatttcagttactgattttatagttggaatttgatattccagcacaaagtccacagtgtattcagaaatccaagttggtgtcatacatttcattttgatgtgaacttttctttgctttcctttgttctaagactccattttgcaataaacgttttgacagtaaatccctttgttacgtgttgctgtgtatataagatccctgttagattggattcccaacatcctttgaaggaatcgttgtcacacgcatgcacacaagtgttagcttttctctcctaaagtcagtgggagtgtaaataataaatttgtaaagtgatgggacagtcatggggtggattttttttttattccctaaagaaagaaaggcttagaactcatcctacagcagatacactgatatgttaacaaggtacagaaaacataaaggaaatggtaagccactctgtggctggagatcattaactcttatcccccgtcttgccaaattcaagctgtcatgaagcagtgcctggctccagccttcctctcactgatctttgctagcattgtgcaaagaatcctgctggagtgagcgtccagctgaagccagtgcctttccctaggcatcgtattggagaaccatcctcagtgtgcaaccaaccccctctcctttcaacattaaaaccaaagattctggttgtgattagttatttcatttacaacttctattctattcaaaaaaatacttctttctcaattttgtttagtacaacatttaggaattttataaaaataacactacacatcccctccccccaacccagtttctataaaggtgagccttgatgcaggaaaatatttctgtaactcagactgttgtttcttgaacgaaccaaaaaagtttcgtatttcacatttgcttctgtgatgggagaagggaatggcatgattctgcagctgtgtccagctgccctgtgaagagacaaaattgtcacctatttttctttgatccagttcagctttagattctgttcctcaaatctttctcctttccccattattaaagcaagtgaatgtgtgtgatgactcctacccacctcaagtgtttccgaggaggcaagggcaaccctggagggaagggaagcacatgcaggtagcagagtatacgcagaacaggatcgatttcagtgtgtactttatgtcctgacaacttgtctataaatactcaaacctaaacattcatatccatttcagctagtgggtttttccgcttgccttcccaccctgtctgcctcatttaccctttttcctccaacatgaactcactgccttccattcccatccttccctcctgtccctccctctcccgccatgccaggttttgccttgttgcttctctttacccggaatcacctctcttcttgccctgaaggacccagctcaagccgtgctgccctccattctcccatcttattttatgaatccctttgtgaatacatctgtctatggtatacccatagacattgaactctataccagagaacttagcattccagtaaatgcaccctttaattttattcattctttaaaatgactcaacaaaaatttaccagataccgtatgccaggcactatgttaggcattaagtaaaccgagattcaggtgaccttggaatcccccaggtataatttataactgtattagccccagttaaattgaaagctccttgaaggcaggggctgtgcctttcctagcagaattttgagcatgtgggtacaaaatacctgtaagttagaaaggttaactcacctaccctatgatttttatactaacagtaaaagcaaccaaactcaacttttttttgaaactcactcacaagaaaatatttgtaacagaagatgagtgacaatttgccatattatctcataagcaattcatttttggggggcaagttaggctagttaaagctaatagctgtaccaaactctaatttgacttataggacacacagacttctaaaaattatgtaagcatttattatttagatggccatggggcatatattgaagacagtaagtagttctttggctctgaaaatggtgcaggctgaagtcctctggaggcatcttcatttgtacttgtgaacctcacagggaggtattttaatctgttttagttagagcaactctgcagcctgggtttcttaggaccgtaccaatttcccatgtccttcttcatccgtgagtgctaacatttggtttttaaaatattgtgcaaatgagatctttcaacacttagaaattcccccttgagaacaggcataatacatgatctggttactaagtggttgctttggaattttcattaataatccaacagtcctcatgttggctgagactctgaggaagactctaggtctctgagaaaatgtcagaaattccttgactgctgaggcttgattgtgggatgtaaaaaccaggtaccaacaaaggaatatgatacagctcccaaagtacatgaattgttactgagagattggtgaacattactggagcactgagaactgcctcttaaggtcaggaaaactgttttccattcaacccaacctgcaggaggaaccaagccagagcagcagctgagagctgaaagagtgagacaagaggatgaaccaaaaagacaatgataatattacttttttttttcatttcatgcatatttcccatgcagctgctgccttcctttgagattggtgcatggacggaagacgatgtggtaagctctttgtattcatgccttatttgacttgagcaggtatttcataaatttttccctaagtttttaggggaagagattgggccttaggaaagtctaactaggagaggttgacaaattcttttctcactctgtctcccaggctggagtgcagtggtgcgatctcagctcactgcaacctccacctcctgaggttcaagcgattctcctgcctcagcctcctgagtagctaagactataggttcccaccagcatgcctggctaatttttgtatttttagtagagatggcgtttcaccatgttggccaggctggtctcgaactcctgacctcaagtgacgtgcccgcctcagcctcccaaagtgctgggattataggtgtgagccactgtgcctggcctttttttctgtttttaatgcaataatgattgaaaataaagcctcaagagtaaagcaagtatctctgcaaatcttctaagtgggttctaccttcctaaattactctgaaactattccagaatacaataacaaatacccatgaggaaattaaagtggcagctcgggaaaacaaatgaacatacttgaaaaaaaagtgatattaaatctttttacaagaacagggatggcctcgagccatggtagaggaggatctggtcaaggcagtgctgggctggtacaccgctgaaccggctttccttccacctcaggcctgtttgaaagtgaggcatcatatttgccagccttattctggcctcccaagtgggaatagacacaagcacgcccagacattctctgtagctttagccagagaagccctatgtttttgagaggctgcactcagactgttgaagtccaaaagaagtcctgcactctgcattcttgatagaaaccctgagaaacaatccaacttagtctgttacatcaccatatctatttttttagtgacaaaacaggtatgaaaattcctgatgtgaaaactcagagactaggttgggcacggtggcctgtaatcccagcactttgggaggctgaggcaggaggatcacttgaggtcaggagttcgagaccagcctggccaacatggtgaaaccccatctctactaaaaatacaaaaatcagccaggtgtggtggcacatgcctataatcccagctacttgggagactgaggcaagagaatcgcttgaatatggaaggtggaggttgcagtgagctgagatcacaccactgtattccagcctgggcaacagagcaaggcttcatctcaaaaaaaaaaatttttttaagttctataaaactcagggacttatgctatccaggtctatttaacaagctcagggtatcactaaatgaaaatgaaaaaaacaaaagatgtaatgccagccttagtgggtttgggctccagcccagggaacagaccaggtgccacaaagtgcagactagctactggaaactcctcaaaagatctgtttacctagctcaacctggttttgggcccaggcatttccctctctgccctttgtattcttttgaagtgcacctgctttcaacattagctaacctctttggcttccgtagggtaaggaaacttggcaccagttgccactatttcttcccattcactgagccccagtgagtctcactttcctgccagccttgcttaacaaggaaagaggactcagggtctcctttattcacaagcctggatatcatctctttatccctagctgcagagtttcccctgtcatttgaaaagaaatttttgaaaaatcactgagttctaacagctatttttagtctttgctctgaggctgagtggcttccaggccacttaaataaaattccagagttgagggctccccagagaatcacagggactgagtctggcctcccatccttctctcctcaccaaggtactgtgagaggccaccagtaaacccagaccctgtgatatacagggactaagggtcactgggtccaatctcctcattctacataggaagctccacactttgacttggctggggccacgtggctacttcatgacctggcctagaacaaaagattccttctgtctgttgctctgtccactgctgtgtggtccctggaactcatacaattcctgagtaaactggtgcccctcagcaatccaggggaccactggcacataaatggaaaaatcactataagtaagaaccctcttgaaaggatttaaaaatatctcccaaagaaggaggaaaaccaaggggcttttaactgtccaagacccccgaagagagggatatctcccatttgaaagcttgaggttttaaaactacaaagagaaagtcttctattttacctttgtggttgagccaggaattaaagttattttgatctattgaaaactctatgtttactgtgaagactggccactgaccatgtgtgaatcttcaaaaccgtatgtgtcctctctttcacagtattgttgggttcagcagctcgtcagaaaaggcaagtggaataagttaccttcttcaatcatggagttaactttgttttggatgtgatttcatctaattttattctgctttctaatcacttccttcaggtgactcttcagcagagatgagtgtatatgcaagcttgtttaaagaaaacaacattacagggaagcggctgctgctgctggaggaagaagacctgaaagacatgggcattgtctccaaggggcatatcattcacttcaaggtacctgagaaagggacaacattccatcagcaaaccctttttttgtttgtttggttttttttgaggcagagtcttgctctgttgcccaggctggagtgcaaaggcacaatcttggctcgttgcaccctccgcctcctgggttcaagtgattctcctgcctcagcctcccaagtagctgggattacagaagcgtgccaccacacccagctaatttttgtatttttagtagagatggggcttcaccatgttttccaggctggtctccaactcctgacctcaaatgatccacctgcctcagcctcccaaagtgctgggattacaggcgtgagccaccaggcctggcctccatcaacaaatctttattgagcacctactatgcagcagatcacgtgttaggggctgcagatggaaacagtgctatgctggtcattactgtgctgaaatgcttacacaagttgataatcagcagctgcccccaggcacccctattccttcctcataatccaaacagcaaaaaggtgcatacatggtatagtaggactcacagggagataacctgaatatcacccccctgccctcaggaagtctctaatctggtggagaaaacagatactgcctatgcgataatggtaaatgacggctgtaagaaataccacaaaggcagtgtggtgcctggaaaacagccatccacccagaatagcaggaggtgactcagtttaattctagagaggacaaaaatccatcaggaatccctaaggaccccagaatttctgcatggccaaagggaaacctaagccaatgcagtaacctaaaggcatttgtaatttttgtcattatgacctggaacagacaccaccatgtatgtgttttaatccccacttactcaggaagttctaacatttcccccaaaacttaactgttaagtagtttcaaagctaaacctctgtgttcattgtggtggtcgtggtcatggttgttttttgtttgtttttgttttttcaatttagcaacttaaactgagtaagaattgctggcatctgtgtggtcattgtgactaatcttgtttcaagagagatcttagaataaaatcaggtttgctccccaaacccaccccccattccagtgtgggtagatggacgagtgtgtataggttagaaagaagagaaacagaataaaggagaaaattcagaaaaggcagcctcctgtccaaatccacaccttcacaaaggctctaccaacacgccagctagtccctacctcagagctacccacactgacctttctagagaaatctccattaaggcccaaagagagcccattcatttcattctgtggaccctaggtccaggaagaaacatccttacggactctcagcaccctttgcgtaacagtaacagcttggcactcacccaccagagaccacttccacaacagaaagaggaccttgctgtcttctccctcttagaagaagggcaggagaactcatgcatagcgtatttcccaaaggctggcaaagaatgtaatcccagcctctgggtgtgggcaagtccatcctaaaagctatgctggcttaggtgggccacagtaggaaaaagtattttctgcagtacagagatgtttcagagctccaaaaaagaaattttgtaaatcttgtcctatttggcagatgccaaataagatgctcccacctccccttcccacctgccatctttgaaaaggcccagtattccttaaggatcagttcggaggaagggtggtgagctgggatatctcaccagaagccctcagtgatttacatctttccaagggtggccctggataacctaagtacccctttcatgctgagcggtatcatttaggcaagcgaagtccagacttactatttattgttcaaaaaattcagtgaatgtctactaattgtgagactgggcctatgaagattcaaagaaacctgtggttaaggaatttacatctcagagaaaagattaaacgtgcacacagcatccccttggcaactgggaggaaaggaccaattcattacccggacttgggagaggccatggtgggagatggagagggtaaacttcacagagtgggtggcccttgagccggatcttggaggaatgacagattttggaatgtagaccaggaaaggaaagaacattaatctagacagagagaacaaagagttaagagaaatggaagagaatgtggaggaacagaaaagaggagtcccgacctacgtagcataagcagctccgtctgcagaacacgggtgatgagtagaacgcatggcacctgaagtggaaggaaggtggggccggatcctggacagcttacaacttcaggctggggggaaagagctggaatttgaccagctgtcgggagtattgagaattgacaggtttacactttgcttctggaagttttaaaatgtattaaaaaggcaaggctgggttttgaaaaaacaggagggtataaatgtggagaataataagcactgcagtgtagcaaaaacgcgaatggagagaaggggaagatgtcacaggtaagagggctgttctcaggctcaagaaggaaagcacaatgaagtattgattgttgtggacggactggctggggccgctgtcgcaggcagtaaaagaatttaccaagacagtcgtaggtaaagaaaggcagatttattagagaaagtgtgaagatgtgttgcaagggtgcaatgggcagcacagcagagaaggggctgtctgccaagaggcaggggcttgagggaagttttatgggatcatactggaggggctacgtccagatagggtgtgcagacgaggtcatgcttctggagttacttgcagaatgaggtatttgggaacaggttgttgtgattgtctgtgattagccgtctctcagaacaactgttatcccccacctgggaccccctcctcgttgttgcttacttattaggactccacactgatatgtgtggcagcatagatgagccttgaacatgatgctaaatgaaagaagccagacacaaaggtcacatattgtatgagacatcctgaataggcgaatccatagagacagaaagcaatcagtgattgccagctgctagggggaggaggcaagggttcttgactgcctaatgggagtagagccccctttgggggtgatgaaaatgttttggaactagatagaggtactggttgcacaacatcgtgaatgtgctaaatgccattcaattgcccactttaaaatggttaattttgtggtatgtgaatttcacctcattaaaaaataataataaagcaaaggaaagcacaggcacctctacaccctgcccaagagtagtcttcttccagctaggaagctttctgtctttggcagaaaggatgtgtgtggccaggaaagtgaagaggaagacaggaatatctgtccacaaagtaggaaatgaggagagaatgctgttacaaaagtcaaacgttggaaaagctttaagatagaatcggtggtcgaaagggtctaagggccaggcactgtggctcaagcctgtaatcccagcactttgggaggtcaaggtgggcaactcacttgaaaccaggagttcaagaccagactgggcaacatggcgaaaccttgcctctgcaaaaaatgcaaaaattagccaggcatgtggtgcacacctgtggtggtcccagctacctgggaggttgaggtgggaggatcgcttgagcccaggaggttgaggctgccatgaactatgattgcaccactgcactacagcctgggcaatagagtgagaccctgtctaaaaaaaaaaaaaaaaaaaaaaaaggcagggacaggggacaggggtctaagcttgcagagaagccaaggaatatgcagagagaaaaagccctgttggaagcagccacttaaaagtaaaaaaaaaattatttgacccactagagtggagtcagtgtaatgttctctttttatgacctctgcagagggtctgcccagagctccaaatgaaggagtagcctgcatctgttgggggacctaacactgccctcaaactcctgagtgagtctgcactcagtcattctaaagacagtcattcacagaggggcagtctccaaagtgtggaatgcggacccctcccccttactgccaaggctggggctgtatgtaagaatggctacccagtgggggctcagccaacaggtgaccactaaactcagccagagcatggggatttccaacaagtttatatgagagggaaagataaagggaaagggtcatgtgcacttactctaggagggccctgcatagactctcaattaagataagtaatgctccaagctgggcctttggggatgagtagctccacgctggaggagtcctcctggtccttgtcagaagtgtttctcacacacagcctgatggtaagaatgcatccttcctttattctttgtgctttcactgaggaaggcacaattgttgtgtactttctccaagagtctctcagtccttaaatggtaggtgatcaaactggacagtggagcagtatatccaccttttttttttttttttttttttttttgagctggagtctcactgtgccgctcaggctgaagtgcaatggtgcgatcttggctcactgcaacctccgcctcccggattcaagcgattctcctgcctcagcctcctgagtagctggaattataggcgcaggctacaccacacctggctaatttttgtatttttagtagagacagggcttcaccatgttggtcaggctggtctcgaacttctgacctcatgatccgcccacctcagcatcccaaagtgctgagattacagatgtgagccaccgcacgcggcccccacccattcttttcctttgtgtttgtccctccctttaagcctgaccatggctcccttcttctctgagcctgcaagccctcgtgtggaggagtagagtgtaagaagtaggactgaacacccaataagtgttcattacattgtcagctgtcaacagtttttattttgctttaaaataaaatgcatctaattttctcaggttggtacttttttactctctctgcaatcagttcttagaaaatctgaactgtgcctgctgagtatccaaaaaatcatcatttaaattgtcttcctttcctttcagatttgtgtttcattggcagaggggatgttggacacatatccaaagaaatgttcttataatgcaatcaaccttttagtgagattctagccttcctgaaagtctggtgttatgtgctgtgctgctttgctcactgttattcagagtggcacctgcattctgtacaacagaacatccacttctcagtactatactctggcggcgtttgaaaaattgttttatttattgcttagtctgaggttcaacatctttaaaatgtcttctttcttggcctcatccctgtaatcccagcactttgagaggccaaggcaggaggccaggatttcaagaccagcctgggccacaaagaccccatctctacaaaaaataaaataaattagctgggtgtggtggtgtgtgcctgagtcccagccacctgggaggctgagatggaagaatctcttgagctcaggagttcaaggctgtggagagttatgatagcattactgcactccagcctgcacgacagaatgagacctggtctccaaaataaaaaatttttaaaaatttctggtcctttaaataattacaaaccacctacactgctttggacaatgagatttattctaaatagacgttggatataaatgcccccaagatattttatgaactaggtaaataaggaatgtttttgtttgtacccaatgattttagtcttctcttggtattactggatcattaataaagtcatatgattttttttacagtcagccattgagaaattaacccatgattacataaatttgtttcacttcccaccactaattaaggtaagtaaggtttttcttaccgacactaatgctacctttattgacacatgcacctgctgcatccacacctaaatttgccaatgtcagtaatggttgtttgaagtgaaatttcatcatatctgtctaacaaaaggccctttgaagcaagggaagtgtataaattgaacacccttgttccccacaagttgaaatattaacaattcgttcatgataagaacaacacaccttactttagtggctaggagttgtaagtgccaacattatcggtgaggtcctgtggcctcccacctggccctggatacttttcaacatgtaagtcactgagagaattcataccctggagcgctcgatcgtcaactttcataggggatgggaggtttactgtttgaataacatattagtatacttaacattttgaatctagtttaaaggaatatggcatactttgtttaaaatcagcaaatacttgcaattcatacacagaactttacttattcactaacagctatagtttttcatctctaagccctcaaagactcgttttgttcctctgcttcatcctccatccacatttgcatcctccatccactgcgtaatccgtctttgggaatagcttgtaaatgccctgggtattgtgaacctctgaagttgaaatctcacaatgcatctctaggtgctaagtgcatttctagggtaaaattgcacaatgcaagatgcactgtgataaatgtaagacagtgacattcaatttgaactgcatgaaataaatcatttggcaaagtcctgaaaggcataatatgtcatttctgttggttgatgtaattagaatttgtagcttaatccaaaataaccaaaagttaatagattagaatagaaaaaaaaaaaaaactagtgccaagatatcatcttctttacatgagaagtaaaaacaacatctagaataattggtgcttggtttcctgttttaggactcaggaggtgaacctgaagaaaatgaggaaaaaatagtgaacctggaactggtttttggttttcacttgaaaccaggaactggcccacaggtaaatcacattttaaatcctttggataaatctcaatcgaactactcttttttctcttctgtaactccatggttttatacaccccctaccagctggtaactggattttgagtaaatttatagactttataaaatagaatttagctgaaaggctgccagctgcctctgtaatccagtctaggaatcttactttctcagtcagctgaagacgcccatgtgaggccacccaaacatcagggtaactcacagtaaagtatggacagggaaggggggccgtggataccagactgtgtataccactcatgtcacagcttcctgctgattcataagagaaagcagctttataataccaagaataaaaactaagaatgaaactgtaggccatgtggagacccaaattatcagctctaaatagggtggcagggcatttgagcaacacttcttcaataagcctctcagtttatgtcattttgaaagtctgcaaaaattatttggcctaggtagcctgtgaattagaattatagtaggtttgtgttacttttgattactataaatagctaatgataataatgataacttctgttaactgaccacttattgtgtaccaggcatatagtactgaagtgtgaaaactactttcccccattttgcaaatgaggaaactgaggctcagacaggttaaataacttgcccaagggttacatggctagcaaatagcagaataaagatttgaatgcaggttgctctggtctcagaaccgaagttcttaactactcataatgtggaagccttcccttgagggaagccaagggaccttataaatacaccttacaagctgtgtaagcctaccgattgctctggtaggctcagctggccctggcctttcctcagtgaaaccatgcttgctccaggccattcctgggaaccagtgcctgggaatgactggaaattgttgtgaggggttgagtttttcctgggccttccaaagatgctctttctaataatccagttaaaaatgggcaaaagatctgcatagggatttctcaaaagaagacatacaaatggccaacaggtatatggaaaatggctcagcgtcactaattatcagggaaatgcaaatcaaaaccacaatgagatatcatctcaccccacttagaatggcttatatccaaaagacaggcaataatgaatgctggtgaggatgtggagaaaggagaaccttcgtacactgttggtgggaatgtaaatgatccagcaatcccactctaggtatataaccaaaagaatggaaatcaatatattgaagagatatctgtactcctatgtttattgcagcactgtgcacaaaatccaacatttggaagcaaacctaagtgcccatcaacagatgaatagataaagaaaacatggtacatatacacaatggcataccgttcccaaacagaatgaaatcttgtcatttgcaacaatatggatggaaccggaggatattatgttaagtgaaataagccagtcgcagaaagacggaagctaaaaattaaaacacttgaactcatggagatagtagaatgatgattaccagaggcttggaagcatagcaggggagggcaagaggatgctgggatggttaatgggtgaaaacatatacagaatgaataagatctattatttgatagcacaacagggtgactacagtcaacaataattatatgtttttaaataattaaaagagtggaactgggatgtccgtaacacaaagaaatgaggtaatggatgccctcagttatcctaatgtgattattacatattatatgcttgtatcaaagcatcacaaagactgggcgcagtgaatcacacctgtagtcccagcactttgggaggctgaggctgggggatcgcttgagcctaggagttcgagaccagcctgggcaacacggtggaatcccattgctacaaaaaatacaaaaagtagctgggtgtagtcgtgtaagcctgtagtcctagctacttggaaaggctaaagtgggaaggatcacttgagctcaggaggtcaagcctgcagtgagccaaaactgtgccactgcactctagcctgggcaacagagtaagacatcatctcaaaaaaaataaaaaatcacatgtacccccaaaatacatacacctagtgtatacccaaaaacattaaatttttttttaaagatgccctttctagacatctatgcaagaatgtgtcttgcctgcaccactgcagttatttctttacctgctgaatgaaaatctttacctcccttgtttcggccacagactttggttgagtgagagctgctctggatacaggtttcttacataagaatagttttctctctgtgaatggatcactgtctattcattcctgttgttagaaggagctacagaaaggggacaggaaagtaagttcttctgtctccaacaatatcagaagcacttctaaccctgagattctgcagctgtggccacccctaagttcatctgatggtaaacaaattgcacatttcaattgccttttctggttttcttgattccatgacattgaatttatgagttatctttaagctttgttatggcttgtaggtggtaaaagaagagagaaaaaatttccttggaaaagatttgtgaacagagatctcaaccaagaaaaaaaaatttttttttttttttgagacggagttttgctcttgttgcccaggatggagtacaatggcgcgatctcggctcactgcaacctccgactccctggttcacgtgattctcctgcctcagaagtacctgggattacagtcgcgtgccaacacacccagctaattttgtatttttagtagagacagggtttctccatgttggccaggctggtctcgaactcccgacctcaggtgatccgcccacctcggcctcccaaagtgcgggattacaggcgtgagcaactgcgcctggccaagaaaatattttcaattaaaaaagaaataatttattaataatggaaaactgaaaaatctattttttagtaaaaataaggagctatggataatatttgaaactgaatacaatggtctgtttttggtaataatgatgtagacttcttgagtcatagattatctacaagccctaaagttgctgcaggttttgatcctctgctgttccttggtcacccatccagagtaatctttcttttttttttttttttttttttttaagacagagtctccttctgttgcccaggctggagtgcagtggtgcaatctcggctcactgcaacctccgcctcccaggttcaagcaattctcctgcctcagcctcctgagtagctgggattataggggcacaccaccacacccggctaatttttgtattttcagtacagacagggtttcaccatgttggtcaggctggtctcgagctcctgacctcgtgatccacccggctcgacctcccaaagtgctgggattacaggcgtgagccaccgcgcccagcccagagtaataattttatctattcatttggcaggcatttactgaggacctactttgtgcctggctctaaggtagatgctagattttgatacaaaatcaaaaagtacaatcccagcctttacagaacctacagcttatcataagcaatagacaaaatccacaaaacgctatggtacatacagaatgatgagtttttacaaagccatttacatggttccacgggagttcactggatgaggatctacaacagatgggaaaggggtgagggagggtccttgaagtcttcttggtagaagtgttgcttaagctaaaatgttaaagccactaagaatgactaggtaaggagaggacattgaaggcagacgaaaccatgtgtgcaaaagctcaaaagcatgaagccaggaaaacacagggagctctttcttggaataattttgaggggacttcacgactcaactcaagcatcctccctctagaaagacttaccttggaacagggggatgccaaagggagtgcccagaaagggggctggcgaccagaaaaagcactgtcttatgtgctaagccaaggagttttaaggattttaagaagagagcagataggatcagatttatgtttttttgtttgttttttgagacggagtctcgctctttcgcccaggccagagtgcagtggcgctatctcggctcactgcaagctccgcctcccgggttcacgccattttcctgcctcagcctcccgaatagctgggactacaactacaggctcccgccaccacgcccggctaatttttggtatttttagtagagacggggtttcaccgtgttagtagccaggatggtctcgatctcctgatctcgtgatccgcccgcctcggcctcccaaagtgctgggattacaggcgtgagtcactgcgcccggcccagatttacgtttttaacagatctttcagaagcacagagaaggatgaattggaaaggggccgccaggctagagtgagaaagatctgtgagtgggcagcgcagacaaccaggtgaaaaatgtcaaagcgctgagcctgtgacagtgccatgggtcccaggacacactgaaacggaattagattgtgtcactagctggagacgcagcaagtgggagggaggggccaggagggtgctgaggtttctagtgtgggcaactagagagatgatgttataaagtggtggatcaaaagtgaaatatacaatgtgaatatcatgctaaggtgctaaaagtataaagaagtgactggaatgggtgaggttcatcaggaaaagcttttttggaaccatgagtattttattggggcttgaagaggttggtgggcagttgcagaataatttcctgaatataatgcttaaagcttttgcttagataatacatttctaaagagctcaggtattcaataaatgtcatctcctttatcccgttagcatttgggtgagatgcataactcatagtatcatcgttgctgattcagaaagagataacaagagaaagtgtatgacttgcctgggatgaggcaaggacagagctaagaccagaaattacatctttattattgtctttgtagtaaatatgtgctagatctcacacctgacccacaacatttaagccatctgtaaacctatataaaacagtcctagaataaattactatcctgttctgaattataccagctatgccagcctatgtcttagcattatgaaatattttctgattaatgtgctttgaattgaaatttcagttccccacacgaaaaccttgttgccttgggccttaaagatagaacccaagaaaaaaaggcttcctccacatcccaattaaccaagttctcagaaaccctcttcatgggaaaggtgaagcctttaagtccacccccacctccatgaccggaataagctttccaagagaaaattggagctttgcaagttctctccaacctaggagtttgcatagcagaggcatttgctggatttcaccttttcttttacaagtaaaatgaaaaatgtgttgtaatggcagccattgagaataaggtatgacagtgactttatcatgaaaatagtagctacattttccctttgcatttgagaaggaccacccactaactaccccttaaaattatgtcatttccacaacttgaagcctactaagagcaagccaggaaaatattaccttatacacaaataggtaaaggaaaaaccctgtccacctttgtcctaagaattcagatcaagttatttttcttagcttcattttacaagcagatggatgatggcacaaagcgaggttgatctgcagaaccctggaaggtgatctgtgtttgagtgcctgccctgctatcataatcaggagtggctgcagggccatcttgcccatgcgcttagtcttcacagccacatccctccaaagagccaggacctgaccaggctccagccccattgatgcttacaagaattctcccacaagtgaaatgtgctttttctgaaacaacctagcagggaaaacatcatgattagaccaaaggcttcactggcaatttaaattaataagcgaaacaggttttacccccatttacttgacctgctcctaagtagtaaagttaattattaatttaaatgacataggccagacacagtggctcatgcctgtaatcccagcactttgggaggccaagacgggcagatcacttgaggttaggagttcgaggccagcctggccaacatggtgaaaccccatctctactaaaagtataaaaattagctgggtgtggtggcctgcgcctgtagtcccagctacttgggaggctggggcagaagaatcgcttaaacccaggaggcaaggttgcagtgagccaggatcgcaccactgcactccagcctgggcaacagagcaagactcatctcaaataataatagtaatttagatgacatcatatgtggagacaacctggaagttacgacaatcaaactggcagaaattgtgtctttctctgcttgaatgtttcccatgctagggataattattattccttcgtacttctggtgagcactttgcaaagggcatatttgtgtaattgtttcaactcaacatgacagggaacattatctctgtatcatcctcttcatgaggaaactgaggcacagaggtgaaactcctcaccagaggctccaacctagtaaggggcaaattcagtctaaaggtctaactactgtgtcacactgcctcattttggaagataccattgtcctccaaaataaggatattggtaatgaaaaggcatttgggggtcagttaattctaccttaccactatttttgtttttgcaatcaaagtgccctgtgttttacaatctaaggcctttgacttggcacaaaaggaaagcggcttccagaatctcaggcgacttcatgcgctccccagggtggcaaccacccctttttattaaaatattcggctgcctagattttattattatatctcttatcagctcaccacgcaggaatattgattctcaaattgccaagagataaactatcaaatcacccagcagttttctcaccaagatctttttgagacttcgtgtgtcataaaaattcaaaagcagaattaggaaggaactctttggggagtcgtccattccttacaaatgctcaaccgccacagactttgttccttgcatccttatttcctcctctccccaataaggcaaaggaaacctgattgaagctgggttcccatgggtctaaactgataacctgacatagataagagactgaggttaggggaaaagtaacggaaacagcacgctgcccctcccaactctccgaacacgccggctacctatgagtgggtccttaaataaagaccaggcttccagactggagccactccttcccagatgaccatcacttccaatttcctatttcaaaggggcaagaaaagtaggaagagtaaatgagaggaacctttggaagaggtagaagcagaattactgatgcccacaaagtggaagcttatcaatagaggactttcctgcccagccaactccctctcctgccttccacccttgccattgttaacacctggcctcttctcccactccgcagtggaagaaattcaatcaatagttctgcttttccagccatgtcatctataggttaaaaattcggctttttacaaatgcttcccacttgtattgtgcttttaagtccttattacattgcttataaaatgttgcttttaataaacttagttgaatctccaggccctttctcagagcactataaatatcaaaaactgtcaaatagggcttttttttttccctattgtgcaatctttataaatggatagataaacatgaataaaataacagggcacaaagaaaaggattttgtaagtataaagccaacactttttggaaatttcagaagagcagaaagcagcactttactttgatgtatcttgcgtttattaaaaattaagtgaagggaagtttatttccatgatcaactattttttgagagaaaaacatacatgtatgcacacatgaatttgtgtccctaagtatctaagatgaataagttctagagatctactgtacagcatagtatctacaattaacagcaggttgttatatacttaaaatttgcaaatttgatctcatgttaagcattcttataaaaataataactaataaataagagggcaggaggaaacttttggaggtgatagataaatgtttatggcataggttgtggtgatggtctcataggtgcatacattacctacctgttcttgagttctcatgcaacagaaattaacatgagggtgagaaagtttcccagacacggctttactggggcctatgctcaagtccaagggagacagcatgggagcaagagttctctgactggctctctgagggcaggtcttgcagtgttttaagaagggtgacatgaataagcatgaggtaagcgaaagtcattacatgtgcaggacagagcacagggtgtgcaggcgaagtgagaaatcatgttaatacatgcatcgcatgatcaaaaaatggcagataagctcctggggcggggattttagtagtataatgaggcaagaggttaggatgggtcattttcttggttttgtgtgcatgcgggtgacagggttaactcccttgagattgatggtggaatgctgcttctcagtttcgtcacacattttacaagttctcacggtcagtgaggatgtatggaaaaaaatatactagttgggagggtagggttgagccccgtccctaccctgtcttatatatgtatctccaaactcatcaggttatatacattaaataggtagagcttttcatatatcagtcatatctcaataaagtggttttttaaaaatgagaaagaaacacaagttttaattgagcaaagaagcaaatgcagttcagaattttacaactgcataagtcactgctgatttctaattacagagtgtggcaatgtactttgtcaaatgggttggacagccacctatagagctagagagctagagcagaactaggcgaggtgctcagtgcatacctgctgaatggattgacagtcctgcatacaagctagcatgccaggaagtgtctaacaatgggagaaagccctggtttgtagcatgtgtagatctccatggtgtgaaaaattcccactatggccgatttcaagttaccaatctggcatcactggatttgaagttgggaatggctgtaagcaatcagctcatgagagctggctccagcacactattgggtctctcttagtcttcttaatcaagattacgaattccttttaaaatagtgatgtacatgataaaacataggctcaaataaattacaagcacattattgctggttaccaactataataataagtgtctttaactcaaagagagctccagtctcctaatgaatccattgtcagttggcttaggtctctggatcaccattgtctcattttgtcatattgtctcatactgaccataatgcataaatcaaaaattgggattcaattttgtaaaaagtaagaatatagtttggaaacagaaaaacaaaatgtaagtttgtgactgtctttaaaaaacgtggaaacagtcatagttgtgactccttgatgacaggcacagttgtctataggagagagatctttgcttttagaagaaagttttcaaaagcttctgaggatcactgcaagttctgcagctagagacctcagtactcacagtggcttctgttttctaaaccaaaaattaggtgttgagaataatcagctataaaagagacagactatttgaagtaaaattaaaaagcactatgttggaaaatcaaggatgtaggacaaccgtatcaatcctggacattaggatttgaatcgataatagctcaactggtaaacaatgcctactaactaggttagtgtttctttgaaaatcatatttcttcgagtcacccctaaagtcatggggtgggaggagaagaacctaggaggtagaacagctgtttttatattttgaggatcctggataaaactttatttgcagtagatgtcccagtatttaaaaatgttaaagcagtgcttaggcaagcgagatcaacttctatattcgttaagaaacccactctgacatagaatagattcttaattattcagaaatcaatagcaagacttactattatttttttccatcatgaagacctagtactttccaatttcaaatacagttaaggggaaaaaagccctttccaaacatgtcaactaacatctgaaccattttagacagtcaagtgtgtaatgcatcatatgaaagtatgtctcacttgatttgtttcactttattttaacatcatccttaaagcccctttttcatacataactcaaataacaaccccccaaaaggcaatataacaaccttatctccaccggtgtctacttggcaccagtctgccctgaccttagacacaagccattgttaagggtataacgcatttacatattttgcaataaaacatcagttatttgcattactgtgtcaagttttatttgattctttcacctaaaaatgactcattttcctttcttgtattttaaaaaccaactactctaagcttgtttgagaataatcaaaaattgcccatttagctagaagtcattttcttttcaaaaggcaaatgttatttaatctttcagctgttcattgtgccatcataaatactttcttttcagcacagttgtggggactgaaatgagcccactaattgcctcccatttcgactgacatgtggtggtttagtggaaagagaacacagcagggagaaggaaataggaggctgagaaaatgagagctaattattttcactgcctcatgtcaggctctgtgtcagccttgtttttacaaactggaaggtttagcactaaataaaacaaactggcgtcatgtttttatatactggcagtgtcatggaagcagctgcacatctcaaagacaatataatgcctgcgttcgcatggacaccatctgacagacactgtgagccacggctaatgaggatatcacagtggtgccaagtgaaaggtgctgaattatgtatgattcttcatcagtacagcaatagtcctgtacatcattatgagacattgttttgctgaagagattaaaacattcttagttccagaccctgcaacctatacgcgctgaaagaggttattaatggaatttttagggagagtttcttgtggatttctttttggttaaaaaaaaacaaatctcatgggacaaagccatggtgggtcatgacactgtatagataaagaagagaagcaaattaaccatacttgtattatctttttttaaaggcagcataataaaatatagtgtagcagggttatacttaatgataaataacccaggtgctatcacgggatgttccactctcctgcctttaaaactgcaggtttcagcagctgagctagataatagcaacgcatataaaggagccttcagaggcctaaattgtcaacatcttactacttttaataccagcatgaacaaaatttttatcgtattcttatttcatcttgcattacttcatagatgccacaacagtcagttgtgactcttgtggctcttccagtcttcccttgaatcttaaaaagtttattctgacctctgtattttatattttaaattgcttcctcaagacaggccttttttgctgaaaccctgagcattcttggttgattttactttttctccattcatggttttggggagtggtggtggattttgaaaattaacctctcagcttagatttggcatgcgtggacttgaattcttatcctacaaagccaaatgacctggctacaaatctccccattttctgagcctcagtctcctcatctgtaaaatgggggcagtgctctctataacagggtaaggctgcgaggattaattaacatagataaatctcaaaaacaacatacaagtacctgctgtaaaattctaattttgtgatattccagaacagtcaaatttcatctatggtgatagaagctggaacagtgtcctggttacgcaggcagcttgtttgggaataggcacgagggaaggttctggggtaccgtaaataccttgcttattctggtggttacacagatatatactattgtcaaaatgtactgaactgtacaattaaaaatctgtgcattttattatatgcaaattatacctcaataagaaaatacacttaaaattgtttaaatgtctgtaacatcaggtaaaggtgatctataaaagcctgaaaggctaattttgggagtctgtttctttctgaaatatcctgaatgatcttggtcttgattgtttaatggttttatgtataatgttgatacatgcaattaaattttgatagggaaaaatagagagagagagagagattgagattattgtctgtgaattgcccagaactttaaactctagttttttgtgctaccttttaatctcttttcctctttggaacatttacctctatcttatttctttttattccctcacctcttcccccattttcttcattcccttttttcttccttgtgggagatcacttgtctgtgatgtttggcatcacttgtactagcttggaactctaaaaaaatttaaacagcttgcagagagtgtaatagtgatttctcacaaagagatacttaatttagcatcaactgagtgtcgtttaggattttatcttcacagtgtaagagtttctgttttagttggccagtagtcttaattcagaaaattttttcacttggtgatcctgaagcagttcagatagaatgctttctcatcctccattagccacacacgtgctcctaaaattacccaggtatttcagcagataaacatgcatattctgggcacccaccagaattgttgtatttttcattcatgtcaaacacacacattcccctcgccccaacaaaattccatttgtttcctgtagatttgcattgagaggcagattttctagctagtggaaagttccgggtaactactttttgctactcgaaatcctagcaaaagcacttcccagtgcccacctccgctcctgggctagttcccttttcctgctgaagagtaattagcactccctgcaaatgcccgtcaagcacttgtgccccaccacttgctacctgtgtgacctcagtcaaattacctcatctctctgtgctttggtttcctcatccaagataatgctctctggctgccaatcatacacaatacctccaggcatctggtgctgcttcttagtagtgctgaatcaggatatgtggaagcagggaaggtcagaattggtgttatatgatccatctatgtaagaagatacgaatttattccttctttgcttcatttcatgaaactggccattgttatgttgctgcttggctgcatcttctctttttcatctctgatcactccctggtacccaaatgattcacagccccctgcacgcccagactcctgcccaagtgagacgcgctgacccagcctgcccactccagcagggtccctcctctagcccactcttcacaccttcctgcccatcaaagctaccttgttctcggtcccattcccttttatggctgccagatgacaaaccagctaattggagctgtgttggtgaccatattggtaataatgataattattcctttttgagctcctaattcggttctggcacaatgctgggaactgcgtttacattatcttaatcttcacatgacaccacaatccacttctgagtaaagaatgctgaggttcagaaaggttacataagttggctatggttgggaggaaaagggacaaaactggaattcaggcccaggtaatcaaactttaaacttgtgatcttgccccaccttgccccacaatgtcccactagtaatgacttaatgtatggtttttttccatactgtttccattttaataggaatcatcaacaccttaataagaggagtgaataacaggagcatttcagactaccagggtgagatggttttgaaaaaggagtactttgcagttcccataggacctcagaatagagagatgtttgcttttgagagttgttcacagacattcaaagtgacccttgaatatttctaattcaaaagtcagtgcccacatttctatcactcacctcaagctaaaatcagtagtttacctgggccaggtgcagttgctcatgcctataatcccagcaatttgtgaggctgaggcaggaggaccacttgagcccaggagttccagaccagcctggacaacatagtgagacttcatctctacaaagaataaaggcgaaattagccgggcatggtgacacacgcctgtggtcccagctacctgggaggctgatgtgggaagatcgcttgagccctggaaattgatgctgcagtgagctgagattgcaccactgccctccagcccgggtgacagagtaagaacctgtgtcagaaaaaaaaaaaaaaaaatcttaccctggtcaaagtgaatggttttaaaatcagagtccactaggccaggcaaagtggctcacgcctgtaatcccagcactttgggaggctgaggcaggcggatcatgaggttaggagatcgagaccatcctggctaacatggtgaaaccccatctctcctaaaaatacaaaaaaaaaaacacaaaaaattagctgggcgtggtggcgggcgcctgtagtcccagctactctgaatctgaaggctgaggcaggagaatggtgtgaacctagggggtggagcttgcagtgagccaagattgtgccactgcactccagcctgggcaacagagtgagacttcgtctcaaaaaaaaaaaaaaaaaaaaaatcagagtccactgtgcccattacctggtccctgccacagccaaggtactgaaaaggttgcagatatgtaagtaaaatcctatattaggctcataaacttgtggaattgttatttttagtgatattattgatgacttaattcattttatttgtaatgatagccttttccggggttgatcagttaagtactggtttcatggcatctcaatgtctgcagtgtgtccagtccaattcaataaccatttgaatcccagagttgtggacaatcctcactgacaatttatgactcacaagatggcaaaaacattaaggataccttaggctaatttgaaactgagcagaatataaggaattccattactttatttgtggattacttttgttaactaggcaacgatgacatcatagatgccctgaagctacctggagttaggtcaggccattgtcaaattaacttaatgatttacatgggcactgcatgttgcagcatattctctttctctcttacccagctttgtaacaagcagaacctactttttagtgaaatgaatgatgccctccttgtcttatgacttccttgattatagttttattccttctgtagctaccttcttttatggttcaggtaaaagcctttctttagtagaagggaaaaagagaatttaaaaataaaaggtctctaaccctattatttgtatcagtgtttctccaaaagttggactttggggagcagggaagcagttgctgcagggaggatgatggccactagctttcttggttgtatcaacgaaatctctggtccttcttccgcctgcctgttgtccatggctggacccatttatggagctcaacaaaatcatccagcaggttcacctgccacctctcccgcttgtctgtccccattagtatctcctccagctttggagtcacacagccttgtgctgatgtcaaccacgtattggtcatgaaaccctaggaaagttctttaatctttctgagcctcatttttctcattcgtctaaagggaaaatagtcctgactttcagggttctgatggatatccaataaaacagcatggtgtaagtgcccagcaacatgcctagagcatagtaagcactccacaaatttgagttctcctcctgtcagccgcttcttcacacagagccgttctgacggtgtgcagaggagggtctgatttctagcttgaagtcatgggagagctccctggttaggagatgagagtgaagcaggggaagttcaggcgttttcacacagttcaaggtcttttgactgtgcttttgactaacttaattcccaaacttgacaggcaaaagaaactgaactaagtaaactcatctcttctaaggctttttatcccagctgctgccttgaggaggttcttgctatttcagagaagagcaatcatgacaccaaacagtcattatcctgcccacttacctcaggacccacattgcctgggtggcagtggctccaaaacaaagaaatactgagagatttgtcaattctgagaaactaatttgacttatgttagccaagaaccaggttttcattttattgaacggaccttttccttcactaatcggctttccgtcttgtgaatgtggctggccaaagagggccagacatgggccctgcttggcttgcgattcatctagaggctttccgaaaacatcaggcacccccagcttcctgttgaagccgacaggctttcaacagcctctttgtggatgcctttccatatgaattatgtctgagcttgctctaggaaacattccaggtccactcttatttatgagggcattttcagcatgtgaggtgcttggtacattagccttaatcctcaggattcttcattcttcaaaaaacacagagccaggagcagtggctcatgcctctatcccagctacttgggaggctgaggtgggaggactgcttgaggccaagcgttcaagaccatcttgggcaacatagcgagacactaactctaaaaaagaaatttaaaaaaatagatagatagatagatagatagatagatagacagacagacagacagatagagagaatgtgcatttatggtccaggggtcaaatttggtacaaagacatgagtttattttcctttgtttatccccaaacgtttttattattaaattatttatacagcaaagttgaaagaattttacagtgaaccctcctagcccccattcaaccactaacattttactatacttggcttatcacatatacttggcttatccatctacccctccctctagccatccatcaatctttattttttgatacattttaaattaatttgcagacatcagtatacttcctcctaaatatttcagtgtgctagaataagaaatgcagttcaggtgcagtggcttacacctgtaatcccagcactttgggaggctgaagtgggaggatcacttgagcccaggaatttgagaccagcttgagcaacaacacagtgaaaccctagctctacaaaaaattaaaaataagaaaatattagctgagcatgatggcacgtgcttgtggtcccagctacttaggagcctgaggtgggagaatcgctggagcttgggaggtcaagactgcagtgagcagagatcatgctaccatactccagcctgggtgacagagcaagaccctgtctcaaaaaaattgttttaataatcactataaaattaattaaaaagagaaatacacagatttaatatatatattcactaagttttgaccaatgcatgcacctatgtaacccaaacctctatcaatagagcactgctacccccagaaagtttcctcataccccttgtaagtccccatctgctgaagcaagcacccttctgaatttttctaccattaattagttttgtctgttctagaatatcacataaatggaatcattaggttgttctttttttctgtgtggttctttcactcactataatgtttttgagattgatccaaattgttgcatgcatcaataatgtcttcctttgtattgctaagtagtattccattctatgcatatatcacagtttatccattctcattttgatggacacttggctagtttcaagtttcctagtcaacatgataaagctgctaagaacacatctagacaagtcttttttcttttctcttgggtaaatacctaggagtagaatttctgggtcatagaataggcatatatttggttttataataaattaccaaaatttttctgaagcaattgtaccatttacattcccaccaacaatgtattaatattaatatgagagttccagtaactctaaatcttagccaacatttgatgttatcagtcttagccattctgatgggtgtatagtggtacctcattgtggatttaatttgcattttcctggtaacgaatggtgtaaagcactttttcattatatggtgattttattaaaaatttaattaacatactatcgtttaaaaatctagagttttacataaggatcctaattctcagctgttcatgaaatattaaaggacctagcaaaactgggctcatatttccacatgggaacaatcaacagaagccacgaagtagctgtgcctttaggggaactgttctttggtttcccagagtccctcacccaccccataactccctagttgtccgttatcatacatcatcacatttgcactgttgttttctttcgtattaagaggaaagtgagagtttcttgaacccacatcattatcaatctaggaaaattaaaggtggatcaagagggccttatgtttcaagaaaggtagaaaacccacatttctttgtggcaatgagaaaatgttcctacaatgtttaatatgtaaattaaatgggtctattttaaaaggttgccacttaaagctttataaggaaactgcctggttttactcctttttattatctgcctagtcccttcaggattttgagtttgtaactcctataatagaacacttaacactgatacattatgtctcaaggctgcactaactggggcttatttagatatacataggaatctaatttcatgtccttttattgaaaaaggaaaaaaaaaaaagccactccaataatacttcatttagaatattttatgtgttaggaaatattgagactaaaaaaaaaattgtttcactttctcagattctgtaattttgtttttaattccaggattgtaagtggaaaatgtatatggagatggatggggatgaaattgcaataacctacataaaagatgtgacattcaacactaacctacctgatgcggagattttaaagatgacaaaggtagggttctatttacggcttaaaagctcttttgaattcacagatatcaaacaaagacattaaaataccccagcagtgtgcttttgtgcttgtccatgctcacatcagctcagcctcgagctggctgttgaaaggcacattttatttagcagactgagatcataataggtttttgttaaaattctacttatgctgtgtgaactaaaaagcactgcaaaaaggtatcgtttaatttttttttaatttttttgtctattatttctttatgcttactctgccatttattaaaggagggaaaatgtgaacgatgaaaatatttacttcaaattttgactatttaaactttggaaaacttttcccggagaatgactttcttggttgaggtcaatttcctgaaggactgagatgaggttaattatgaggcacacagtgaagtcttaatggcttccttaagttcacacctatgaattcctggagtggccagagaacatgttactactccagggtcaatggtggaagcatgttgatggaagcatgctgatgaaaacaagaaagacttgtggaaatgcttagcttgctcctcaaaatggaaaaaaattcaattctgtcccaatcatactggaacaatacatatgagacttcaattgtagaaggtcaacaacttcaggtaaataaccatgaagtcaacaggatagtcaccataacctcacataatccattaactgtaatacactattcaccaggtctttggtttcagtgaagaaagtggggcttgtagcaaaggacccagatacaaacacaaatagggaactaaaatggttcttcaaagacatgcattagagtgcacatcagagtgctaaaccaccaagtccttttaatttgcaagtggacatcaagcagattgatttgatattcattgttggattccactgtgcatctaggagttatttccatggcattatttatctgtaagggttgtcacttggttttacctttttcttattttgtcaggacacagtatgttgtcttgaagactggaaagatatttcctttcttccccacccatgccacggagttgtaaaactgaatataagtgtttctgctatcatgccatacatacaaaatcacacagcaacattaacaggcttataagaaaactagaactgggacagaccaatcgaaagttatagaatttttaaacatcaaccgaaacaataataatcctaatttaaaacaaacaaacgacagcaacaacaaaaaactagcccaggctgggtgcagtggctcacacctgtaatccctgccctttgggaggctgaggtgagcagatcacttgaggccaggagttggagaccagcctagacaacatggtgaaaccccatctctacgaaaaatacaaaaaatgagccaggtgtggtggcgtgctcctgtaatcccagctacttgagaggctcagccttgagaatcacttgaacccaggaggaagaggttgcagtgagccaagatcgcaccactgcactccagcctgggcgacagagtgagactcagtctcaaagaaaacctagcccagctaaatctctatcacattttctttgaacccagctcacagccagtcattcctttgcagccttaaacctgaagtgaaagggggatggcaggagagtacagcttatttctgaggctgtttttatcataattaaaataggatcaaagctacaggcttcctcactaatcctttgttttaatatagtgggaaaacataaccatggtttcttcatgtgtatgtgcagctttgctggatagtgtgatgtcatggaaagcagagcgattgttgaagccactaaaccagccacggctttactcaaggaaagcacttctgggtcttctcatattgctatggatttctcttaattgttgggaagttttccaactgatgcttcaaactttagcaagaattaatgacctaatgataggattgagtgatagcaaatgttatatcggaaaagaagattgtgggaggccatgactagctgtttacaaatatacaaaaggatgtcttatgaaaagcaaaacttcaaacattagcatgttgtgagtgatcacatgagaaccaacaaggctttcatgataatctgatattatgcccctatttgctaattgtgtatggcacaaccggcctcaaagaaacatactatagtagagcagactgtgttatggtactacaccatcctaacttttgtttttcagccaccatttgtaatggagaagtggattgtaggaatagcaaaaagtcagactgtggagtgcactgtcacatatgaggtaagctctgggggcaagaggctggtggcctcaccatcagttaatgaatataaatttatctgttatctcagagcatataatttattgggagatatacccagagcatataatttattgggagtaaaccaaccaacatgaacataggaagatcaatataatttctctcacaacgtgttgggaagaaaagagaacaggataaacttacccagatagcgactgaggtagtacttcagtcattcattagttatggattgaacaccttctgtataccatgtaagatgtttggtattggggatactaatagttaatactaattttttttaaatcaacaagatcttcatggctggtaggacatacaccttacaaggtacgtagacccggtgggagtgggtggaaggcaacagttatagtacagtcttggcacacctggaaatattagtgtgcacccaccatcaaagggacatgcatttcattcattcatcaattcattcattcaagaaacatttattaaggatctaccatgaaccaggcactattagaggtgcttacaccagtttgatcacactaacttcatgtaaatcaatactgaaaaatatcgtccaggcgcagtggctcacacctgtaatctcagtactttgggaggctgaggtgggcagatcacttgagcccaagagtttgagaccagcctgggcagcattatgaaaccctatctctacaaaaaatacaaaaagtagccaggtgtggtggcacatgactatggtcccagctactcgggaggttgaagtcgggggattgcttgagcccaggaggttgaggctgcagtgagccgagatcacaccactgcactccagcctgggtgagacagtgagacccctgtctccagaaaaaaaaaaaaatactgaaagatattattatcctcattttgcagataggaagaataggctcagagagatgaaaggaagtcttgaggtgtgaggtcctcactgacagaattgttgaagtcaattccatgttttctgactataaaaaacactttctgcgcttccctggctaccctgttagctcccagtggctgcagtaagatgaagtccacctcaaagaggactctgtgagtgtggcattttgatggtttcctgggctgccaggatttggcttttcaatattagaaatacaaaccctgggccaggcacggtggctcaagcctgtaaccccagcactttgggaggccaaggcgggtggatcacctgaggtcaggagttcgagactagcctggccaacatggtaaaacgtcatctctactaataatacaaaaattagctgggcatggtggtgcatgcctgtaatcccagctactcaggaggctgaggcaggagaatcgcttgaaccctggatgcagaagttgtggtgagctgagattgcgccattgcactccagcccaggagacaagagcaaaactgtctcaaaaaagaaaaaaaaaaagaaaagcaaagcaatacaaactctggccagtccacttatccaggctggaagccaaaaagttttacagcagttatttatcctcacctgctggggtgcacaggttgtcagggatgaggcatctgagaagttatattacttgtcaaagcattgcttgcaaggtgcaaaacccaaacaaaagaggctggttggtcttgaggaacttggaaactagactactctacagcctgttaactggtcctcactacccaggaaaagccctcttgttagtaatcggacaattagaacaaccagattctacctctgcctgccttagacagttttggagacagcacacccagttctctttttcttcttctctctccctcctcctcctttttcagaccccatgatgatatgccacttttgtctgggtttttcacttcagagttttttaaaacagatttccctaaccatattgaatcctggagactctttaattgacactgattggtgacagctagtgaggagggagatttcagaacaagaaagtaatgtgtcttgacctagtgtcctctccttttcctggtccccatttcttacttcttgatcctgtctcacttttgcatctgagaccctttcccctccgtgcaggtaattcaccccaccaccttcactcagtttccttgatgatccaaattcagtcttaggcaaacatggtggtcagattttcatttattcaacaaaatagctgtcatcaagtactataaatagaagatgtaattttttatttcttattaaacaaagaggtaagttgagatttgtcaaatataataaattctgggaaaagacaaccatattttttagctactatagtttactaagaaatttatgttataatccattaaggaataagtgctataacccactaagaaataaagtggttaaaatttttcttttcattgaattagcatatttgggccaactgttcagaatattttcctagtgcattatgatagtgttctaagaggtgaaactgaagtgatataataacctggatgactttctttcccattttatatatgtgtgtctatttggtcatatgtttctatttgtcttttttttgtctttttcgtttgtttgttttaccagagtgatgttagaactccaaaaagcactaaacatgtccatttgattcagtggagtagaacaaaacctcaggatgaagtgaaagcagtccaacttgccattcagacattattcaccaattcagatggcaaccctggaagcaggtccgactcaagtaagttagtgttcccgtattagatgtgtgctagattccagaaacttaattatgacatttccagatgatctaaagactcagaggataccacctcaatcagttaagatctatctttgagcttcgagtagcagaaaacccagttgcaactggcttactccaataattccccaagtgtggccccaggaccaggagcatcgggatcacctgtgaacttgctagaaatccagatgctcaggcccaaacccagacttactgaatcagaactctggggataggagctgcagtctgcattttaaggagccttcccagtgattaagaacaactctaaagtccttaagccactgatttaaactgtaataaaatttattatcttccataacaagaagcccagaggtagggcaggctccaggtgcagtaagataagctggctcaaccatattcagagagtggaatgaaccttcccttctttctgccctgccatgctcaataggctgcctttgccctcggctcctctcctgtttacagtcatcacacaaagatatcacaacgcccagaggaaataacgggttaggtccctacctgttcttatatataggagtaaggaaaacttttctagaaacccccaacagactacccgtcagcaattctgctttggccagaatggagcaacctgtccgttcctaaacatagcatgagcacatctgacttaaactaattaaagtcgatccctggagccagaatgcagtcaactctcccgatcacgtggctacatggagggggatggagactgagcaaaatcagggttctattggaaggcaaaattccagagaagtcaaggcgaggaaagaaggcattgtgattctgtatgctactgctcatgtgacgtatgtaaagtagtcaaagtcacagaaacaggaagtagaagacagttaacaagtggcggtcagggggcaggggagaagggaggggaaatggagaaagaggaaggtagagattagtgggtatagagtttcagtgttgcaagatgaaacagttacagagatccgcacaacaatgtgaatatactaacactactgaactagaggcttaaaaatggctaagatggaaaatgtggtttttaccacaataaaatacacacatacacacaataacaacaacagaagaaggcattgtgatggactgaagcctgggaggagtctctggaattgtctggacaagtcactcacttcagagctcggggtcacctgtgcccaggcagtgaggagacagagacatgtgcatgctctgatactctccacgcgcactatctgcgtgagcagggggtggagtagctgaggaagctgaggctgggaggaccacccaggaactctagaacatgggtaacgttgttcaggctcgggggaaaacagaaaagatctcaggtgtgaggaacttgcttattcactgaaatatagcttactaaatggttcttgttaattcaccattttcttttatcttaacttcttcctatctgccaatgcagcttcatttttttatgctgaaaatacttcttattcccgagcctcaggatctctcctgtggacacgtgaacggtctttcttccaaacaatctctagctgtctcaaccttcggaacctcatttctcttatctgcatttagggtccttgaggttttaaaaatgcaggtggcaaaacaaaccttttgtttactaaacatgcccctgccacctgaacatactttctagaagtaacaacacaactatgtaggaagaagatgggatttagatgcagaaggacttggtattattgactgagtgatcttgggcaagtcatttgacctctcaagcttcctcatttatagaataaaactattagtgtttacctaagaagattactgagaggattaaatgagatagtgtaagtaaagcccatggaacaatgccaagcacatagcatatattgaataagtgtaaatgtccttattttttaaagtatttgtaataaaagaaacgtccttatacatagcctagaatttctatgaatggtaaagcttagagcatcccaaacagccctgaattatcctaagacaggcgtatgaattagacatgcagctttagtgtggcttaaaagatgctcatttccatttctcccgcaggtgctgattgccagtggttagatactctgaggatgcggcagattgcatccaacacttctttacagcgttcccagagcaatcctattctggggtcaccgttcttctcacactttgatggccaggattcctacgctgctgctgtgagacggccccaggtgcccattaagtatcaacagattacacctgtgaaccagtccagaagctcgtctcctactcagtatggactgaccaaaaacttctcttccctacatctcaactctagggacagtggcttttccagtggcaatactgacacctcttcagagaggggtcgatactcagacagaagcaggaacaaatatggacgtggtagtatatcactcaattcttctcctagaggaagatacagtggaaagagtcagcattccactccttcaagaggaagataccctggaaagttctacagggtttctcagtcagcactcaatcctcaccagtcgcctgacttcaagagaagccccagggacctccaccaacccaacaccataccagggatgcctttgcaccctgagactgactcaagagccagtgaagaggacagcaaagtcagcgaagggggctggacaaaagtggaataccggaaaaagccccacaggccatctcccgccaaaaccaataaagagagagccagaggggaccaccgtggatggagaaacttttgatgaattgaactacatagcttttctaagcaggttaaaaaaaaaaaaaaaaaaaagaaatgtaatggtttttgataatatgatcccttcagattgaattaacgaaaagacaacacttccagtttttggattgggaaataccttctaattgagactatagccaaaccagggccaaaattatggatattggtcacccagtgatcataactaggcttgaaaatcactacacatattttctgccttgagtgaacatttttagaggaaaggttatgccatctttttaccctaaccactgatattctggttagcagggccaggacaaggggaaggaaaatgaggtcaacaaaaaaatcaaatttttaggaaaagataagatgaatgttactgatttttccttttggctgaggctgcaatatggcctggcaaggcactgttactgatcttgtctttaacattttgatattttgttcatcataatttttgcatttatttttttaaatattgcattaaaatatcatttagcttgattatcgagttttttggtttgaggttttttgttgcttcttttttcttttctttctttccccctcttttttttggatgtccccttaaattttgtgcccaaggcaggtacctcactcatctcatccttggctcagccctgctggttagtatttagtatttattttagtaagatatttgtgtctgtatgatggtcagagttgaactgatctggcttgtcatttttcagtaataaaaaaagttactgaatttaatgttgaatatgatgcatatctcattcattacgatttatcagaaaccaaagatttaaattgcctagatttgtggttctttctcttcctaagttcccagcgactgctttcaaatactattttctaaatttcaccaaaggagcaaagaggataaaacaacactccataaaggcctcttgggatgtcagaaatctaaaatctaaaagaaaacagacacagagcaagacaataacatcacaagctaaaagccagagaaatttaaaattaccaacatccttgttggagtaagacagtaaatatcagccttgcagcaagacagctctgagcagctgtgggcaaagaggtaaaccagtgggggtgcaaggagactgtctgcagcttagggcagaaatggtgggatccaacttgtgaaatgcttcatgttttacaaaccaaaaagtcaggtagcaacaaacttattgtatgtcaaatcaataaatgttactttcaatattctgagattctgttcagcattcactaaccctgtttagcattcactaagccctacataggattctcagtgctctgtagaaatccagaggacactcttctaattctgtgggtttgaattcttttttaaaagaagctggtcatcagagtacatgcatttgttctcagggtagctcccctgctgtgtgtgatacattacttgaggcctggtggggaaaactgtatttcggtagcattaaagtcaacgtgggtggggcatggtggctcacgcctgtaatcccaacactttgggagactgaggcaggaggattgcttgagcccaggagttcaaggccagcctgggtcaccagcctatctgggtcagatagggagacaccatctctacaaaaaaatacaaaaattagttgagcatggtggcatttgcttgtagtcccagccactcaggagactgaggcaggaagatcacttgagcctggcaggtcaaggctgtagtgagacgtgactgcactgcagtctgggcaacagaccaagaccctgtctcaatcaatcaatcaatcaatactaaagtcaaaattataggaaatgacctttatttacaagggaagttgtcatcacctaaacattgattcaacaacttgattttataaagttttactgggtgccagatgtatttacaagcaaaagcaatgggaatggtgtagtcagttagtgagggcctcttttccatcatgtgtaaccaacttctaaggttttcagctccaccatgattctttctcatgaagctatcaagcacagcctgttttcaattatttttgctttttgtccttcatttaaagtagactaatgcaaaatatgctatcttaatatcatgctgtttctaaataagcaataaaatattttctgtgatcggaatttttggataaatagatgaacagtcttgaccgagtcactctgaaaggaacacaaagtatggccttcattgtgaaacaaaatttgcattctggggaattgctgaagagtctagtttaaaaggcactatgcagatcgttgctagtttcatgccactttcttccatcttgctttcttcggttatggggtagggaatccaagctggtaataaaataactcaatgatctcagccctatttagtgcagtcagtgactgcaaagaggttattccaccagcccacaaaactgaccactttgtaatatctcatggaaaaatacttgtcagcatcaatgctcccagtcaaaatcagagtaagaacatctgcagtctgcttcttgactgtaaagaaataataagttggatgttctatttttttcttttcctaatgatgcttattcaccaaaagtcacttgccaggttgaaagatcaatgtaagtcaagagcaaagcagggattaacaggatttttttttccccataaaaataaattagtagccaacaatgagaaactattagttgcaaggagtgaggtggttaagaccaaaaaaaagaagaagaaaataaaaaggaaagggatattattctaggattaggagaaaaaaattacagtagaaccaaatcgaaagagtatatcttggacagggaacctctaaatgtggagattttccctaaataggcttcagagctagtttggaagtgccaagtctacactggttgctaccatcgaggcagtctttagtccaggcaaggcccagacaaagcaggatgtttagctctttgcacagtcaccacattagcaataccatggacctaggctgaataactggataatcccaaatctgtctaggagaactggagattttttttttaatcaaggactacttctgaaagaaatacaattagcaattgttttcagccaatttataatgaatattgctcataaaaataaaaagtataatatttaaaactatttacagtaaaattcagaacagtaaaatctgacctgggaaaattaggtaagaaacagtaactataaacgaaaactcacagtggcagaagctataattggtaacgagcagtatgaataacaacaaaaaattgatatgcaaatcttcattgtaaaattaaaattgaaaataatcgattccatgggaaaaaaatcagtacaataaaaaatctggccaggtgcagtggctcacacctgttatcccagcacgttgggaggctgaggcaggaggatcccataagcccaggagtttgaaacatgggcaacataataagaccctgtgtctacaaaatatacaaaaattagcgaggtgtgctggcacatgtctgtagtcccagctactggggaggctgagatgggaggagctcttaagcccaggaggctaaggctgcagtgagccaagatcatgccactgcactccagcctgggtgacagagtgggaacttgcctgaaaaaaataatacacaaatgggaaacagcattatgttggataggaaaccaatcaggaaattaaattgacatgacattcattccatgaaatgctttcttgacaaaaacatttctcaatatttatataattccgatcaaaatgtttcatgtataagtaaagtcaaaatgtctccaggatcaaaacagtagggtcagaatctccaatagttcaaaatggcagggtcaaaacatcctggatacacctcaaggcattctgacttaactgcaacttttccaattcagttgtaccaaaatattttatatttgataagctttttaagtaccttctctacaatttatccttttacttcaacaagttggtacagatgtggtatgcttctacaactctggttctcagaaactactcaattttaagatgtcatgatgtagctgtgccaccttgttcaggatgtaacctccctgaaattttaaattatagagactgcacttaggaggtgtatcaactctcttgccatcattggatctgagaaactacagtgaagctggggtgccctggggaaattagagcgaaagacctggactcagcttcttactatttgctgttattggaaccggcttatgagattgctaaagtggaaaaagtgccaaatggagggtcaaaactgtcaaggctttagtgtaccagctgaccaaataatgcatgaccgaaccaacagagttacagaatgaaaaagatttataacctcatagttcattcaacactaaaatcaagattcagtttctataaccaatgtcccattactcaaatctaccagagaaactccttgcctaccaccaccctgatgaaacttactcagctttcagggtcctgctgaagtcctgcctccctggagacctcccccacagctccagccacttctccattctgctcctctccaaggccctttatcacacactctcttgcaccgttacttcaccctgacaaacccactcccttgcaggtgctctgtgagtacagtgcagtgctgcccaagaacttgacaataagggaaataagactaagctctgagaattaattgatgaaatggctacaatacctcccaggcatggaaacgtgctgcaggtaccaagcaatccaaagagagcatgggtctttcagaggctgtggtgagttggaacagccaaagctggtcgtcaatggaagcctagaagaatgcaatccacaaaggaaaaggttagccatactgggcaagcaagactttcatgcagggcacgacctgcccaatctcaggtagtggccctgtaaactagatactattgtccagcataatccctcccaaagtgatgtgagaatccattcagcctgagaaatatgtacctggtgtcgagatggtgctataatcccgctcctctgaacctcttctgcgtcacccccacagtgaagcaaccacacatcacactgcagccacactgaattagctgccaaaccctcctttgtcttcaaaactttgtactccttctctccccctacccccgatccagctgcccctgtattgtctgcttaagtcacctttcagctctctgctgagacattaccacctccaggaaacctttccagatccccgtgtctgagttaggcccgcccttgtgactcacatagcaacttttggttactcaatcatatttatccccctctattgtaataaatctcccaagatttgctcctctgtatgcctcactggactatcggcttcatgaaagcaggattgtgcctatcttgatcccctgtgtatctccaatacatagttgataatctttctccaatacatagttgatactctatttgttgaatggattaattgattaacttattaatcaggctaacacacatcaaatcatctaaattcttgttctaatttcttgttcattaagtgaccttaacagaagtctccaatccagctaggagttaggtctaatgttgaaataattaccattctaattttatacatcactctcctgtgagctttgctaatgtgagttggcccctaagtacaactctgagacattgattaagatttggagtgtattactgagagcagattctgggtatgccatagaccccaagggaaaggccagtctatttttcctaagaagccccttgtatcatagtgaactgtgctaattttccattttgaattttgacacctagcatagcactataaatgcaagttctcaataaacacctgtcataggaataaaaaagaatagaaatactatgtatgttcacaaatagtcgtgtgtgactctacttatagataaaatattttgatctgaattatataaatattgagagatgtttttgtcaagaaagcatttcatggaatgaatgtcattatgtcaatttaatttcccgattagtgtgaaattcgcacatagatatgtgtgaaattcacacacagtcgtgtgaatgtccttttggacattcatacaatctcactatttggctttccttttcagaggcccaaagttctgtctttttaatgaatatgaattgttcctgatcctagtgccctctacagtcctgctgtgactgcttctaaaagtacacaaagctttactgaaagtctgaccctggcagttttcctttcctttctcttacccaaagacaccagcaccctcattagttgccagatgatgcctcttctggctgagactggaggacgctttgtgttggtgcggggacaattcaagatttgtcagctggtagtggctgattatcaagatgtccaaactggctcctttgctatgtgtaagcaatttaattttgtgcctaaatttaatctgcagtgtactgtatgtctgcatctgctgtgttaaagcattcattagcatttaaagggggagctgatggtattgatcactcttattaaaagtaaaaacaataatgtggcagtaactgatgagcattctcttcaaccactgaagtcacagccaaagtttatgtactcaaaacactggcagaaacagaaaatgagatgttaaagcaagaatacaaggggcatctgttataggcatttatagttgactaccacccacccaacccccagcttcccagattataagcttcttgaaggtaggaaactttattactgaatttctatcacttggctcagagtaagttttcaatacattttcggatgaatgactaaattaaagaaggaaggtgaggccggggcagtggctcacgcttgtaatcccagcactttgggacgctgaggcaggtggatcacctgagatcagaagttcgagaccagcctggccaacatggtaaaaccctgtctctactaaacatacaaaaattagtcagtcatggtggtgggtgcccataatcccagctactctggaggctgaggcaggaaaatcacttgaaccagggaggcagaggtggcagtgagccgaaatcgcatcattgcacttcagcctgggcaacaagagcaaaactccatctcaaaaaataaataaataaataaataaataaaaagaaggtgaaaaaaccaatgcatggtatataaacactcaacaagaacaactatatttttcttacagacagcataatagctatgtaatactatgtaacaaatcaccccagaacttagtggtttaaaataagaacaagcatttactatctcacagagttcttgtgggtcaggaattcaggagtggcttagctggctggttccgggttgggtttctaatgaagtgtcaatcaagacattgactggagccacattcatctgaaggcttgactggggctggagaatctgctttcaagatggtcctcccaagagtgtgctggtgttcttaggaggcatcagctcctccccatgtggacctttccacatctttaaggatcctcatgacatgatggctggattctcgcagaaagagtgatcaggaagataaggtgcaagttacaatatctctcatgacctagcctcagaagtcacacccagccatttctgtaagatcctagtgtatagacagctatacacaggtcagcctactcaatgtgggaggactgcacaagggtacaaacaccaggaagtgagaattattgagggcaggggctgtcatctcataggcttgcaaccacaggtaccagttaaatctctggcctccccattgtaatttggtgtcttcttttctaagctttgctgtttctgcttgtttcacgttttcccagtctaaaatctggacctaagcatagttcaactgagtgttagagcaggaaggcatcttgaagaccatttacagaagttcaatgtgctcattttgcagataaagaaaccaaagcctgcagggttctgaagcacctgccccatcactcagccagctatgggcaaaggcagagctcaaggctacccagctctggctcttctctgttctcattgaagcttatgccttgtgaaatgtttaatctccagtaaaaacagtgttcatgaggtccatcagctgtaagttaatgcttttgttatggtacagttgaattttcttgggtctccataaacagcggaagagtcttcatgaattagtagatgagtaaatgcttctaaaagcaagacatgaaggcaattacatttcttctttccttcaccaggcctgtgttggtttcctccagatttcatggtgctatacagagattatgtgttttatggaataaatatttctaacaaagtcgtctttaaaataagttttaatgctcaattcagtcaagcaaacattagctgacacccactgggtgttaggtatcagccttgcattctctctggtttccactgttaattcaggaacaagtctcagaggtaaggagaattatttccctattgacctaattggaaacttggaaagaaagaaattgaaacataaaatggcaaaagaaaaagcatttattttgtggaacaggaataatttgttccccactcctttgccgttctttggttccttctgcattcctctccactctccactcccccttcccctgtttgcacttcatccttgcctgagggacctgaggctctgaacctgaagttcttgggacttagcctactctgttattctttgtctttgtcttaaaaatgtctaacaatcactagctcctgcatttaatataacacactcaatgatgacctttccttaaatttgagccattttagcaaatcactatcttattttatcaaaggctcaaaataagtttaccaaaaataagagctctattaatccaacactagatggttgttatgaactggatgtttgtcctcccacaaattccaatgctaaaaccctaatctccaatgtgacagtatttgaagatggggcctgtattggtccattctcacactgctataaagcactacctgagactgggtaattataaaggaaagaggtttaattggctcagagttctgcaagcttaacaggaagcatggctaggaagtctcaggaaacttacaatcatggtggaaggcaacagggaagcaggcaccttcttcacaaagcagcaggagggaatgtaagcaagaacgaggaagtgccacacttcaaaaccatcagctctcttgagaactcactctcatgagaacagcatgggagaaaccatccccacgatccaatcacctctcacccagtccctcccctgacatgtggggataacaattccagatgagatttgggtggggacaccaagccaaaccatatcaggggcttttggagtaatcagcttacgagggtggagccctcatgatggaattagtatcccataaggagagtcatgagagatgagagcttcgttcctctcccctactctcctctccccttccctcctctcctctcctacatgaggatacagcaagaagacggcagcctgcaacccagaagagggccctaaccagaacccaaccatgcctgatctgactttccagcctccagaactgtgagaaataaatttgtgttgagacaagacacccagtctatggtaatttgttaaaacagctcaaactgactaagacattcggcaattttcagaagtcccattcttctttaccaatacagatgaagttccaaggaaactcaaaaggaaatcaacaatatctgcttggttatgttggttttttgagacagggtttcagtctgtcacccaggctgagtgcagtggagcaatcagaattgactacagccttgacctcccagattccagcgatcccccctcctcagcctcctgtggagctgagactacaggtacacaccactacacctggctaatttttttttattttttgtagagatgagaggttgcccaggctggggtctcaaactcctggatgcaagtgatccttccaccttggcctcccaaagtgctggaattacaggcgtgagctgccacacccagcttcacctgcttgttttaatgaggtttctctataagaaacagtctcattctatctagttcaaacacaattgaattttctgtagcgtagtataaaacatataatggaaagaatgattatgattagagttaacatttattgagtattcattatgtatgtgccaagcctggctctaaaacctttcctcatttaatcttcacaccaacccaatgaggtagagtctattatcatccccattttacagttgaggaaactgagacatagagaaattagctatttgcccaaggcagtccaagaaatggaactgtaatagggtagaaccccataaagactggagctggagatggttcagaatgtgaggtggctctagcggcagatccttgcccttgtgctctgccattaatgtgattccactacccccacagggctgctgctttccatgccaccaccatctgatcttcattgctctccctccttcagcttgcagccacagccttcccatccttgctgctagttcctgaacttttagctgcagctcccacctttaaccagtaaaaccttcaagccttccatatttcttgtttcaaagtgccaagagagtctatttggcccagctcatattttttaaacagaccacagaggttgcgggttgctcagcagaccctatgttgggtaggtgtccattcctggtcttgtcagctgtggcccataaagagaagagtacgagaatagcaaatgatataaagcatggctatttaggctacaagggcctgcaggtgcaataatttctcttagaacagagtaaaggcgtaaccttttcagcacattgttattctctagtgattaatttacacagtttgctacaagggcatatttcgacaaatttgctgaatttaatgtctatttttatgtggcacttataagaactgtaccaggaaaattacgcagataaaaatctctgctttttaagaaagatcggatcagataattttatataccaaagtgtaatcaatttaaaccagtattaaactgagtacctactatgtgtaagttatcatcgaggacagacttttttttttttccatacaggatctcactctgtcacccaggctggagtgcagtggtgccataatggctcactgcagcctcaacctccc

SEQ ID NO: 47 - DNA, 3857 bp, Homo sapiens
attggcgccgtgcagagaggcggaatgttcaactcctaactgcagcggaaacgtgggagccgcgcgggccgctgtcgtcccaacccccgccgccctcgtcgcgcgcggggcctccgcgcccccggctgctgctcacgccccgcccgggagccagattttgtggaagtataatactttgtcattatgagatgtcgtctctcggtgcctcctttgtgcaaattaaatttgatgacttgcagttttttgaaaactgcggtggaggaagttttgggagtgtttatcgagccaaatggatatcacaggacaaggaggtggctgtaaagaagctcctcaaaatagagaaagaggcagaaatactcagtgtcctcagtcacagaaacatcatccagttttatggagtaattcttgaacctcccaactatggcattgtcacagaatatgcttctctgggatcactctatgattacattaacagtaacagaagtgaggagatggatatggatcacattatgacctgggccactgatgtagccaaaggaatgcattatttacatatggaggctcctgtcaaggtgattcacagagacctcaagtcaagaaacgttgttatagctgctgatggagtattgaagatctgtgactttggtgcctctcggttccataaccatacaacacacatgtccttggttggaactttcccatggatggctccagaagttatccagagtctccctgtgtcagaaacttgtgacacatattcctatggtgtggttctctgggagatgctaacaagggaggtcccctttaaaggtttggaaggattacaagtagcttggcttgtagtggaaaaaaacgagagattaaccattccaagcagttgccccagaagttttgctgaactgttacatcagtgttgggaagctgatgccaagaaacggccatcattcaagcaaatcatttcaatcctggagtccatgtcaaatgacacgagccttcctgacaagtgtaactcattcctacacaacaaggcggagtggaggtgcgaaattgaggcaactcttgagaggctaaagaaactagagcgtgatctcagctttaaggagcaggagcttaaagaacgagaaagacgtttaaagatgtgggagcaaaagctgacagagcagtccaacaccccgctgctgccttcctttgagattggtgcatggacggaagacgatgtgtattgttgggttcagcagctcgtcagaaaaggcaagtgactcttcagcagagatgagtgtatatgcaagcttgtttaaagaaaacaacattacagggaagcggctgctgctgctggaggaagaagacctgaaagacatgggcattgtctccaaggggcatatcattcacttcaagtcagccattgagaaattaacccatgattacataaatttgtttcacttcccaccactaattaaggactcaggaggtgaacctgaagaaaatgaggaaaaaatagtgaacctggaactggtttttggttttcacttgaaaccaggaactggcccacaggattgtaagtggaaaatgtatatggagatggatggggatgaaattgcaataacctacataaaagatgtgacattcaacactaacctacctgatgcggagattttaaagatgacaaagccaccatttgtaatggagaagtggattgtaggaatagcaaaaagtcagactgtggagtgcactgtcacatatgagagtgatgttagaactccaaaaagcactaaacatgtccatttgattcagtggagtagaacaaaacctcaggatgaagtgaaagcagtccaacttgccattcagacattattcaccaattcagatggcaaccctggaagcaggtccgactcaagtgctgattgccagtggttagatactctgaggatgcggcagattgcatccaacacttctttacagcgttcccagagcaatcctattctggggtcaccgttcttctcacactttgatggccaggattcctacgctgctgctgtgagacggccccaggtgcccattaagtatcaacagattacacctgtgaaccagtccagaagctcgtctcctactcagtatggactgaccaaaaacttctcttccctacatctcaactctagggacagtggcttttccagtggcaatactgacacctcttcagagaggggtcgatactcagacagaagcaggaacaaatatggacgtggtagtatatcactcaattcttctcctagaggaagatacagtggaaagagtcagcattccactccttcaagaggaagataccctggaaagttctacagggtttctcagtcagcactcaatcctcaccagtcgcctgacttcaagagaagccccagggacctccaccaacccaacaccataccagggatgcctttgcaccctgagactgactcaagagccagtgaagaggacagcaaagtcagcgaagggggctggacaaaagtggaataccggaaaaagccccacaggccatctcccgccaaaaccaataaagagagagccagaggggaccaccgtggatggagaaacttttgatgaattgaactacatagcttttctaagcaggttaaaaaaaaaaaaaaaaaaaagaaatgtaatggtttttgataatatgatcccttcagattgaattaacgaaaagacaacacttccagtttttggattgggaaataccttctaattgagactatagccaaaccagggccaaaattatggatattggtcacccagtgatcataactaggcttgaaaatcactacacatattttctgccttgagtgaacatttttagaggaaaggttatgccatctttttaccctaaccactgatattctggttagcagggccaggacaaggggaaggaaaatgaggtcaacaaaaaaatcaaatttttaggaaaagataagatgaatgttactgatttttccttttggctgaggctgcaatatggcctggcaaggcactgttactgatcttgtctttaacattttgatattttgttcatcataatttttgcatttatttttttaaatattgcattaaaatatcatttagcttgattatcgagttttttggtttgaggttttttgttgcttcttttttcttttctttctttccccctcttttttttggatgtccccttaaattttgtgcccaaggcaggtacctcactcatctcatccttggctcagccctgctggttagtatttagtatttattttagtaagatatttgtgtctgtatgatggtcagagttgaactgatctggcttgtcatttttcagtaataaaaaaagttactgaatttaatgttgaatatgatgcatatctcattcattacgatttatcagaaaccaaagatttaaattgcctagatttgtggttctttctcttcctaagttcccagcgactgctttcaaatactattttctaaatttcaccaaaggagcaaagaggataaaacaacactccataaaggcctcttgggatgtcagaaatctaaaatctaaaagaaaacagacacagagcaagacaataacatcacaagctaaaagccagagaaatttaaaattaccaacatccttgttggagtaagacagtaaatatcagccttgcagcaagacagctctgagcagctgtgggcaaagaggtaaaccagtgggggtgcaaggagactgtctgcagcttagggcagaaatggtgggatccaacttgtgaaatgcttcatgttttacaaaccaaaaagtcaggtagcaacaaacttattgtatgtcaaatcaataaatgttactttcaata

SEQ ID NO: 48 - protein, 453 aa, Homo sapiens
MCIVGFSSSSEKASDSSAEMSVYASLFKENNITGKRLLLLEEEDLKDMGIVSKGHIIHFKSAIEKLTHDYINLFHFPPLIKDSGGEPEENEEKIVNLELVFGFHLKPGTGPQDCKWKMYMEMDGDEIAITYIKDVTFNTNLPDAEILKMTKPPFVMEKWIVGIAKSQTVECTVTYESDVRTPKSTKHVHLIQWSRTKPQDEVKAVQLAIQTLFTNSDGNPGSRSDSSADCQWLDTLRMRQINTSLQRSQSNPILGSPFFSHFDGQDSYAAAVRRPQVPIKYQQITPVNQSRSSSPTQYGLTKNFSSLHLNSRDSGFSSGNTDTSSGRYSDRSRNKYGRGSISLNSSPRGRYSGKSQHSTPSRGRYPGKFYRVSQSALNPHQSPDFKRSPRDLHQPNTIPGMPLHPETDSRASEEDSKVSEGGWTKVEYRKKPHRPSPAKTNKERRDHRGWRNF

SEQ ID NO: 49 - DNA, 3286 bp, Homo sapiens
attggcgccgtgcagagaggcggaatgttcaactcctaactgcagcggaaacgtgggagccgcgcgggccgctgtcgtcccaacccccgccgccctcgtcgcgcgcggggcctccgcgcccccggctgctgctcacgccccgcccgggagccagattttgtggaagtataatactttgtcattatgagatgtcgtctctcggtgcctcctttgtgcaaattaaatttgatgacttgcagttttttgaaaactgcggtggaggaagttttgggagtgtttatcgagccaaatggatatcacaggacaaggaggtggctgtaaagaagctcctcaaaatagagaaagaggcagaaatactcagtgtcctcagtcacagaaacatcatccagttttatggagtaattcttgaacctcccaactatggcattgtcacagaatatgcttctctgggatcactctatgattacattaacagtaacagaagtgaggagatggatatggatcacattatgacctgggccactgatgtagccaaaggaatgcattatttacatatggaggctcctgtcaaggtgattcacagagacctcaagtcaagaaacgttgttatagctgctgatggagtattgaagatctgtgactttggtgcctctcggttccataaccatacaacacacatgtccttggttggaactttcccatggatggctccagaagttatccagagtctccctgtgtcagaaacttgtgacacatattcctatggtgtggttctctgggagatgctaacaagggaggtcccctttaaaggtttggaaggattacaagtagcttggcttgtagtggaaaaaaacgagagattaaccattccaagcagttgccccagaagttttgctgaactgttacatcagtgttgggaagctgatgccaagaaacggccatcattcaagcaaatcatttcaatcctggagtccatgtcaaatgacacgagccttcctgacaagtgtaactcattcctacacaacaaggcggagtggaggtgcgaaattgaggcaactcttgagaggctaaagaaactagagcgtgatctcagctttaaggagcaggagcttaaagaacgagaaagacgtttaaagatgtgggagcaaaagctgacagagcagtccaacaccccgcttctcttgcctcttgctgcaagaatgtctgaggagtcttactttgaatctaaaacagaggagtcaaacagtgcagagatgtcatgtcagatcacagcaacaagtaacggggagggccatggcatgaacccaagtctgcaggccatgatgctgatgggctttggggatatcttctcaatgaacaaagcaggagctgtgatgcattctgggatgcagataaacatgcaagccaagcagaattcttccaaaaccacatctaagagaagggggaagaaagtcaacatggctctggggttcagtgattttgacttgtcagaaggtgacgatgatgatgatgatgacggtgaggaggaggataatgacatggataatagtgaatgaaagcagaaagcaaagtaataaaatcacaaatgtttggaaaacacaaaagtaacttgtttatctcagtctgtacaaaaacagtaaggaggcagaaagccaagcactgcatttttaggccaatcacatttacatgaccgtaatttcttatcaattctacttttatttttgcttacagaaaaacggggggagaattaagccaaagaagtatatttatgaatcagcaaatgtggtgcctgattatagaaatttgtgatcctatatacaatataggacttttaaagttgtgacattctggctttttcttttaatgaatactttttagtttgtatttgactttatttcctttattcaaatcatttttaaaaacttacattttgaacaaacactcttaactcctaattgttctttgacacgtagtaattctgtgacatactttttttttcttatagcaatacactgtaatatcagaaatggttggcctgagcaacctagtaagacctcgtctctactaataattaaaaaactagctggcatggtagcacacacctgtagtcccagatacttgggaggccaaggcaggaggattgcttgagacctagcaatcagtcagggctgcagtgagccatgatggcaccactgcactctagcctgggcaagagaacaagatcctgtctcaaaaaacaaaaaaaagaaagaattgatagtacaaaatccaacaacaatactgagatgatctaagaaggttataacaaaatgctcttcagaaatacctaagtgctgagaatttttagtactaaagagcacagctgctcaaagtaaagcctgagcagtgttctcagtaatgtatttgaaggaaaaataccctgatttgaaaccaacagcagatgttgcaaactttcataccactgctggccatggaagcctcttaacaacacactgtcatttaaggctgtgcttgtgctttatacaaagagaaagaggtggtcttaaggggatgcttccaggggggtgagttcatgcctctcctgtattttccagcaagtggggtatgtgtggtggtttgttttttagaggggcataataatccaggattctaagcatatgctcagctattttaaagaggaaattaaatattataaaagaaatagtaaagataagttatcctcacttaggcaaaagcacaggtcctttccatatcaagtttagcctaccagggttgttttttgttttaaccctgcttaataatgttggtgttttagaagtagatacaggcactgctctgaaaacctggctagccaaggatattctcagaatgttatcacctgtttgtcaaagcttgtttaaattataaaacacttttaattatatatatgaggcaaaagaactaagacttttttcaaactaaattagaaaggagtgtcattatttgactgttaaaccaaaatatttttggtgggtctttttatggaagtttaaagaaaggacatcctcatagatatgatctaacagtatttctaactatatttgatcattaaaagcctcttggaatttgaagcgtgacgtgtttctaatgccccttgagaggtgaaaaataccacataatgatcagtatgctgtgccagcttcatttggggagaaataactagtagaaagttctgggtgtgaggtgtacagcagtctaggtggcatagtgatgaagaaagggatcagagtctgactgtcactcagaa

SEQ ID NO: 50 - protein, 451 aa, Homo sapiens
MSSLGASFVQIKFDDLQFFENCGGGSFGSVYRAKWISQDKEVAVKKLLKIEKEAEILSVLSHRNIIQFYGVIPPNYGIVTEYASLGSLYDYINSNRSEEMDMDHIMTWATDVAKGMHYLHMEAPVKVIHRDLKSRNVVIAADGVLKICDFGASRFHNHTTHMSLVGTFPWMAPEVIQSLPVSETCDTYSYGVVLWEMLTREVPFKGLEGLQVAWLVVEKNERLTIPSSCPRSFAELLHQCWEADAKKRPSFKQIISISMSNDTSLPDKCNSFLHNKAEWRCEIEATLERLKKLERDLSFKEQELKERERRLKMWEQKLTEQSNTPLLLPLAARMSEESYFESKTEESNSAEMSCQITATSNGEGHGMNPSLQAMMLMGFGDIFSMNKAGAVMHSGMQINMQAKQNSSKTTSKRRGKKVNMALGFSDFDLSEGDDDDDDDGEEEDNDMDNSE

SEQ ID NO: 51 - DNA, 106158 bp, Mus musculus
actaagaccgcaaggcattcatttcctcctacggtggatgcggacgctgggaggagagcccctgagctaggagctgggagcagaggcgcaggcaatgctcaaccctggatgtagctgagaggctgggagagagatcggccaggagactgacggcggggcaatacctaggggggtgggagggggaagcagacaggagagcactcaaaataaaaggctctttacagatttttttattttgtatagagaacacgtagcgactccgaagatcagccccaatgaacatgtcagtgttgactttacaagaatatgaattcgaaaagcagttcaacgagaacgaagccatccaatggatgcaggaaaactggtaggtgatgctttcgcgagatactattcccgggagtgcattaatgtcggtattcctggtctgagcgtgagcggagcgacggatggattgccggcagtagccagcagatcgcggagttccagggtctcatgtctgcaggagactctgaagctgcatggaagcgtgcggtttggggggtgctctgtgtgagccgcggccacgcgggcatctttgtgtagattatataacatagaacatataatatgtgtacctgtaataatatacgggagacagaggcatgttacaatccagctatcccacctgtgttgtctccctgctttcgcttagatttgggggttctgcttggcctcccgcaactggagcgtgcaaggcagtggagggaggacccggtctccgctccctttaaccctcttcagcccgcctctctctggtcctttccctctccccatccctcgtgtccttcctttctccttgtagttcttccactttactgccctcccttgactgccgcctccagccgtagatgcccagggtccaggaccccttccccactcagattactttccggtttcataaagacatcggggaggaggggacaatgaaaactgcaataaaaatgaatgaacccgagcaagtggagccacgccattattaagtttctgtgtaaaggaaacgccttttggacacgcttctccgcgtggagcagcagtttaagtactggaaggctcctgccagggcagtctcggaggtctttccccagaacttcgaatccgggaaaacatcttgtttactgagttcctccggtcagtcttctgaaaaatccccgtgtgggaggcgatccggtgtcaccttgcagtattttaagaagggagctccctccttcccgtagaccgtgctgtggttggagatgtttccctccggtttagtgcgagccccctcgatctccccacccccaccccaccccctctgcgccgcggccggccctcggggggcttccgggctccgggaggttccgctgccgcgtgcgagggcgctcgcgacctgccttccctccctccattcatcaatgggaaaccggagacgccggcgctcccgggctggagcgggtggtggcagccgccgggggttcgccttctccagcccgatcccgggcttgctgctcccgccccttctcgcccgcggggagcgcgcccacccttggccttcagcttgcgagctgggcccttgggcggtttacggcggcggccgggcggagccgagactccggggcgcgcgagttcgggccgcggcatggcggctgcctggaggccctgagccccagagccagcctggtgcggtcgccggcgtgctcctggacaccgaggacgcgggcctgggtcccgagcgcgattacacccccggggagtctggatcgccccgtaagggggaggccatagggaggcccgagcgctgcaggaagcccagccccctcgggctggcgttcggggggtcctagcggtgcacttcctcccgttaggggcttgggggggagggggggctgtgacccgagctcaacctgccaacctagggctccgatcttctctgagaccatttgtcaccgtcccttgcagggctctagcctgccttcctgccttcctcctccagtagcccgcagctcgcgtctctagcttgctgcatcccggttgggcctgtcattccggagcaggcattcctagcctctgcaggcgcatggcactcagtctgccctgctgctgcaccaccctagtgcatgctgtttgttgcccaccccaccccacccccttttcctaaggtaccccaggaccatttcccgcctctttctccagacactcagttaagtgactttcactctgtcagaactagacaggtccttggtcctcgtgggactgaaaatatcccaaatccatgaatttcttttcccttgttattctttggccactattaactcctgaacagtacttatgttcttcctgacaatgtattttcattatcttattttccttatttcttattttaaaggtggctcctagcacatcgtgggctgatgtgatgaaccttttctggtctttttttttttttttttctggtcttgattttgcaaagcattttgcaaaatcttactttgtacaaggcagatgcttacaaggtccagcgattaaaacgctcatttgaccgccaacacaacctgctcatatccgtgtctggattcagcatgcttggcttgcgttttgaacgctgttctagtcacactgtagaatggatgttcttcccgtcttttgatcgttggctttatagttttggatagcttattacagtggataagcttattacatctcgtccgtgctgatcttagccactgtcccttttcacttcacgattctagttctcttggagcctgatttcagaactttcccacccgctctccgcaaccaaaatgtcttggtcgtaatgaaggttctcttctcatgtcattagacaggaatcccatcataaaggcttatatataccctcttgcgaggggagttgaggggctccagaaccatcaagtctcaccttcacctgtccttgtcacttagaatggtttgaaatagcttctggaagaaatcaagtatagaagcctgtgtgccctgtcttttgagaacctatttgtaactgttctttaaaatctgctagacctagtctaaacaaagttgctaattgtaacaaatctctagtaagctgagttgccagggcctctgaccaccgctggggtcgaggtgggggttgggggagccaggcacgggtccttacattacagtagtctgtatataggaactagcctcatttaggagcacttggaataaggagttggtaagaccagccctataacgctttaccttagttacctcagcatccattcacggaatggggccccaggtttcccagtagcctatgtgtaaactcagctggctaagctgagacaacaaactcgtgacatttattgctgccttcattgtttaacctgatactcactggcctagataatgaaatattgtagacatttatttttgtagcaaatggtttcataagagactagactgcaatgacaatttcagtgcaaagtagtaaatatgtattcccttagaaaatcaccctgtgtgattgattttcttgtaactgccgcccagttaaaagtcacctgggtaatatgatccggtgcagtttctaacatgaggtagggaaaaatgcctgccttttagctccaaataacatgtcccagttccagttttagactggaaagcccgtgaatggatgctattaaagcatccatgtagatagacattttgttcttttatgtcctggctggccatcacttgtgctcactaacagccgactcaatcggtaaatgctgctagcgaggaagcacggtcacccagccatcggaaaggctggaaaagagacagcggattcattgagaaggaatccttctccccttgagccgcctgcctgcctgcctgcctgcctgcctgccaggtttgtgctaagactggatgctagttgctccggttgtaattgcctggccaatgatgattatgttctgatgtcggctgacacggcattcaccaataggaaagcaggaggcctgtgctgactgctgtagcattatgtatgtggggtgacgtcatcaaagggcttgcctagaatctcttgaaaccctcccccctctcctggcatcctccactcttgcagctttgagtgctttgtatacttttctgattttctcctctcctcctgtggtgatttctagaaggctttttttgttttgttttgtttttccatatttgtgttctgtattctagggttatgagacaacacaaatttatttttactgaagggggaaaatggactttaaagagagctacatcgtgtctctacagtcttgtgtatgaagtttaaaaagcattgtaaaccagtgttggctgtgcacattttccaatggctagatttatgctgtttttcctgtggggacaacagctctgagttgctgcagaatttttccatgtagcttggctgtgtgcacctgaggaatgtgctgggaatccatggactctgtggtgtggtacaggataggctagggttttaccaggtggttattaaagttacccgggatgggattggctgtcaagacaatactgtgttcctattgaattccatgtgtagctgtcacttattttgaagaatcagacctcatgttagcaacatggctgggagtctaagggactgacagcccttccagtgaccttcaggataccggtgtcgtgtatgttaagggagataagaccgtgtcatggagaagaaaatcaaggttcttaatgtaatataggaagtgattaaaaaaaaaaagctatatgggaacatttgacctgaacttccaagtatctctcaagtattcacctgtctttcctgttcagggtcccaaggatgaaagctggcttaatgcagattatactttgttattttgttacctgcctatatgtttgtgttagtatatggggatgggtgtgtgtgtgtttgtctgtttattggtggttttgtttgttttttacataaggctttttgttatatcagtggggttttttttgttttgttttgttttgtttctcaaaatcgctgactgcctttccattgctgattgcaaaggtgtcacgggtggacattagagtttaaagttactcgtgattcatgaggacaaccttgtggaacctgaggaagccatctttggccaggctttcatttctttgcccatgttatgtatgtataggcaggtgcagatctgtaacgtgtgcatattattcagataagttcttttaaggtctctcttcttgtatttcctctccagtagtacattttcacaaataaacaaggccttttcaaaacaccttgccacagggtgtaagaggtagagtgactaggaatttggtgactcttacaccacaagtacaagccacgagaaatcctctgcgctgaagtctgcatttcacgcgctttttctctacatttctgggttgagcatgggtgatttttactcttcaaggttttgtcttgtttttaagacaggttgggtatattaatagccaagctcatctggaatttgctgtcttgtgctcaaatcacaggtgtgaacccctttccccaacttgttggtttcccggttctttattccttgtgtattggaacaaccagtccttttaggacacctttggtctaactagtcatctgctgtctaatatatgacatttgaggctttactttgaacataagggggaaaagacctccccaccagtcaagcatctaagacagctgcgcagagatgtagtagatcagttgccgaggtaaattatgcatgctgattagcacactgatggacagtcactggtggctttcagatgttttcatccgtctgctttcaaagcttcgtgttttaggttaatcttctgaagttgtgtggaagttaattgcagtgttacaggggatgtatcattgacatgcatgtcatacatgagatttataatcatattttaagtgaaatacaccattttctttttattttttcttttttaaaaaaagtattttttatgcttatggcgtttttgcctgaatgagtgtctgtgtatcacatgtctggtgccctccagggtcagaagggcatcagatcccctgggaccagagttgcaaatggttccattttgcaactttgtgagccacttcgtggctgctgggccggcagggaaggcagccagtgctcttcttcatccttgagcatctctccagcccctcaagagatatttctttaaaacttgttcattttcacttatgtgtatatgtgtgtgcctgcctgtctgtatgtgcagtcatgtatgtgcaaatggccatggaagacgggagtcattgaatcccctggagctggaggtctaggccattgtaaacttccagcaagtcctgacctctctccagccaggccacctctctagcttacaaaagacattttaaagagaagttgttgtttcagaagccgggcgtggtggtgcatgcctttaatcccagcactcacccattcctagaactcactctgtagaccctgctggccttgaactcaaaaatccacctgcctctgtctcctaagtgctgggattacaggcgtgcgtgtgctactactgccccgctacaacttttctttttggagatttttaagagcaatgattaatccctgcaccaaactcataccatattgtttatttatttatattttaccaaatgctttatacagaagaaagcaggcactgtgtgtgacttgcttgtagggacaagtggaaaaacaggctttaggcctacctaaggcttgaatgtgggagggagtcacaggcccaggcatactactgcttaaatattaataagtgtgcagtcagtacagcaatacatctgaaaaggtagctgccccagacactcctgtgattttagtcagtggtctgccagtgtctgtctcttaccttaatttgctttaagtggatcctagacacttacagccagaataaccgcagaaagcccctgccagcttcactggctacagttaccataaaagccatgtaaatactttagccaccgcttgtcttccttgtgactcttactggttctggagttttagcacctttagtgatacttcagttataggacgttgacagtttcatcgaaaacacgggcccagagatttggaacatctttaattaagctttggtcttcaaggtgctctctgttgctccgtgatgtcgcctcttcagtgagcacggttctggaccctacaggggatgcaggcggccgcgctctctgcgacggggtttaaaagtctctggttacagtctgacctgctgatagaagcacatggacagcctgggacttgctctgctttttacaatgtggatgcttaaaaaaaatcatctttaattttttttcccagttctaaagcaacgaaagtacttgctatatcactaaagaagaagagaaaaaagagccagggggaaagatgcattcagttattacttagaggtagccgctgctcttttaaaaacccattccagttctccttgcaaggcttctctctccattaaggcatttgatgacacatgaactggggacttggcatggtcacactgtcccttgacgtcttcctatgctgctctttttgtttttacagaatagattttgttgtgtcttattaaaacttcagcagtggttacttccgatcgtcatttgccttcttttaggtaaacaccctcccccacccccattttggtttttgttgtttgagtcatggtctcctgcctagctctggctgtgctagaacttactgtgtaaaccaggctggccaagacctcacagagatacatctgcctctgccttctgagccctcccagcttagataagcgttcttaatgggtagaatgttaaacttctagtatttgattaagaataattctctgaacacctttatatttatctttattttatgagtgtttgcttgcatgtatgtgtgccaagtgcatgcctggtgccgtcagaagtcagagagagtgtgttgagttgcctggcactggagctatctataggtgctcgtcagccactgtatggatgctgggagctaaacttggattgacttaaagagcagtgagcatccttgacctctgagccgatgctccagccccaaggtgaggatgaatatcttgaaatgttcatctattttcccagtgagttctttgtgggagaaatgtaagttcaaagttaaaagattatgatgttcacagtagggctgatgcctagagaagttggatccatttatactctggcaaggatggtcagaatctcgacttataacagggcagtatttagacttaacagtgaaactgattccttgacaaaagtctttagtaagttggtgaggacaaatgatatcccactgttctaatttctaattctttgatgagcacagaggttccatttctgtttgttttcctttttgttcttgtaaattatgtttcctgtttttttcctcccagttagttggataccatacagtgtgttagggagattagcatgttgtccagcaggacatcatactttcttgtctgggaggactagtgtggcctctactgcactaattacatagttgggagcaaattagaaccagtttagtggctggatggtgtggcacgtgcctttaattcccagcacttgggaggcagagctttgagttcaaggccagcctgatttacatagtgagtttacagccagagtcacacagtcagaccctgtcttgggagtggggggagagattttgtatcaaatcaattgaaacatttgtgttttgtccgaagaagggtattagattcatccttccagtgcatatagagagaagttgtttaacttcctgcctattttggactttcttactgctgggcttatttttcaggttttcatgggtgtggcggtgagcatttcctatggtaggaaagtgtagtggtgagtgctcagactgcagattccgggtggctgggtttaggttcttgttctaccttgtagacgccagtagtcactgctttggttgtgttatctccaagctggagatgttccttgctactctgttgtgcccacctcagccggcaaggaagacataacacggtaggattcttctcaacagccattattacaggaacacctatgggccccgggcacccagggaggtctgcttatatactctcagcccccctccgctgcggcaggccacgtcacctcaccaggcatacagcttcagccaatcagggtggcaggggcgtgtctccaccaaatatggacttgttagcaccaccagcatcatggtgcacatgtgcagctctcacgatggtcgtggcttattttcaggtgtatgaggaagtcaggtgcaagtcataagacttagcttcattccgggaggccatcttgggactgctgccacacccgctcctcacactcctctttggcttccagttgggaaaggtgatgcaatgaagtcagccgtctgcaggctgtgagaatgaaccaggtgtattttattaagtctccagcaccctgcccagcccatactttttttttttttttccagacagggtttctctgtgtatccctgactgtcctggaactcactttgtagaccaggctggcctggaactcagaaatccgcctgcctctgcctccaagtgctgggattaaaggtgtgtgccactacgcccggcttccatacatttttattacacaattacggtcaccctcattgttgactctgtgggttcaggtgagaagaaggagtctctggaatcatattgcaatttctgaggtaacctccagatggctgcttgtcaaccctcccagctgataggtgccagtggggaggccctgagagttgggaacgcagcacacaccgtttcaacggcacctgaagaaatctatcatccagaccttggcaagaaaaaatattaatgatattaatgcggtgtcaccagaagcctttgctgtgagcattttgaagtactttgagagtggtgttttttctgcagttccacctaaagaaaagtaggacagtcaatcgatggacagtgaacaggatgaaggacagtcaatccatatcaatccatagacaaatcgctgatatattttctatagaggccctgggattggtgtgtatcaaatgcatgcaacctctctgtgtgacaccaaaggtaaaatttgctctgccggtcagtgaaacggtagtgacggaacatttgggaacggtgacgttacaggcctctgctttcaaatgaaatatttggtcattgttcaaagaatcttttatttttggtgacagaggcctgactgttttgttaaatggacttaaatttccacagcatcccacattagtttcttttactgttgatccaggataagggggcaagggtgtttcttctatctgcttgttcagagagagttttgccaggtgggctgcagtgggacccggggcgtgccttctggctaaatggcaatggggctaaagcatgtgttatccaatgtgtatattatcagtggcttgtttcatgggcagccacacagtgatgagtaatttaaatccttcagacttatggtcttaatacagagtggagcaattctttgttcttttatccctcctgtatcagattcaagtgttctgcccctgaaccatagccccagcaatggctttattcttgacttgatggtccacgttcagcaatggagaacttctttaggtggctttcagtccactgctctctgggcggtgcccattcctttagattctttgtgagtttggattcttttattacacattgattaaaagctaccagtcttttttatgtttctatttcaaccatacttactcaggcaagaccaccgatagatattttctgacctttctctgagccatttctaatccagttagtttctcaggtgtcacttgaggtccactggtgatcaacatagacacttttaaaaatcagttgttgggcatctttggggtctgtagaggaattttaatctagcagccacatccaaagacctaggtctgtgtgatccaatggaatgcacaccagccacacacctttaatccccttggctggaatgcagcatacccttagtacacacctgtcacgcagaattagtttgtagaaggaagcagcagtgaaagattggagaaaagtttgacagaatgagtccgagataggatgtgcccaactctgacaaggacagcacaggagaaagaagctatttaaatgcagcacagggagaggcagtcacttgtaaagtagcacagtgagcgaaagacagtggaggtgagttcactcctgagttcatgcagttgggttcatgaagttcagaggcaggttttttgttttttgatttctgtttgttttttttcttttcccaagcagagcaattcaatcagaagccgagagaagtcgatttgtgtcagtcagtttggaggggggtttgaaccagccagccagagttcagaaagagctagaaagggcgggtttaatcacccctaagcccgagagacaattacacaggagaataaaagttacttttacagaatttgaacaattaaatactttttattaggatactaagaagtatattgaagcttgtgaaaaattggccatgtcctattcaaatgaggaacctgtattagagacttgcttagaagaaggggcggagactttcccaaaactactgcatatgacattctagaagatgtaaagcatcctgccaccagcgaaccactagacttgtctttagtggctgctggtgtttccctccaagagcaggtttctctgtttagctctggctgtcctggaacttgctctgtagaacaggtatcatcttacatatacaggcattttaggtctgtagagggcctcaggcaaatggagaagctctgcttcttgtgacttggtgctgttctgtgttctttgaggctggctactcctcaccttcagccaaacactgggctgctcctcctgcacctggggatcgaaacccagccttgtgtggtctccacccaacttcttttctctgagcatcctcctgcctccaccactgcccttttgtttctcctgttactcacctgcctcctctttagtcctcagcattgtctaattctcaggtcttatcatttctgtgcttggaaaaaacttacattggctttccattgtttatgttttgagaggctcttcaacctctgtgaccttgttaatgtcacctgctgtggatgctcacctcccatcctgtcaaaatccactgctctttccttgtggtttgctcttgcctgattcataaaacgattactgttttctctcctaataagtctgtgccagccacagtatttatcagtagttacacacactgtatatccgctaggaggatggatatatatgcggtcatgccgagggctctcttctcgtgctcaaatgtatctgattgttctctgatacatttatttcctcagtgagttatagaagactggctagtgtcttaaatgcatgccttaattgtgttagctggtcttcttattttttaagatgaagagacttgaatttggcatgactaacttttaagagacgcttgctaatttggggggaggagcattctttttttaggtactcagattatccaccccactcagaaagaagaaagaatttatagccgggcgtggtggcacacgcctttaatcctagcacttgggaggcagaggcaggcggatttcgaggccagcctggtctacaaagtgagctccaggacagccagggctacacagagaaaccctgtctcgaaaaaccaaaaaaaaaaaaaaaaaaaaaaaaaaaaagatggtgtaaagaaagtttcaccttacaagaagtctctgtgtatctgtattgcatctagtgtgtgtcaggtgactggtttttttggttttatattgtattttttcaagatgaggtgtttctgtgtagctctgactgtcctggaactttctttgtagtctaggctgcccttgaactcacagcaattgcctctgcctctgaagtgccgagatgaaaggtgtccctggtgacacccagtttggcagtatgctttgaagtgaacacattgtaaagttggtgttgaggccagcctgcaagagagtagagaagtctgagaggtctatgaattacaaacttcatcccactaaagttctttcttggattaaggtagaggggagccatagtttggtgttgtattcaagatctttctctagtaataagttccatagtcattttatttgtttgtttgtaggaaagggtcatattccatattaaggttaaaagacattaattaaccttaatatttttgtgcaccgactcaggaatggatcaagtggggctaaagctcccgagggatagaattatctaatctaatagagatgagaggttggacataaacctctccctagagagaaagagtgaatagcgtaattagccgagggaccttgtggcaccttggcatgctgtacacacttcctgggatagctcattagcaaatatgtctcactgtagggcatcaatggagcctggatctagggcagctgaaatataaggtcttgttgttgaggtgagggctgtctatgggttgcctggtgtgtctcagggtatggatccgtgctgtgtggtctgggtgggacaaggtgctcagcttcttcgtgggactgcctgggggggggggggcaaattgttctaggcgttgttctggcatctgcttgcttctagactcccaacccccacctggcgggcagatggagtgtcaattttgagagtacagagtacggttggtttaggttctgatttttttgtcttacaaagttagccggaagctatgctaagtccagggctctcctttccgtcctagtccttggctgtctcatggccatgccaagaaacaaaatggaaggagaaggaaagagacactagaaagctgctctaagtcatctgggttcagtttcaaaaaacctgaaagaagccgagtgacactcagcactctgccccttgtcttaattagatgaaatacccttattagattacacaccaagttaaacgctcttgagcgcaaagagcaagccgtaggttaggaaggagagtgctgttttagtatagatttgttgtcaaaaataaatgctgtgaagattcagtattaaggtgaattactaggctaatgattcatatactaattgaattaagataattaatgtttcaggcatagtagacttggctttttaagaacagcttaaaacattgtttcctcacaggctaatttatcctgcagtactataatcatttaatctgttcaacattgtggcttcttttatgttattaaacgaaagggcaggattctttttcaagtaatttttaagggaaacattcttattataggaattcattattaagattcattttttaacagttagctaccccagaataaatgattaaaaacttacacattgcttcatgttctatcaccacatttgtcagtattaaaactaccgcttattaaacttaaggttttctaactggagtaaagctccgaactgaagtaaagtgccatgtgccctctatctacctctttagaaacttcttccatctagattaaaaaaataaaattttctctttgtttctttcagtttttcaagacagtgtttctctatgtagtcctggatttcctggaactagctctgtagaccaggctggcctcaaacttgagaatgcctctacctctgcctctgctgtgctgggatcaaaggtgttaaagtcacttccagcttgcttgtttgtttgtttatgtgatcacaacataattacatctttcccctcatctcttcccttcctccaaacctttcctctttgctttctttcaaattcatgacttttttttcaattgttatacacacatctatgtgcatgtgcattcctaaatacataaatacagcctgttcagtctatataatgtgccctgtgtgttttcagggctgacccgattggtgtgcccttccccagggaagactatcgctcctacttgcagcgttcctttatttagttctttgtgtagggttgagaggccttcctggcttttcacactttctatcgagtaagattaagcttctttcattttaaaaataaatttcaatgccgttgtcatttaagatgagtactgtaattaaaaataaacttcactaatgatgaggtttacctcctgagttcagcaaccatgcatggatggaaacctctagtttagctgatagtctgagcttgctgagggaggtcctgtgggctgggcttagctttgttatttcctatggagaattcaggcaagcctaggtgtttttattttgttttgattttaggtttttttaaagattttgtttgtttgtttatttgtttttgcattacaagtatgaaataacacacccaggatgggacatataacagaacaaacaaaaggctccagcagctgcttttagaattatttgaataaggaatgggaagcccagcctgtgacctgtgagtttagttagaggtgactaaagcttttgtggggagtatttcttatctaagcacctttggccccagctctaatgaaacagagagacgggagtgtatctcaccgtggatttcaggaagtcaccagtaggtgcaaggtgagacctgcctcaggactgagtttactccgtggaaggagctgagtttcttcccggtttgcagtctattctgtctgggtgtgttgtaacagatcttgcgttgcttttaggtagttaacagggtaacagctccatatgtcccgtatgtcttgttgatgtgcgatccctgggaagtttgcagtgcagccgtcctttgagacagacagagttagacgttatgtcttcattggtctctggccagaccatgaggagcttgcaagctgccttctttcaattaccttaaattactgtttgtttttttctttatgttaacatgacatgcattgcttaggttttcctgggctttcagctggcctaacccactcagtacatatacccaactttctaaaataaaaacttccaaatttatatctgtgactatactgttttactctggaattacagagctagatagacaacctttttttttttctgttttagtgcaaggggtactaagttttaaactggttgaacagagatgtgcgttattccagatgagtatttttacattaatttattttaatattacgtgttttgtctgtacgaatgtctgtgcaacatgtgtgtgccaggtgccctcagaccagtgagatcctttggaactgggattacccatagctggttgtaggttgagtgctggggatcctgcctggatcctctgctagagcagccaattccatctccccccccccccccctgacctattttcaccgatagatgggcgttttctgcaatgcaccaagttctaagagaagtcagagaacatgaagtatggacgtgacactggcatgaggtgacctgtggcgtgaggtgaggtgacctgtgaagggtatacctaatgacacaaccagagcccttaatcactgagccgccaatcattgtgcggtctcccggactaagcccttagagcatttaaataggattaactgctaccatttagtgcattttgcttgttatgaataggcctggaaacaagaactttataatacattttagaaaatttggaaaatacaattaaggaaaaaaaaaggaggaaaaagaaaaagagagaaaaacatgttaccaccaaaatagtccttacattttaggacagatatttttaaaacattccatccatcttttgcttgtctgattttgcgactcttgttaacagcgtgggtttctgtgccctctcccccacccttaccccttaagaatgaaaaaaggaaggaaagaagagagagggagggacgaaggaaggaggggaggaaggaaggaaggaaggaacgaactttaagaatgtggagcttctctgaattctggcctttcgaaggttctaactctgcgctgggagtgtaattcagtggagttattccctcatttgaacatagctctgggttcagtccttgggaaccacaggaatcaagggtgagagaagcaggaggatcagaaatttcagattatcttccgctactagcaagctcaaggctggcctgacatgagatcaaacaaacaaaactacacaccccaggacaccctacccacccaaggatttaactgacatcgttggagtacagtattttgtcaacattgagattcagtcacagctccaggctgctgatggaggcagctgggaagtttttattcaagactccgcccaggtgaaggcaggagttttgaccttcggttcactcagtgaccctggtttttgttttgagtttgtgtagcctcggctggcctggttctcagattgccagcctctatctgagtaatgggattaaacatgtgcagtaccatgtccagcccaacactttccactgtctggtcaagctgtctgaccacctcctgttccctgagtgctgggattaaaggtgtgcgccaccacgctcaggtcttaatagtacctgtacctaagattttgatggcttctgaaatgactttccttagagtgtttttgaggaacaaggtgtgtgtgtgtgtgtgtgcgcgcgcgcgcgcagaactatctccccccactaccttttcaactaaattagatgctaggctgatttttgaggcacactggataggaaggattgcaatttgaagagataaaaaaagatcaatgtttagagaagtttttactgtaagtcacaaagaagttaggaaacagtttgcctgtaaacaaagtttctcgtcttgagattttccagaaatttccagtttatagctaggaaagggaaggttaaagtttgtatatacttaggccttaaacttgcatgattcactgtttgtttttatttgaaatgtctttttattaaaaaaaaaaaaaagagtaatatctctgtaggcagtcgtcccaagaactttgttggttgtcaaaatgagtgacttttagctgttttagagagtttaaccagatgctggggtctgagccccaaccccccccaacaccaccccccccctgttaattttccctttctctccaatttcctttttcttcatattcttcctgtactgcgatctccttgatgattctttctgtttcctctgcaacaaatgagcttgctttgactacagtcgcagaatttaagtctcagaacatgaagatgctctaaaaactattttgcattatcataagcctaattattcactggactatcctctcagattctaggttctaccggaattcccttctgtcacctttaacccatagtttttctgcatagttacacgatgatggctgtcacatgtcgtcatgcttcctacagttgtcctcagatactctagaagaaggcatcagatctcattacggatggttgtgagccaccatgtggttgctgggatttgaactcaggaccttcggaagagcagtcggcgctcttaaccactgagccatctcgccggcccccttaccagctttcaaacagaaggaagaagtgagaagaaagtagtcctttccctcaatgctctctcctcccaaggacgaacttctaaagcaaatggtcacattggtttgttttgtgtgcgagtgtgtgtgtgtgtgtgtgtgtgtgtgtgtgtgtgtgtgacgtacgcgtgtggtgatcagaggataacttgcaagagttgatttccttcttccactacatggatcctggggaccaaactcagattatcatccttgcttggtggcttttgcttggtacttttgctgacccatgtggctggccccctaccaggttcttactcacttatacttgcccttattacacaactgttatccctgccaaacctatgtcacaggccccttctctggcaaagaacctgggtttctttcccattcttaaaggcactgatgaccttgagacatacacgaaccagtaattctgtggtagtgtggggaggcatggataaaatgaactttgtgctagccaacgcatccactctgagaaaaaaaaaaaaggaaagacttttagattgaaataaatcctgttcatctcgcacttcttacagtatacgcttaaaaaatgtgcaagtatcgagctgttactggtgttaaatgtgaattactctttaagctctaaaaatagagcataagaactgccttcctaacgaaagtgggggaaaaaaatgcttaaatcctgtgaatccaacctctgcgttgctgcagccggacctgattctgcattccagagaactctgacccgccttcctctgaggaagggattgtaaagttggactttctttttaagttcattgactgttggtgccttgggaattacacgtgacattgatccacttagaaaaagtgtttgattttttgggggagtgggggggaccctggactcttcccctccccctcatttttcttctatttaaaactatcaaatcattctatcatagtgttatttaatatgacagttgtattggtaagcaaaggtgtttgctttcaacttctagatccggggctggagtgcgtattttacatatcaaagcagacctgacctccaggttcacttccatcagtccctatctggcttgacccacccccaaccttgaactttctagcccaggggctgggctgcccttcccccagaggctcctccctatataatgcagacattttgggctctccctccctcctctctccctattcagccaccccctgccctccggagactcccttgacctcaatccttggggccagtgacctctcccaagagcagcttcccaataaatttgccttaaatattgtctaatctggcttgaatcacctgcggagaaatcaagcccatccctttaaaaaatccaagtgcaaacaaatgattactgtaacatctgagatggagggctccaagggctgacatggactgttggaggaatggaatgattagccctcttcatgccttggacggacaggcccagcagccgggagggaccgtgagggactcaggtctcagcaccagagacaggcagtgtggcagggtctgtgaagagaggaatcagagcactgtgcagaagtggctttcacgaggtaaaggtggtttcacagctggagccgggcaggaagctggcgagggggcaggaagcaggatatgtgggcaggagtaccctctttggatgcaaactgacttttccacatgagaaaacttgccagtagggttgctgtgctggtgtctgagtttatgtaagtaaagcattcagtagtgctacatggatataagctgtaagtatgttaacattgattttttttaaaaaaatgtttaaatatttaaaaatttacccagttgtttcacatcctcataggcttcctattgcaactgtggaaagtcagaacgttcaccttggctcacagggaggacaaaacaatttcatatcctgggatgtttccctccctccctccctccctctgtactgagtatagaacccaggatcttcagtcgtgctaggcaagctctcaaccactgagctacagcgctgaattcccttggtttgtgcttgaaagggtttaaagcctttgggcacggataagccataggtgtcatttcttaggaaatgttcaatttttgggtttggggtttgttttgttttttttagctttattcttattgtttttatttatctttatgtgtgtctgtgtaaacgtatgacacgtatgtgcaagtgtccaccaaggccagaagaagtcagatcctctgaagctagagtcaaaggctgttgtgagctaccctgtcttggtcctctggaggagcagcaggctctcctagctgctgcaccatctccgtagtccccgccttatggttttttcactaacccggaacgtgctgatatggctggcttgattggcccccaagtcccggggagccaagcacgagcctgcccttttcctgtgtggtttttgaggctcaaacccagatcttcatgtctgcctggtaaacacgttactgactgagccacccctcagcccctttcttctcttctcttctcttctcttctcttctcttctcttctcttctcttctcttctcttctcttctcttctcttctctttcctctcccctcccctcccctccccttttcttttctttttgttgttgttgtttttaaataaattttgtttataatacaagcaggaattccatgtagaatttttatttgtatatcaagtggtccactgacaatcttatcaagaaaggaacgtatcacgatgtcttagcagttgcttgtactcagggacagcattgtctcgtgtcacattttcggcatgggtttaaatgctagtttggtgacattggtggtacagtatgtagaaacatcttgggtgcacatttatcctgtacctgtaatttcccatctgtgtctgaactgacaggaaaacagacgtgtggcgaggctctgttggtttgagggtttagtccaccaggaaagctaggggcgacaggaaactcgccaagtctaactcagaaagactgcaaaatcagtgaaacttccattatttgaatcgtgattaaatgtagaactcgttattatggaagtacggatttaaaatatcggaatggcgttgcaccccctttaagactttttaaaaattatattgcaagctttagttccttgtttcacatttgatacagtttcatcgtgtaacccaggctggtctcaatcttgtgtcttcctactttaacctcctgatatgcaggggctcctagcctgtgccagcactcctaacgtctcccgagcatcagggccagccagttaagaaagcttttgttttcttttttatagttcaggagttgtttgggcagaatgcagccggcgatggctgacttagactgtttaatatattctgagatcagatcaggaattagtctcgtcctcaggtcgaattaagtttcctgttacagtctttcagcgtatgtagactgaatgtcctaggattggctaacagtgggtgttagttagccgtaggtggtacccatcagtgccaacgctgggagttgtcagggccaggagtcgaggcggatgttgctgccctgctactcacactcccagaaaactggtctgcagccatcacatggccttgcttccatttaatgcctgtctcaggcttgttgaggcctctcttaagtcccaccctgtctgttgtgtgtaggtggagaagtaggtcagagggaatatttcagtgcacaggtatgcaggtggaccttgctctttcttctcaaacctgtatgtttgctcagtacatggggagtcctgagccattgctcccaggggagatacagaggtaggtttctgagagtctctagtcaaacacttgactgactggtcaatgtgtaaccttattttatgtgtgcttcggttaaagacaacttgtatatatatcatctgttcactgccaccagctcacttgacaaagcagctcatttaatgtgtttctttacaaaatgtgtctcatctttgtgcttaagaggattatacattttacagcattttagttttaggggccattgtaagtgaaaatattgtgaccagcaaaaccgaggaaaaggtacttactttaaggtagtacagaagtcaaaggaggccagtcaccatcttgcttgaccccagtgagcatgtgccatctggttggagatggtcccagtcttgagcctgactgcagtgtgcacatgcacacacatgcaaaactgctaagttttttgtttgtttgtttggttggttttggttttttgagacaaggtttctctgtgtagccctggctgtcctggaactcactttgtagaccaggctggcctcaaactcagaaatccgcctgcctctgcctcccaagtgctgggattacagggcatgcgccaccactgtccggctaagtgctgagtttttaaaagaatatcttttactattcttggacaacttcgtgcatgtatccagtgtagcttggttatacccacccagagcgatgacattttaagtctgatcttctcgaggtgaatttttagcaatgaggtttgactactctggtgggaagtactatcctaagtttaagttttgtgggacagagggtgggcccacagcaaggccctgagaaaacaaaaggtaaaaatcaggttccatctccatttataatggcaaccttcacctaaaatccttttccacagggtactaagaagggcagtcctcgtcttccgtcaaatttaaatcattaaagcctgcttttaaattctgggttaggaaacaattacaggcagtaaaaatgagatgaaaagaaaacagttgtcttcctttccatgtggagcctgggaggtggcttaagttctttgttgtgcttttatgaagatggaaggaacctggactgtgccttctggaaatgcttagttagggacttgtatcgggcatttaccaaggatattatctaattatggagcgcttaccctgtgtctaccgagggctttggggacagtatgccaccttgggttttgtgaagttggtccctgtgattgagccctgaaaacaggatggggacagaggtaaataacttgcagagtattgtgtgtgggcctgtcagtgagtcaggtttccagcccagtctggtggagtccccagacagatgtaccccacctcttcctttggcttaagactctggcaaatacttggaacatcatggaaaacccatcttttttttttttttaagatttatttattttatctatatgaacatattgttgctctcttcagataccccagaaaaggtcaccagaccccattacacatggttgcgagctcccatgtggttgctgggatttgaactcaggacctctggaagagcaacagtcagtgctcttaaccactgagccacctctccagccctggaaaccatctcttaagagatgtgtttttgttaaagaaggttcagctcagagaaaatacacaagataatcattttttgaaaccatctcacatctgtctacctatatcagtagtctgttggttcattccagtattaatacacaaaggaaaatacagaccaaaatgcctattttcattcttggaagaatgctaatgtttttcctttggaagattccttttatgtcacctaaattctggtcgtactcgtaaagcaacatgaaagcagaatttctactaaaacatgagtcataaatttaacaaaccatccctaactagccattccaagcactaaatctgaagtagctagcatccctaaaaagcaccagggaacccctctttaaatgctcagatacctgttggcacccaaaggcctgcgggagttttatacaaaccatcaggataacttgtgagacctttggttcggtgagagctattttgcatgttcttgacaaagatcaactatgtaataaaatatatgctgatggaatttcctctggtccctaatccttcaatgcacccttatgtgaccatcaaaaccgtactattttgacaggaagtttacactataaaataggaaaaagtctacagcaggtgtaacgcaatgtcagctcacagagcacacatgcacgcaataaacaaacctagagttagcataggattaggattcacaccgtggcttcgcttgggccatattctaactgtaattatctcacaaggttgacatttacacgttgtcaggggactgaaagtatatcagtgcaccacatacttttgctaggtcagagctttggcccatagcagctgtgtgcagtgaggccatgcaaactgtccttcgggtcaatgattggagtaacctgctgctatgagagacaggcaaggtaggtgtaactatttcgacttattcgagttactgcctatccagaaaggaaaaaaaaaatgtgcacgcgaaatacagattggggactggcatgcagcaagggctggccactcagaagtacctgggccatgggctatgcagatgactaagaggcagggactcttagagttggagtcccagagtgggtagtggtgctggaggtttttttcgtgaccatagcaatggtgtactgccttgtgctaaaagtacgagggctaaccacaccgagatctggtggcaatgtgcaaataataggggagcaggttttaagagtattcttattatctcagaaggagtgatgtctaatgagcctaatgctttcacaggcgggtgagtaaaggacagagcaaggtattagagaaagactcaggggcaagttagaagtgtcaaaggaacatgcagtcgggggcggggcatgagaaactttccggagatctcaccagatagcaggtgggaggtgacctgcagggcctgcggaacagatagtgaacagtgctcatggtatctgcacctagctctgggctaggctaggtttttgctaagcttttgatggtgctgtagctctttattgggaatctagggaagcctaaagcattcctgttgcccatggaggagaacacccgccttcccactttctccggtagagccaaggatacaggctgccggcatggtgccgtccttgggaattacaattgggtatttcatgggtaaattttctgtttttcaaagcaggtgttaaactcgatgatttccacataccttattttgtcaatcctgatgataatcctggcaagaacgcattagcattgttagctcgtaatccagcagatacattttccaagaggtttattactcctgcgctccatagggtgtggcactgagaccagagctccccagctcctgagacccgctcactgcggttccctagcccactcaacaccacgtgtcagagaatgcagctcatgtgcagccttttcacgcctttgtgagctggaccagctcagtcagatttttgcagcatcattaaaatgctgggtttggtcagcagcagcctagaggagaaccagccagacttgactgaggagtgttggcgagagtaaagttgggtgccagagcaagtgtagaactattagtctggaaaccagccaaaggaacttgggaaagatacggtagacagccagctacctaacgaacaggatggctgaagtggctccatcttctgtaaagctaaataatatagatggtgatcggtgcaggcttacttatctgaacctgcgaagtcgcatgccgccaccaagacgggttccatggcattgttttctgcccggatttgctttgatgtgaagggcagaggctgatctcccagccaattgctgcttgctagtgtccagcacacaggctgtttggcttgtccaacttgttgaagccaattctctttgcaaagcagaggtcaaacaaacctgcctcacaggctctgtgtctgccctgctttgggtgggtattcaaaaacctaagtacacaaaaaggccacgcacagcaatccttccctaccgccggctttcactgagtcttcccagaacttccagttgacctgtggagcattcacggaaccactctgcttagaatccttcagctttccttttctaagatggctgtgtcctcctctttccgtaccctgaacttgttaccagggaagcgcagtgagttaaaagaacggggctgaggagttcaagtccatctttgacactgataggtccgtgaacttggcgaaagcttttttcatttctaagagtgaaaattggataacgaactgggaccagggtaaggattagacagcttaaggtgtgtcgatggcttacatagtatcaggcactttctggttcctctgtagacagtagctctataccaatagcaatgtcagaaaccccagtagccttgccttgctttcactgtgcaacagagctatcaacagtgcttttaacttcttaagggtgcaggaatgccacaccatgtcaccaccctgtccaggattttcattgctgccaaattactatcatggtggctccagttttccatcctgatatgaaagactcctcatgcccgccttgactctagctcattagaggctcctctcccagggtagagcttagggctcaggccagctgacctgctagcatgtctcctagaataccagtcacctttccttatccatgctaccaacctcttaaggtcttttaaggttgttctctggtagtttggaactttgtgtctgaactcctgattcttcaggttatactttctgtcggacactaatagtttttctcgcaaccacttacatggttagtatttgagaggctccagctgctgttatattcctaataagacttagccactatctgtctggtgggcagtgggttcagccacagttccagagtttcactgactcaatatgatgtttgccggatgctgttgtcataggtaagtatgccacgatgtcaaagctattaaacaggtaaacagtaagagctgtggacagggcaggagggcctctaaagcaccagttctcaacgtgtatgttgcaagccctttgggggtggggtggggtgggatctaacaaccttttcttagaagtcacatatcagatatcctaccaatcatcagataattttattacaattcataacagtagcaacattatagttatgaagtagaaaataattttatggttgggggtcaccacagcatgtggaaagtggagagtcattgcgctaaagatcgccatcattgagaagacccaggccatggatccagatgagacacagtgcatcagacttcccccatctgagctactggaaacatcagctctcggcgctgttttgtaaccgttctcagctattgattgtatgcacaagtcaggttttgccattgtgtggtctcagtatggatcagggctatttttacctaaattgattggctgttctcgcagcatgctacgcttcccttgcacgttcttaggcacagaacatctcgtttccattcatgaccaagatgtaagttaacccaccccccaccatgactctggcttcctgtcttgaataaggatgtcaatcatgtgaggggtgggttactgagactcactaagtgatggatgtcaagtgcttggcatgcaagctcaaaatataataaaatcccttatgttgggtgttgtgtttgtgtcccttatgttgggtgttgtgtctgtgtcccttatgttgggtgttgtgtctgtgtcccttatgttgggtgttgtgtctgtgtcccttatgttgggtgttgtgtctgtgtcccttatgttgggtgttgtgtctgtgtcccttatgttgggtgttgtgtactacaccaggctctcccaaaaggccacatggtaaaggttggggtgcaagcaaggcgctactgagagaggatggaagcttaatccactttatttcattctgaggatgtgggccagcatctggcttcagcacttctagaattgttcctcagtacggatggccttggtgtttttaaacatgttgatacactccatcttggtcatggatctaccctagcccattgtgagagtgctgcccatccaggtgttctttttttggggatccctgtatagtcctggctgacctggaactcactttgtagaccaggctggcctcgaactcagaaatccacctgcctctgcctcccgagtgctgggattaaaggtgtgcgccgccacgcccggcccatccaggccttcttgagcaggaggaggaccggcactcggtggtaacaggaagacaggctcagctgtgtttgcaaatggagtggagccagttcttgagacaacagtagctgtgtggtttttttcatctctatcaccacgccagatcccatctgcctttggatgaagaaattagtactgaaggggcatttctgtgtaggtgtcctcgatgacttacttggctgtcacaaagcctagaaaatattcttgtagtattaagggagttgtctgtttgacagtttctcctgggagagccctcttgttgtgaaatatggacagatgctgtgtccagatagcaacatgccatcttcctgcttgctggaagaggaggatgatggtttcctttcaaggtagagcctgtgggtcactgcaggcttgccctctggggggttgggggacacagcagggacgtgacctgtaacatcataggaatgtaccaccataggcccaaagatcgaagttctaagagtcaagttttttatatttgtctttctacttcgtttaagtcagtttgaccctgaatggtctctcaagagcatttgtttggtatttgcctgcaagtgttcttttttaacttttgattttttttccttaatctacttcataaaataaactggatatataatttaaagtttgtacatcagggtgtagtaaaaggatgttcagtatgaaggacaacactcctttcctgagccacatggtacctgcccctcaggagcactgtcactccagatagctgaagaatcaggtttctgagagcctctggtaacaatgtttctttttaaatttattttatttttctgtgtgtagctgttttgcttacacatgtgcctatgtaccgtgtgggtaccagggctttcagagatcaaagtttgatcccctagagttggaggtatgggtgcttatgagtcatcatgtgggtgctggggaacaagccaccgagtgtgcctaaccactgagccatctctccagcccttgggcactgcattttgacaaatgactgatcctagcattgcttttgtgattttgtatttagcaggtgctgttggctcattatcattgagttctcatgcctgagaaggcttatgtcatgcacagctcctctctgaggtacatcacagccttcttgtgctaaggtacaaacccgtctaccctaacattttaattggtaaattaaaaaaaaaaaaaaaaaaaaagacaactggaaagacattaaatcaaagcatgaacattaaatgcgaccctgagctcctgctacagtgaccactgagcccagaggcagagcactgccctgttccactgcagctgggatgagtgtcagaggattccaggtttgactctgcatagctgagagtcactttgacaaagtcatgattattggtttttgtaaagagggtgaataagatggtcttggtgacgcaagcctttaatcccagcacttaggaggcagagaccggcagatctctgagttaaagtagcagaggctagcatttcctgtgtctacaagaacctgtgtcaggggtgtgttcatgtgcacacgtgtggagtgacaaattcatcctcagatatcttttaatgacatcaaagttcagggttttcttttcttataaggtacctataatgttaggaggttttgcagattcataaggaaaagataggtaacgcatactgaataggaagatcacataaaagagaaggctttttagtcgtgtttatttttttataacggacctatattttaaaaaaagtgcttaactacactcataactgaagaaataaaattacagctattttaggtttttagacacgaacatttttgagaagtctcagtgtttcaggaaaatgctgttggtggatgtgtgaactccttcacttgttcaagggctttttgggttttctacttgttaaaaataccagcctccagtgttggtgagaaggatttcagaaatatgtcagggtgtgtagcagatgccaagattcacagtgatctgttgtgggttttttgtttttttgtttgtttgtttgtttgtttgtttgttttgcatctgaacatgtatctattaataaacacaagtaatgtacaaattggaggtatggaattgagagaaaaggaggaaagcgaggtgatatttattttacattattacttttgagttaaaaatatccatgaggagcttttgtagtaaaaagtgtagacttactaattaaaactggaaagccaatttccccgagtatgatgaagcagagaagcaagtcacaacattatttttactctcccctcatgtatcactggctgatcatctccttattatcaattccatgacgagagtctgtctcttaatacctggctatgccctagtaatgagccggtggtgagtccttcatggaagtttttctttggcaaaaatgtgtccctgtctttaataaagcagagcatttgaagaaaattgtagcttggtcagacgctggcaaaaaaaaataagtttcaggtgttgcttagttactgtgttgtgtgtgatcattcgaaacagagcctgttatgttacaggttgtgactatggtagcgagcctctgtagccattgtgctaatgggtaaaatgttatgagaagatgaactagtccttgatagacagtaggatgtggatgtatgacatgattgacttttgcaaatggcatacctgctaagtgctcttaactgaatctgagtccaagaaaatgagtagttttttaattgatacattttagactaagtcaactgattggatactgtgcttttgtttgtttgtttttcttccaaagtagttagtgacaaaagtccacgaggaaggcaacttgtagaaaacatttaatttggggctcactgttgcagaaagagttcaatgttcatcttggcaggcagcgggcaggcatggtgctggagcggtgggtgacagcttacatcctgatccacagcacctgctagagaaagagctaagtgggcatggcttttgaaacttcaattcagtgacacgcctcctccaacaaggccacacctcctaatgcttcccacacagttctaccaactgataaccatgtactcaaacctgagtcagagtgggccattttcattcgaaccaccactactactactactactactactactactactaccacttctactacttcttcttcttcttcttcttcttcttcttcttcttcttcttcttcttcttcttcttcttcttcttcttcgtcgtcgtcgtcttcttcttcttcgtcttcttcttcgtcttcttcttcctcttctgtttgtttgtttgtttgtttgtttgagacagagtttctctgtatagccctagctgtcctggaactcactttgtagaccaagctggcctcaaactcagaaatctgcctgcctctgcctctcgagtgctgggattaaaggcgtgcaccaccacgcccagcaaaccatcacttcttcttcttcttcttctttttaaaatatttatttattcatttattatttgtaagtacactgtagctgtcttcagacactccagaagagggcatcagatttcattaccgatggttgtgagccaccatgtggttgctgggatttgaactcaggacctttggaagagcagttggtgttcttaactgctgagccatctcaccagcccccaccatcacttcttatatgcaggaactttccttgatctttttatttagtataaagtaactacacacttagttaccatttaagtgtatcttcttcttcctgttcctgtaaaaaaaatcatttctccaatacactctcaactttagaagtaattgattcctatttcccatgtgtgcaacaaatttacttagtatgatgaaacgaagtatttcatctgtttcagcatgtgtagtgctctctggactttgctctctgccccaggaactctgattctttgaggtagttggtgttcaaaatggatatacaatggttgtttgttggtggtggtttgatttttccttagagcagtggttcttgacctgtgggtcatgacccctttgggggcggaggtgtcacatatcagatatcctgcatatcacatatttaccttatagctcataacagtagcaaaattacagttcagaagtagcaacaaaacaattttatggttgagggtcactacaacatgaagaaactgttttatagtgtcacagggttaggaagattgagaaccacaaatatcttaaatatttcagggtattcagtaacttcttttacttctctctaattattgtgtgataatgcttagcacgagtgctaagtagccatgcctcacatgctatacaatgaattttaacttcttagactcccgtggactctcctatttggagcagtcagctatgaagaaactaagggcaggcaatggttatttaacagtgggtagaatcttgaggcttgccttcttcttatcaggcctttgctaggtcagggccttgcttaaagacctcagagtattagctgaccttttcctatctgcttctgcagatgtatcaaagggccttagggcctaggtagctgaatgagtcagtaaagtgcctcacacgcaatcgtgagtgcctgagttgtaccagcaggctcactggccagccaagacgagccagcggctaagtctggagttccaagttcggtggtagatcctgtctcaaaactaccaaggtggagagcgttcgacaccaacccccaaccatttccacttccacacccagagatatgtttacaagataattggctaggttcactccgctgttgccacagtacatggctgagagaagacatcttctgttagtttttctatgacttttatgagccacaaacaaatttagccatgcactccagagacctttgtggagttagctaagacactcgggtcagagtcataagtggattctgctctgccctgctgtggtaggaggctggggcttggaaagaggcatgcagattacagttatgaaagaaggaaggcaggcagaaagactggaaagtcctcttacattcatgtaacatagtgtcagccccctccctgtgtgagagagcagagggagggcgggggaagtgcactgtgtctataaatgactaggactttcatagcagtgacttttgggctcatacctgccctggtcctctggctcacttccattctcagaaatatttgtctttttcttaatctgtgtatctagttctattattaaaaacaacaacaaaacatgataatttgtttaaaaacaaacaaacaacccaattttcccctaaatgttaactgctcagcccaaagcagcatgtgttctctcaccattgagccctggttttctgctgatgtccatggaatagcaggtagatgaaggcctactgccagtcaagcatggaagtctccttgggaaagcccttagtggttcatcactgtaccgcagccctttgggggagaaccattttcgcttgttatctaatcctttgcttcaaaacctcccgttccagaagatattttaacttcatgaatgttttagatcttactcgaccctggcagggtcattacgactgctgggtccttgttcggtcagggtggccgctccttagccttgctatctctcccaactttggggttgtccccctgcccttttgtttgtgttttgaaagagttaggcttgtcttgacgtgtagcttctgctagcctgggactttggtcctcctgtgtctgattcctgagtgtgctctctattttaattctgcctttcttgcctttgaataggcagagcaaggcagctgctaagtgctgtctgccaaggccctactttaagggagggaagcgtgtgtttgtacgacagctttttgaaaaaccttgtatggtttttatttgtgcacacacatgtccccgaggatgtgtggaggccagaggacaactcgttctctctttcctccatgtgggtgctagggatagaagtcaggccttcagccttggcagcaagcacctttatccattgagccatctcccagccaaacaactttctaataataactttattagccctatgctctttgtaacaaacaccatttgagatggtgatttgtacgtcttacctggaaatttcctgggaaggttttccagccaccaagacaaaaatcttcaaatctctgcaaagggtgatcctgggtatgtgaagagaaccagttattaaagaaataatagaaatgaaggacctctttatctgcgtagacatttcagtgattgcttaaacaaatgcccttgcattgtgtagccattctggcatggcctattgagctgtctgctagataatttgggggctcttctatctggatagactagaattgtgttcaagtaaaaataagtattgcatccaaatccagtagcatcattaagcacctacatttgtagtacaaattgctaagtttgtgttacaaactttaatcttgtagcatactcactttgaagtaggatgtagttgcattttgctagatgggagcatgggaatgaaaacaaaaacaaaggtttttctgatgtatatgtgtttggctgtagactaggtgagttgtcacgctcccagtctctagcactataacctgttatcacaattgagaagacgtttaaagtcacggtcaggatttcagcctagaaaaaccaacataataaccggtaacctgaaagttttaactgaaagggagggtttttgtttttcctatatggtcagtgtatacttcaaaattatagttttatggaacctttaaaaagatatattaccagttgtaccttatatttgctaaaactaaaaccgtactggagctaagcaagcatatgacaaatgcttaacctgcttcaactctcctaatgttcacagtaatgtccaagaaaggggtggcttcatgggaagtgggaggggctcggtctcagagtaaataattgattgtcacgagcattgtctgctctctctctagaaaggccctactcctatcaatgtttccatatttttctctggctttacggcaagcgtagcatttcttctctatgtgaatttatgggctctattcaggagtccatgcggagatggatgtcccagaccagctttgtgtcctggtgttagtgacacttctcatttgctgtgatcaaatacctataaagaagcaacataaaggaggaagtgtgtgctttggcttacagtgaagggagactctacccagtaggcggcctggagacaggatcgtgagagagagagctgctggcatcaccaaataaaagaggttctgttgcttttaggttagcttcattgttagcccaggctgtcctcacccctcatcctcctgcctcagcttgccaagggctgagatttcaatggtcattatttttattagacttttattaaaaagtctgcgctttgctagaaaactggggagaaaaagccggttctgttccctcgtgggtaaggtctggaatgccgttaggtcagcagggctggctgagcctctgaaagccgcttacatttgcagagagaaaagccccagtaagaaaagcccactattccctctgagagttatttcaggaatgactggacggctctggaggaccttgctttaaacaactatctgtaaagctcggctctgctctgtgaggcctgatttaaattctttaaacatttcagatcataacacttgaagtattaaggtttaaaaaatatgtaacttgttaaattaaaacttaaactttttttaaaagtattttttattagatattttcttcatttacatttcaaatgctatcccaaaagtcccccagaacctcccctcgactcccctacccacacactcccacttcttggccctgccgttcccctgtactggggcatataaagtttgcaagtccaaggggcctctcttcccaatgatggctgactaggccatcttctgctacatatacagctagagacaggagctctgagggtactggctagttcatattgttgttccaaacttaaacatttttatagattataataatgtttctgattagaatgaaaccatgacatttgaaagctacttttaagaatgttatttacatgaggataaaatgtgtcagtttatagttcataaatcttacgagtgtttatttacttgtttaggaatgtggtctttccttctttattgtgtatgacatctgaccactcttgatttcatttagtgagtgaatttctcatcctctgtaacagaaaagatcttaatttgtcccaccgtcactggaggcattccccctctgtttaatagttagtaattaattgttcactatattaaagttgaaagctcttaagaagagctggggggtgtggtggtgcgtgcccgatcccagcattgagaggaagaggcaggctagtcccttcaagttgaggcttgcctaatgtaccctgtgtattctagggcaacctgggctacataggaaccagacaccctatctcaaaacaccaaaagtcaaagaaaacaaactctcagataggctaagaagtaaatgctgttattgcaaaagcttccagcaggaaactaagtcacactgagagctggtgatgcacacacaccttgaatcccagtactctgagattgaggcctgcctgatgtatagagctagttccagaacagccaagccagggctacacagagaaacattgtctcaaaacaacaaacaaacaaacaaagaaggaaaagaaattaaaatcagaaagacatgtaaggcctcctgataggatactgtgcttgctacagtcttataatgcaattcctttcccaccctgcttactgctgaacttaccgtgatgacagaaagttgccccggcctgcattctgactgacgttgcttccttctgtctgtcagttgttgctttctaccagcagcctgggtcgagggaacaggaggctgtgcaccgcttatttctgcgcacatgagcgagcattcaaacatgaggtgcaccaggggttgtacagcttcatttttcgaggaaaaaggttaatttttgaaatttcaaacagtaaagttttgaggaaagtcaagtgttccttttgaaatcacgtttctaggagagagcagagaggcccctttgtcgtctaaagccctctggaatattttttagctgtctacagtatgcacaaaggtgtgctggagtggtcaccggctccctcacacagccacgctgaggtgatccagtcgtcccagccttctctccagagaactggtcaaccggcatgagtactgcagagcctgcaggatctcaggctgcacctagcctagaccaacacatctaaattctaaattaaaacaaattgcatgctggcttcctgtgttgagtcacctccaaaaggcaagacactctggggtcccggtgacatggcctggtggaaaggtagggcacggctttctggtgttattcgtgaatgctgtatcttacttcctgagagaacccacactctgtaaaatgagggaaaggcaccagaggggtaaggtgcgggtgaatgcagggtttatagacatcacggttaacaatagcagctggaatatagtgccaggacttctctcagtagctctcacagaaaccttctagtctcttcatctcctcttcctcagtgaattctctgcaaaaaaaggatggataaggtgaggatggggaggtggacgggaggagacaaccttcttgtcgggacagatcttggagaactaactgttcagtagtcccatctgccttagacccaggatttctctagctcatcctcctgcacgctaagattacaggcctgtgtactcacattccactggaaattgtttcttataggctaacctagctagtactagcctttcctgtgtcagtcagtagtgtcagccatttagagttggatacttctcatgggaatattataccgtatggtagatacagctcctttctctcaccaaaaagaagtaatgatgacatgtgattacgaactgtcacagcttctgcagtcgttgactgatgactaaatgtgtccccggcagcccgccaggtaagttaacctttaacagtaatggtcatagacagcaaggcattgtcaagatctcactggttttactaatgaggaagatcttactatggaggaagctaaaagaaaatgaaagactatttcccccaaaaccatatagctagcgagtggccaaggcgggcatttaagcgtaagaccttggattggcaagatggttgagcagggaaagcccctgctatgcaatccttgtggcttcagtgtgaagccacactggaacctatggggaaagagccagcttccaaaatctctcttcgctttcacacataccgtggtggacacccacactcacttagacatacggtaataataaacaacatcaagaaattgaaaagccaagcaaactcaatatcccttgttccatgaaataaaggcaacattggcttagaaggaaaaagggttagtttgtgtagtgtaaccatccatactctctcaagcccgttctcttctgacacatgagaaccctgaggcctggcagcaccaacttgtaatgagtcagcgtgtaaaaccattccattgccgctctaattagttgtgatctttttggtaataattacacactgacatgacacacccactcgtatctaccgtattggtcacaccccaatgctgatcttattggtggcttcttaatgagtcagtgatactagaatacttcccagactccagtcatcaggaacttatgccataaagaaatacagacattcaggactggggagatagcttggtaggtcaagtacttgcttggccagcacaaggacattgtgctatatcctacataaaagaagctaggaatgctggtacatgcttgtaactccagcacagaggaagaggaagaggagatgaagagactagagggtttctggaactcttagacaagttagggcttaatcagggaccgtcagccagtgagagactgtcccaaataataacaggacaggttttgaggaatgacacctaaggctgtcctttatcctacacccatgcacatgtgagtgtgtgtgtgtgtgtgtgtgtgtgtgtgtgtgtgtgacacacacaatcaccaaataacgcaagaatctttttgactcaaaggggatccaaaataatttaaacaatgtcaaaacataaatttttgaaatattccatttactatccatttctggagagatggttcagtgtttaagaggataaaccagaggatattttttttcttttgtgaactattgataaatcatttcagaaagcggctgatggagccatatgagttaaagatgcccgctgcagtgccaggaaatattgatgtataaatgcaagcacaccaggaataattgatacacaaacgaatggcttgcatttcactgcgaccagtgtattcagacttctattgaattgaaaaccactttgaacaagtctaggccaattgatgcaaagaatcccaaacggcgaagagttcatttcttgtggcacgtctgttcaagtttgccgggccaggcgctgagaaggcttcatgaacctgggtgtaacaaatctgtgaagggaggtttatcatttgcattgtcagggctatttcaaaatgccttgaactaggatactgagaatggaagactagcttctgtttagatttctatttctcaacacacagaggtgctttttcctctcatggtgtccttgctttaaagaaaattaagaaggcttagtcaagttccctaagtctgtagatctttgacaaagaatccattcatttgcctgtcaattacttctgccttgctcacaccattcacaccggattcttctatcttaggaagagaagcaagcagtaggaggaaactaatagccacttcaaaatatcctgagagggagcgtgtttgtcagtccccccaaccccaccccctttcgattgctccacatcccagccttgacaagtctgaggtatcatctctgtcttagacaaatcctccaaggtcaggggtagaatctgaggtctggagagaattcaaacccacacttgttatattcctaaagccacatcccgtatttaataagagtgggttgcttcattgtgctggtgtggatagactggtctgcagctcctcaagggccaactgatcttgattaaaaagccatttcctaaggagagcactactgaccagcagccccctgcctcggtatccagtgcatttgggtgtctcatcctatggattagaggttgagagaggatgtcactgtcgggaattgcccccaggatacaggttgggctggttttccttgatttctgcaggtccagttagctaggagctgggtcctggttctcgtcacacagcctgtccctcccctgattcagtcctgtccctgagtctgcctgctctgctcactaccatcagaaagacagctcacctccacctggaccacctaagtccttaccccaccaccatcactgtggctacattgtaaggcgctgagcatccgcctcctcagtcaggccttgttctggctatcacagttctctgtgcttgtgctgtgcaaggcagtttagttcatgacaggagaggggtggcttcggggtgacaagactggaagaaaggctttcagcactccatggctgttgtcatttaaatgaaatcttaagtgctggcctctcccccatctttaaccttgtggtttttggctcacttcctcttcacagtgatagaattactccacttggaattagttcagcttttcaaagcaagcagagtctgttgaaagagtcagtaattctattagattgattttgcagcggtaaacaccttgatcaaaaataactagggaaggaagggtttatttggcttacactatctgattatagtccatcctaaagagaagccagggcggggactcaaggcggggaacctggaggcaggaacagagaccacggagaccacgctgctggattgcttgttagcctgcgttgttacatagcccaggaccacctgcccatatgggattaggcccacccgtattaatcatggaattgataaaaatacccccaaaggcttgtctctaagctaagtgcatggaggtgtttttctcaattgagatttcttcttctcagcttgtgtcatgttgaccggccaaaaaaagaaaaacaaaaatccactaactgtcagtaatgaatggtcttggtgatggtcatccttatgtaatctagcaagagaataacggcccccattcaagttcattgtgtcttccatcacattctttctgtagatagcaggaggagtgctgcagtaggatgtcgagagtcaccaagcacacctatcgatggttagccgtgttcagctagagaaaattgcatttccatgagatgatcttacaatattggagttggaaaggaggtgggcagataagatctttctaccagtataatatactatataactaacttgttaagcaatgaacgaaatattttggtttacaataaaagagagccttccagccgggcgtggtggcgcacgcttttaatcccagcactcgggagacagaggcaggcagatctcttgatttcgaggctagcctggtttacaaagtgagttccaaaacagccagggctacacagagaaaccctgtctcggaaaaacaaagaagagagccttcctatgtgacttcatagttacttcccggtagatttccattccttttgagactatctacataaaatgctggcatacctggttctatgggtggttcccacggaaatagatgctgacgagaattgctcttatctattgtgccctagaaaatgttcctgtgtgtcttagttagtgtttctattgctgtaaagagacaccatgaccaagggcaactcttataaggacaacatttaattggggctgggttacaggttcagagaggttcaatccattatcatcaaggtgggagcatggcagcgtctaggctggcatggtgcaggaggagctgaggattctacatcttgctctgaagggaaacaggagaagcgtgacttctaggcagttaggaggatctcaaagcccacctcctgtgaaacactttcctccagcaaggccacacctattccaacaaggtcacatctcctaataaggccacacctcctaatagtgccactccctgggccaagcatattcaaactactacactgtgacagagtccacattgtgccatcaagttgctttgttggttccttggtttcagtttttttaagacttctcttataatagtgtgaaagtgattcacgctcttgctactgcgtgtgagtgtggttctctaagatggagaacaaattcttcaatcgcagtattgaaaagtttttagtgtgcatctaaatatccacagggaatcccatgcaatatagattctcaggaagtttgttggaagcaacacagattcttaccttagatactgttgctagggagctgctatcttcatcctttcttcctttttggggaaaaaaaaaaaacaaacaacatttttagtgtgggtatttctatctaaactaaaatttaaggccattccatgaatgtaaatactgtatttgaaactgaactaacaaaatgaaagatttgtaagatgtgtcaaaaatcttttgcggcagattaaggttggtattggtcaagtacttgcccagatcacatgaagtcctgagttacatcaactgcttgtgcttgttgtctatacatcattaagtcatcccagcactggggaagtggagacagggggatgtttaaagtcatccccaggggaaccaggagactcaaggggacgtcttttgctatgtgggtttgagagcaagcctacactacaagagaccctgtcccgcaaaatggaaaaaaaattttttccaaaagatctagagaggagcaaacacacttcgggcatctttgtgatctcagttcctggagtctttggtggcatttgcttaagaagttgtaatcaactcattcccgcagtggaacactccgccggtcatttcgtagtaccaaaatgcatgtagggttcttctctggaagtctacatttcaagaggcaactaactgtacagttccctgttttctgcttcacacatctctgggtggagaggcaactgaccgaccataatcctaagccgtaacttagttgtgagactttggacagtcaggaagcatacaacatgtttgaaatcctcacttggtaaaatgttggtaaaaagcttggaaaatagaccaaacatctcccaatttctgtggtggctacctacagcctcttcctgagctcccagtaagtagcatttttaaatgttgctcagaaatatataatctgccttaaaatatttttcccccatacaaaaatagaaatttttgtacctcagctgaggctcacgagagaaccaggagctccttggtggtattatcagtctggtgcttgtctgtgttgtatgaacacgtttccagccctgcagtatttcctgttcttcctggagaaggagagaatcacaaaggaacggagccccggaagcggaagtgggaagcagacgtaggttttagggaagaagtttaccatgaagttaaacaacaataaaaggaggaggggcaagagcatttgctgctctttcagaagacccaggttcagttcccagcacctccatgcccaccacaaccaccatgtgtaaaactccaggaatctgacctcttccaacttctaccagagacaggcagacagacacccgtggtacataacacacacatgcaggcagaacactcatgcacataaaataatgagataatcttttttttttttttaaagatttatttatttattatatgtaaatacactgtagctgtcttcagacactccagaagagggagtcagatcttgttacagatggttgtgagccaccacgtggttgctgggatttgaactctggcaccttcggaagagcagtcgggtgctcttacacattgagcccatctcaccagccctgagataatcttttttaaaagtagaggaacttactttatatataaaggtctccgtgtattggagctgacccccagccgagacaccatcagtacctagcaccatggaacatgttcgttttatattttagggatgattccatgtcaaatcctaatattcctcctgtactcattaaagatgaagtattagcctacattcctacgtggttgtactggctgctcttgtgttaacttgcaacacaagctggagtcatcagagagcaagtagccacagctggggaaatgactccatgagatccagctgttagacattttctcaattagtgatcagtgtgggagggcccagccaatggtggctggtgccatcccctgagctggtggtcctgggttctataagaaagcaggctgagcaagccaggggaagcaagccaggaagttgtactcttccatgtcctctgcatcagctcctacctccaggttccagcccttcttaagttcctatccagacttcctttgttgatgaacaaaattatggaagtgtgagctgaataaaccctttcctccccaacttgctcttttggtcatggtgttttcttgcaggaaaggaaaccttaactaagacaatggtagagagatgttagttagctttttcaccttcaagaatttttctttttttttaaaattatgtgtgtctgtgtatgtgggtgtgggcgtacaggccagaggtattgaatcacccaggagttgggagtcacttttaactaccccatctctccagtgctattaacttattagaatctggaaagagagaagtcattttgtgtactctgaaggaaataggtggggaatccatgtggggagtagtcagaaaaccattaaagagattttgtgttggtataatcaataactttttgagaaaagtacgcctataattaaaagatagtttatactgaaaaattaataagctgcagtgtgtgtgtgtgtgtgtgtgtgtgtgtgtgtgtgtgtgtgttggggggtagggctggggatggtgactggccaacaaatctcccagtcatgagtcattaaatgatataaaaaattaggctggagtgagtaatgatgtcatctcattacacctgtatcgatcgattcctttgagtttcaaagcccagtctaatgtcactgttaaacacagattggaagagaccggaaggataagcccccacccgctcacctacagcttctatgccagaaactgtagacactccgagcttggtttgaatcggggaggatgcgtttttacagcgtgctcaatcaagcaaaagcacatggttgaaaagtgaggtattaaaatacagtagacagggaggaaattgcagatctgacatttacggccacagtctaaactgtgcgcatgccgcaaataaattattgttcctccggaggatgaaattcattggcgtccagagatcacgtccttgggttgaagggaggtgcaaactacacctgtatttcccacccacctgccacagcagaatggatacctctgtggggatgtggtgacgctttcttgtgaggaaaatacatggaaaatatctcaaaaccggaccccagtagtgggcaacagcatttggggggtttcagtcaggcaacatgccattcagacaggtggaatcaataatttcattataccagaatgaagaggaagacattgtgcccatgaggaaattagataagaaacatagtgcttctgtaatcttatcaggtccccctttttgttgtcagactgccaacccactggactctgacacaaagggcatttggtcagcacttcccaagagatcctagtgtcacccttagagaaggctcggtgacaactgtggtttgttaaggccacttcagaccacctgtgttgctgcagccatttgagtgaccactgggggagtgaggttcgaacagtgcccagaatcagaaaaatggagccaaatgacaagggaaagccacaaaggggacacggaggcagcgccgatgatgtttctgtgaaagacagtcagttccgaactttactaggatgtgtcagccctgtcctcttgtccttgtcacaagtgacccagagggcagagggctgagagccagctatggaaggacacacaggagtcagcgcagcagcgtgagctggaaggatgtgccatgtgtgagccctggatggtggctgcgtggcagcattgaggggaatgccgggtggtccaaccagtgagcagcctaaaggatgggttatataaggtttcccagccatggggaaggttatgatgggacagggccatctatcatgtagagatagcaaaataggttacagctaagtagggaaatgaggcagcctgcaagggatgcggcgaccccaggtctattgcagcttgttagttgttgagaatgtttaacatagactggggaaggcaggcagaggtaggccatggtcctgctgggacaggggaagcctagcccagcaaagctaacctctgcttcacattcgtaaaccaagagcctggaaggatggctgtcaataaagtgcccaccacatgtcatgagaacctgcatttggatccctaatcctgggggaaaagagaaaggaggtggccagtcagtctagccaaaccaaactccgggtttccaatgagggaccctgctccaaaaaataaggtagaggggaattgaggaggaacacttggaccagtggcctctggcctcagaatatacgtgtacatgtgtatgtgtatagatgtgcacacagccacatgaatctggacgcacacacaattctaagtcaaaaatactcttgataagaaaagtggcatttgttttctttgctttgtagaccaattcccaaaggacaaagtagacagaggagggagacagtctatgtccaggagagcatggagaagaaaaaaatggatgtgtgtgctcattcttgcaaaacgtatgcccaagccttaaccaaaagatcatctaaatagatagaggggtagcttcagagtcgcctaagccaccatagctgttgacatgcctgcctctgacatgtgcctgacacactgacagacaagattcccaaaagggtagaaatggcaacgagttctcagtaaaaatatactgggttccatcccagtgaacatccttgggattgatttttattttttttcattgcctaatttaaacagcccacgtaagaagatagtttcattttgttcttaattaatatgcacatcctcaaaaaaaaaaaaatgaaacctggccacagtctagccattttttaaaaaatttaaatgccacagttgccttgagataaaacttacttcgcaacaccagtttctggcgtgaggtgatgtactgaactcagagcagtctgcgtcagtagctgtgacgatgtagtgaactcctggtattttttactgaagcagtggctagtgtgcttgatctggtaggctcaccgtagttcagttagcccgaaccatggctgggaagcaggagtttggcacgctgtggactgtgtgtcatccccatcaccaagtgatggctgctttcagcgcctgataaagacattctggttttcaggttctccgagttcattgccttctccatagacctcctccttccatccaggctgtcttctgtgacttgacgccagtgtatttgccatttcttggcaagagacatttccattttcctgttataaaaccctccctcccacatcacatacagaaccttgtgtacttcgctgatgaacaattgattgttgagttactttatttgttcgttgcataccaccggtctctccttcgccaccagaaccaagctctgtgaggctcatgtcagtgaccaatcttgtagactaaaatggaaggcagcagaaacctgtgatgcaaggatgcttgtcatttgagtagtttttgacagttaagtttctataaaagttacaagtggatcccttagtggaggaatgtcacagttaagtgacagtgtggagcagttgcactctctgttttcttggccatgtgaggacacctgttctcccagctgggggaccagcagctgaccgaaagccaatttgaatcaagtccaacttagtgaaccaatgcgtttaattgggctttcttccgggagcatgggttaggggttacttgagtaggcattttataagcttctacactatggaagacaaatactacttattaatacccccagcaacccttaaacctgggggtcagactcccacgctaccgtctcatgagccatatgtgtttcttgcatgccactgcatgcaccacacaagccccccgcccctttcctcaggaaggaagtgttagtggtcccgatcttgtgagtggtctttccattggctgtgatctgaaggtgacccatgccattcctagaaggcagacaggctctttaagctacgttgctgaacctaaacatgagggagcaggaaaactctatgtaaggattgaagcagaagctgttggaagaataaagaacttgctgaggtttcgtgttttgctctgtattgtaatgttaataatactggccctcaagatctggttgccacggggatgagagtcctcactcacaccaagtgatgctatgtaacctagctcttaagactattggttgaataaaggtgccaacagcctatagctgggcggcagaagagtggtaggcagtggtaggcagagttttcattccttgccttggggtctgaggaggaccatgggggaggaagagaaagaaggtgaagacaccatggggtaaggaatcatgagacctaggcatgagggctggcccaagactactcatatctgagttattgccagggaaatcgacatgatagtatatctgcccagctctagtactttaaaggctcataaatataaaacttctgtgccttgaatctgagaacttaatgatcattggctgggtagaaacctctgattccaacaacagaactcgtctggctttgaaccctgatctgtaatgcattagtcataagtagactaatgcattttgtgatcctcactcttacttgtgaaaggctaaaattttgctgcataaccatgatatgtgcttccgttaaattccaacctcattacggaagtcacagttcagtcccatcgttcctgaagacaagtgtctaggagttctggcttgctctgctagcacaacaacagaatgctgttggcatggaacatgttgtcaaggaaatctagggtcagatttttgctaactatgttaaacttttactgttggcatatagttaaaaattccactgattctatcaataaattaaaggaatctgttagtactgacttggctctacctttttcatttaggtagatgagaacataaactcaaatgtgttttgcttataaaaagccagggttgctgacgttccagagtgaggcttttctagggcaaaggtcatttggctccatttctgagtgactttgaccttgccttctcagccttaccccagagcttgttagccagggtagtgagcgtaagaggaaggcagtcacgaagagcaaggttattgtgttttataacaacaaaattctgctgtcaagaaaatccatgtaacgttagtgacaagtattttgtgagtcatgaaaacccacacagatctatgttctattactgtcgttataaggctaaagaaatctatagatttccagtgactagctagtcaccccagtcattgcttctcaggaaggttgctttaagcctggatccaagtcggaaccattggtttctggttctttctagaactcacagttgttcttaataaagtctgaagttctgttgatttctagtcttctaagaaaatagcaattatgttttatttgttaacatatctgtatatgaagaggcacacatgtaaaacttccagagctactaatttcctttcccagctttgatgtgtgtgctatttaatgtcatggtgcccttggccttccagcaagacagaggggggttgtgggtaattctgctgctacctgtttccaaagctctttagctgacagtccaggaagcattgggagactttcttgatttccaccttcctcttctcccccatccttgaggttctgtgttgtggtacaggagaggcgtttgttaagttagcctcaaagaacggttttaagatgaaacacttggggactttaagaagaaatacttagggacttgaaatacaatggtgaagtgaactcagaaaaccttgactgatcctgagccagctgtcccaagggtcatgctcacttggtcatcgggcacagccagaataattaagggagtggtggccctacagaaggctgttcaggggaaacagaatcaatagtcataacctggggcgttggtgtctctaactttatttcagcttaggtcactgtatctgttggtagtcctgccctgcttagaaggcagatacatttcctttattgcttcttaatgtgtttctaaagctttaggtaagttattcaataaggagtgaacatttttttaaaggcaaaatcgtatgaattctgttgagaagcggtaatgctgggccttctgcgctgtaggactgattgagcctcactgtgaagtcccaagtaagttgcatttttcctcatgtgcaatgcagagacactggagatctttgtcacaaagtgaatgaaaacttgaggaacttaattgagaaatcagaccaaatttacaccaaggatttcaaatgtctaaaagggcagcaatagagcaaagaatgcatagaatgcaggccttctggtgtgtgtgtctgactgtgtgtctgtgtatgtgtttgaaaggtaatactatgtagctctgcctgtcctggaactggctagaccaggatggcctcaaagtcacagagatccaccagcctgtctcccaaagtgctgctgggattgaaggcatgtgctaccacacatgacaaactagctcttctatctatcccagtgtgtgtgtgtgtgtgtgtgtgcgtgtgcgtgtgcgtgtgcgtgtgcagtgtccatgatgaatgcttttgtggatctttcatattaacccaggtgtaatcaataaactcccagccatatatcccagttcagaaaacaattcatttctttctgctggattcacacaggtctaatggatattcttgtcatacgaagttgggtctttgtaaaactcacactaagtcatgatcacgttcccctcctggttcttatatttgattctttgttatccgtggtgcctgctctgaacactgagttacccgtggtacttggcactgggtcagaccagtattgagactaagaggagtccacttgggggaagccttgatcaaggttaagagaagggaaggaaaattgaagaggagagccagctctagaatgttccctccattgcctgccttctttcccacagaggtctttatctgctgtcgcgaatccctgggttttatgtagggtgtctgtctgccttgcttccctaggctgctcaatccctgggttttatgtagggtgtctgtctgccttgcttccctaggctgctcaatccctgggttttatgtagggtgtctgtctgccttgcttccctaggctgctcagtagttccacgttaccatcagtcatccagctctgacccttctcccatgtgccagttcacttatcaggtctaccctccaagttgctagcctgggctttggaatcacacatgagttcccactatgtactgttgcacaaacttgggcaggttgcaccagacgtggtgccaggaaatctttcctctggtgaggatggcgtacaaagctgatggtggggagctgagaggggaatccgcaccaggttcttagcagaaagctctgtaaggataatggcctgggaggcatcctcagttactgttctttaaaggcaggtcttattatgtaaccctggctggccttgaactcacagggatgcctctgcctcctgagtatgcataggattaaaggtgtacgccaccacacccattcctacatcttctttcttattcctgaggtgattcatctccaaccaattatattcaatagaaattacccatattccatgatccatgtcactgagatgtgtgtgtgtgtatctgtatctgtcgatggaatgatggatggatagatagatagatctagatataggcaccaatgtgtagatatatgacctaacctagaattcaaggtccttctgttctaattgcccctctgtcttcttcagcacatcatgtcagctgactttcccaggacagatagtcttttgctcttgtagtattcttcattctagaatatattttccagcctccctagtccagtcctgccaaggtacttgtcctaacagcctgaaagtcccacacttagtttttccttctttcttgtgtctgaccatgttacatgggccacagttactattggagactagaaatggcttcgcttttctccattttgtttgtttttgtttcttcagacagggtttttctgtgtaacccaggctgtccttggactccctgtgtagaccaggctggcctcaaactttctgcctctgtgtcacacaaatactaggattaaagactgtttgtcactggtggattctctccctacatttaaaatgctagtcactggcaatgctcagagggttacttcggggttcagaaccaagtatcagttctgacgtcagatacgctttttttactgtttcagtatttgaattgatattcagataattcttctaaacatgtgaggggcaccctctgatcaataaaactttgccattcccagcacagctgtccggttttactgtgtgcatccaacacttaccacaatggcagagccatggatatgcgggattgtttggtcatttcttcctgtctccctctggaatgttctatctcccagtagagtgcaaggattttaatatttagccaaatctctaaatatttgctgagtcaatgaatgggtgaatgaaataactgcagtctactcggtgaaagttactagttccatttttctaaagtatgcatgcaccctgacatcactgacatttttcccccttaagtctttctttcagtatactgtgtgtgtgtgtgtgtgtgtgtgtgtgtgtgtgtgtgtgtgagtgtgtgagtgcacgcgcaggtgtgtgcgtatggatgcaggagcttccagaagtcagtagaggccatttcaccgccaccctgggattccagttaaagatggttgtgagtcaccatttgggtgcttggaactgaacccagcctctctgtaaaagcagtaggtgtcatctctctagccatggatgttttaaggttatatattgagagtaatttttagaaagacattttagctcctacttcactaagcaactggaaggtgagctggttttaaaataatatcagagcctttgttttaacttggcgaatttgacttttttttcccctttaccatcttaattatctttcactgggtagactacattggaaactaatgactgtcttagcctcttaatatttagctcacttaatcagggctaggatgagagtccggaagccaagcccttccttctgtcctccatggcactcatcaccaacccccttcttttcctattcgctcaagtgcaacagaggtcatatttacatacaaattcagttctcagtgcctggtcagcttaccacccatagaggaagccacagctcctcttttttcctgttggcaaggaatcgtaaaactcacttgctgtgctttcactcgaggatgagacggtcgtggaggttcatctgcacagcatagataggccctcagaaaacacttctgaagaaatgaatggcttcagcagaaagcctgtgggctaggtcacactgggaccagatccctgctatgtgacactaaccccgctcttctctgtgaccattttcccctcacttggtgtcactgccgctgagccaccaaggagagagcagtctgtaggtcagaacggaaccgggaatctttgtaggttctcaggatacggatacgtaagctctgtatgatgaagttccctttgtatttctcactggaccacaggccacccgagatctgtgacccatcatctagaagagcatagcataaatcggtgtccccaacagtggccctctgggtctcctgaagatgtcagaatctcttggcttcctacccccacagcacctagagagtcagaattgctacacttgtttataatagaatccctggcttttaaaatgtgttctctgtctctctctctgtctctctggtgtgtgtgtgtttcatatattattctggctttgaagtcttgatcttgactctgtctctggtttatcagagttacaggtatgtgttggtatgtgttaggaagactgcccatcttccaaggtaacacttactaaatgggtatttaataaatattttataataaataaagtaaatccgttacatccattcttcatattgttgtgttcacacacactgcagtaagttagatttgctgctgataattctggaaaatatgcatcatgtttataaaacaggcagctctcagagaaaagcttgcttatctgtccctaaagtgacgtggggatttggaaatcccatagccggttttgatcaacataaacaatttgaataattcaggttaaaaataatccacatgcgaactcctttgccaagcatgttgtctcataatgctcacagaaatcagaatcagcgcaaagcccagagcagcccacgggaacaggagcggtgttgtggcagacatttcctaagtgtttcattgtgtttgcttcactgtccaaggtgcagatgctaatgagttaggaagcttccattactgaacaaataccaataaaacaaaactgcaaatggagtttctgcccagaagtgggagttcagctgctaacaatcttgattctggtgtgaaccgaagtgcacgctcacctatgtttgcatacacacagctcatgtacaaatacaggcacggagctgcctttgatacctcaaagtgattgcacgtgatgttctcatatgccgatctaagatgcctggggccttttagacaggttgagcctcggtgagtacgtggagggattactgtcctcagctcacacgatacagttccacttcaagtcaactgccagaatggatgatggccaagctgttggttgatttgacttattacttatcacttattactgtgttactttcattttcctaagggttttcatgggacctttgtcctttccttttttccttggtggtggtggtggggggtggtggtggcagaggttgcatcctgggcttttcttaagttgattctaatatgctctgacttgactaacttaagaactaataaaggccaagatacccaggaaatgtgtgcaagagttttgagttctgttttcttgctctttcccgtgggttaggtcaagtcagtgtttttataggaggctgtatagatgttattgtgtagtggggtgtgtgtgtgtgtgtgtgtgtgtgtgtgtgcacgagcttgagtgtatgtggtgattactacagaattcttgtgacagggttttatttacgttgttctgggtatcatgaagaatcaagaagccaggccttgattagaaggtggggatttccttcacaaggtgtgtttcagtcacaagtccatgtaacctaatgcagaccttgaaacctcactgatggtgtcatgcaatctcccttgtctctcactctctctttctcgagtgttgactcacaattcaagatgacaactggcaggagcaggtctgagtcagaccaaggcagagaagcagaggaccaagactcacacacacccacaaaagggtgtgtcgtcaatgtgaacatgttttcaaatgctttctcaaaggcatgccagccagccacttgtgcctacgttgtcattgctgcagctctgtcatttggctgtctccattgtcatgaggaggaaaaagcaaggctgaactgtgctggtgggggggaagttgagtcaaggtgagccttcatcgagcctgcccgggagccatcgtatggggcagtctcttggaagactcaaggacttctgaatactcttatttagctgtcaagaaggaagagagttccaccatgcccggtttcaaaacatttgtctctaaagctccgtgggaagacaactttatagattagttcaatgtttggaaatattctaatgtgctaatcctaccttgatagacatttgtttcagtggttttaaatcagtttacagagcccctgtacaatcatccctcaccctgctcagtgccaggtacccaccagtcagctttctgtcagttagcagttgtgtgtccctaaggaaatacagaacacagtactaatatttgatattcacaagtatttactttcttttctgggagaaaaacaccctcaaccttttgcaaagtacaattcagtttcaaaagaaacatctataatcctttcctcgaagtagatctgtcaaataatggaagatgatactctattttttatgaaaaaaaaaaaattggtgttacgttggaggccccaagtgggttatcttgctcagcaatctcatatttacccggccccatctatctagcctttcttggatttttaaaatcatatcgccatgttgctgaggactttgtgtcttgcttaggaatctaggtggcagttttcttagtccagaaactagcaccattgacacacagggtggagacgtccgacccaggattaaacaccagaacaagtaaggaagtgtcagctttgaccgggtgcccattgctcattggaaaatacgaagtgtgtttgcagaaagcacgtgttgaaccttatatacttacacctctgtgcggcatgagatccacttcgctgccagcttcccacctggagtgtgctgacctggaactgtaaccaactacacacacggagcttggcttatctagcctccgcctcagccactgctaggcttctcctataagagtgcaggcttttgcttccgtttcatccctaagtgataccacaagtccaagcctcgattcctcgatgtagaaccatctgttgactttcaacagcttagttttagatggaagtttgtatggtccactgaagctgtcttatttagggtttctgttgctgtgtagagacaccatgactggcaactcttataaagggaagcctttaattgagctatagttcaggggtttagtgcgttacctttcatggcagaaagcatggtgacgtgcaggcaggcatggcgctgaagtagtagctgagagttctacatctgcaacatccccctcccccaagacttcattttaattcctagtcttttattttcattgttattaattttatataggtaatagtaacgtttaactttattataaactaaaattggctttgacttgtggtacagttgcattatcttaaagctagacaatctgtgttattaacatccacggaggtatttttgtgggtaggcagtaggttatttttagaaatacttaaggcagaggtgcttagaatgtgtgaacacgagctggcgggatagctcagtcattgagtgtttgccatgcaagcaggcatgggatgctgagttaaatccccattgtccatgtagaaagccagaagtgactggtgtgtactctggggaaatagagacaccctgcagctcactagccagctgccattaggcgagcctcaggtcccagtgacagaccctgttttcgtcacaaaaccacttagccttatttttttagattgaaagtcgtgtgtcatttgttcgcactatagagggcttcttctggtagtttcatttctgcagtgtcacagaagcttcgctctgagcatgcgctttatgtctgagcatgcgctgtacgccgtaaagccacctgtgagctgtactccctgctgactctcaaaagaaaactcaaaatttcctcgtccttgtctagaatccgcacatgccgagcaaaaccagcttgctcgtgcagcagaatcaatgtgcctgtagtcaagctcttgtctaattaagaaatgatcttggcagctttcttaaagagccggggtgggagtgtatgtggaagccgaatgttgatgcggatggactcctcggttgctcttgaacgtataaattgttctttccactcaggtttctcttgcaaagccaaacctgaacttatgaggccacagacagctgggggaagtggctcggtggacaaagcagttgccatgcaaccatggagcccagagttcacatcccagaatcccaagtcgaaaagtcgagtgggcgtggtagcatgaggtctctcatgcctgtgctcaggggtcactggggtcaagctggctagcttggccagctaaaccactgaactccaggtccagtgagagtctgcctcagtaaatcaagagcgactgagaaggaaaagatcaggtggtcaggcttagtggctaagtgccttgttgaactgtcttgctagcccaactggccgttcagggtaaaaaggtctctagtcaccacatatacagatcactctgctctgtgataggatgggctcctggaggactcgcagctgtagccaatgttccgattctctgcccttcccaaatccagcgagcacaaagcagatacttgtagaccagagaccagccagaccctttcataactccagagttccttgggttgtgtgacctgggttaccttggaagcttcactgccctttcaacttctgtccacataaggatctatgcgagtacacgggcaaagggcagatattaaaaacctacgaacatgagtttcgaaatggccaaaaggtgacgtgcttcttgcagtcaagaagctggtatttgccagaggtcatttgggttcacccactgcagttacatagaatcaagggctgagttctggccaatagctagtttgggccatctgcctactgtccgccagcttgatagcaaagaggcggagaccagtgttacacaccttgttagccttggagaagccctccacctgtcagtgcaaggcagaggaaccacctttgtaacattgaaaggtggtaacccaatactctactctgaatggccgaatccaccgcagccagcactggctgccttctgactggtcgtgaaaagaacgagcagcttgctgtctagtttcaggactgcagataatgtgtgtggataattaccagtacatcatgggccttttaactttttgtttgtttgttttgttttttttcgagacagagtttctctgtgtagccctggctgtcctggaactcactctgtagaccaggctgacctcaaactcaaaatctgcctgcctctgcctcctcccaagtgctgggattaaaggcatgcaccaccactgcccagttttttaaggctttttttcttctttttttgccttttaacttttgattgaatcaactgaatggatacctgcgactccccctccttactgccccccagtaagtaattaaatatgtacaggagccccccccttccatgataaatagataggaaggagaaagctaaatttttttttcagaaacacctcctgtagaaggctaataagaagcgtcctttgttagcatctctttctcagtataaaggcttgaagtgggtccctttcacctgagctcagaaccttgtgactttttgtgctgatttttttttttcagttgtatgtgtgggggagagcgtgttatctgtctgtgtgtgagtttgggtgtggaggccagaggacaacttttaagccttccactgtgggctctacagctccaggtcaggccatccattcatccagttcgtgcttttattttaccttgagccagcccctccccgctccccaacacacacacacacacacacacacacacacacacacacacaaatttctttgaataaaatattccaattactgcggtacagtatcacaccgttccattttcaggctgatcaaagtaatcggctttgtttttggcaaacccttgcctaccgaaacacgttctgccctgctgacttgggtgcccttttgactttgctggcagcggaggaggacccattagaggacaggctgtgcattccttcacagcaccgatgtcagttattgctgtccacgatgtctctgctgactttaatagtcacactgagaaaatatggtaggtggtgttaggccccaaaggagtgggcacatagacagtgttttccggccttgctcatcagtgcccagtagaactgctgaagctgcctgggaagccacagcaagcgttccacaaatgttaaaaaacaaaacaaaaagctagtggggttacaggaacttgctggacacttttagcaaccggggaaaggaaaagccatcattttttttaaagctatctagatttagaatctagtaagtttgaagcacagactcagagtcagctttagcataaattatcccacccactaatatattttcttttctcttaaaatatgtccccagtgcaagattctactttagaaagaggatcttgctgtgtagccagccgtggttggcctggaactcactttgtagaccaggttggctccaaactcctagatctacctgctctgtgtcccgagctctaggatcaatgggatggtctacacagcaacatgatagctgttaaatatccaatatgttatgtatttatttgtataacagagagctacttatgggaagttctgtgatataagactcagggcattcgaaattaaggaagacatctacaactcattggaatgttgacgaggcgacaagcatggtgacttagtacacaaaagagattaagtgctctagttagtgtgttaaagagaaataatagcacagtggtaatgaataaaacaagcagagaatctgaaggatggcaagttagagtttatgtggaagtaaatagaatgattggttaatagcaaaagattgtgttacatatagaaataccaatttcttatccttgtataacttcctattgaattttttttttttagatagaggattttagaaaagctagagattacacaacaaatcagtttacgtaagaagacacagacacaaatatctgtgcagtgtgcccattaagttatgtgttgtgttttttgtaggtgcacaggtgtttgtttggtgtatataaatgttcctgtggtcatgtgcatatgggtatttgagtttggtggcacatattctaccgtgtgtgtgtgtgtgtgtgtgtgtgtgtgtgtgtgtgtgtgtgtgtgtgtttagaagcccagaggtcaatcagtgttctccactctacatttcgttggttttcaagacagggtttctctgtatagccctggctgtcctggaactcactctgtagaccaggctggcctcaaactcagaaatccccctgcctctgcctcccaagtatgtcaccatgatccagcctctctgctttttaagacaggtgctcactgaaccttgagctcattgaggggagcgatccacccatcctcctcctaccccacctgccaggccctgacctcatagcccaacatggtgcctgttacatgggaagtaagggtccagaaactcagtccctttatttgcccagcaggcacttaacctcctgaggtaactcccctgccactctagcagcttacattacatctcgcccttaagtagtcaagacctcttcctgtcggttgatcgtggaaaacctctgttgtcagttgttgacttaatgcatgcagaggccttgccctcaactgggacactgctttcccggttttcttgtatagttttccaccctgtgaaaatgtaattgttttatggatgaacatggctcaaggaaagatatactttcttaaaagagaaaaaaaaaatggtttccagaggtgcttttcagtcagtcgtaaagccaaacattaggggctggtgagatggctcagtgcgttaaggagcttgctgacctccatgtaccctgagattgaccctgttaaggagcttgctgagttccgtgtacccggagattgacccctggaagccaggtgaaggtgggaggaaagagctgactttgcaaaattgtccactgctatagtgatgtgtgggcacatgtgggaccggttggtgtctgacgcatcctgcagtgtgtgttccgagaggggaagcccctggggatgcgaggcacatcagccttccagttctccaggggaaagagactgagtttccttgtgcttagccatttttccttctgagcccccccctccccccaaaacagcaccgtctgtcctaactggagttctgagaagcttttctttgaagccacactgaagaatccatcccagctacacaccactcatatcccaaacatcacctgacttgcaaatgaagaagagattaccgctacatctcacaaactaaccgtacaccagagctgacagataaagtctttcattctcaaaagaaatggatgaatgcttattttctgagcgatcttgacatttttcttattaggaatttaccctctaggaaacctttgtgtctttttatccccccccccccttggttttgaagttataaataaggggcgggggagggacactaaagtctttgtggaaaattatgtgaatagatacaaagataaaagtctccttgagcctaaactatgaagataaaaggctccttgagctggctgggaacgttgtctggcaggtctcactccggtttcctcgtgagaaaccgatgaccagagtgcaaactgaaggaacagccaccaggcaaaatcgtttagctgtttgtatcatcggtgcaaagtctgcctgcggcattgctataacagagagaaaacgccttcgaggagccagaaccgggatgaatcactctttctcccacttctaccaccttgaatttgttcatcccaaccaacacctggtttcttcacaattccagcccttcaaaaacagggcgattcccatagaaaccttcttatcagattgacttatcttgaacatgacatcatccccatgctgacgctgtagagaaacagggagcagagtgataggaacccctcctgggttgagattgccattttgtgcaattaccttgtgaagatggagccatcgcaagaacttggaactcggctgtaagaacttgaatcctgtgtgggttgagaaagagggggtgtcttggcagtggtgtctgcttctttcctgtctgcagatgcatcttcaagcatagctccaggtgaccttccgggcagagaaggcttgcagtgcttgtacggtggaatctaaagcagccttttggcttgctggaccactgttccacggctgtgagactagtaaagtactcagaatgaaggggggatgtggggcctgtgttggctgctaggtaaggcctagctggatgtagagtgcttggaataattttttacagcaaaggaagttgagctcatcagagcataggctctaccttcccctcagtagacatatttgtgaggctgtttccgagtctaacatcccttcgagttttctagtttctcttaatatctttcttagttttttccctgtggccgcttcattgtatgtcccatcagagactctgcagttgtgcttaggttaagagacttgacattgataaggaataaatggagccagtgaaaccttgtgggtccttgaggtcggagccccagtctaggtgtggtcaaggatgggctcataggcctgtagtaattgcaagaaccctggaagggaagcaaggggacaagagtcagagaagttgacatggccacaccagcaggggttggggacaatatgcttggaagatggagatgaggcaacaaaagcccaggacttctgtgttgtgacaggcagataaacaggctcagccaggagccaccaggaggaagccgcctttttttgactcccttgacttaaaccacgagagacttaattcaaacttgtaatctccacaccgttatattaaaaactcttgcctaaaccaccgattttctttgaaacaaatacaatccaagtatgttgctgagtgagcgctcgttccgattttgtttgcttttaggagtaattacaactgagagtggggatgcctggtgttatgaatatcttggcatattttgttagtttgtgttaatcgcacacaataatggttttcgttgtggtgctgagcgtttggattttgaaggagcaatgtgaatatctgaataaaaagtttgccattattttccagaaaaatcaaatccatattcctttcctggtataatgggccataatctctggttagaaacatgcttgagtcatttttcagtgtgttagcttcacgggtactgcctctttttgctcaagcttaaattcccaccgtgaggtaaccttcattgctgtagagtcgttttcccctctgccctaggaatagcaacaatagatagcatttgctgtgtttcctcatggtgccatctcacttttcattcttgagtttttatatcaaggaaaaacttcgtgatgggtgtatttccttagctagccatcgccatgggaacgacaccatgggaacgtggtcccctgcctttactttacttctgctctctgagagacaacataagaacaaaagcaacacgtgtgggtccgtcacaccccaccccaccccataccctccactcccgtccttgaggattgagaagcactaggcagacagggatgtgttccagcccatttatctagctgtctgtggctgtcatttttctctgtcttgatttaatctaagaaaattctgcccaaattgactgaatcttggcaaatctgaaatcccaattccggttccattgtctggatttgtctcttttaatcactcatttccagtcgtggtctctagctctccgacaaatctagttagttcttgtaagtttattacgttttttacgtgggtgtttgtatgcctacgtgcatgtatgtgcagttacacacggatgctggacagtgtcggatctgctgcagctggagttacaggtggtttataagtcatgctggaaactgagcccaggtttctataagagcattaaggtctcttttttaagtgctgagccatttctcaggcctgtcgcctcgcagagatccacctgcctctgcctcccaagtgctagggctaaagtcctgtaagttgccactcctagcaaggaagtagacttttatattttactttaaaatagtatctggaagcttattaatccacaaaggaaggctgggtgatgctggatttggagtcgtttatttggttggttggtgcaaattcacgtgcatgcgtacctgtgcaagtcagaggtcaacctccggtatcagttgtacagaaagaagctggccaccttctttttgagtcgtggtctctcattagcctagtgttcaccgtgtaactagccagagagctccgggtcttaggatgcacccccataacgggctttttatgtggaggctgtgcttgaacctcctgcttagatttcggctgaggattgttacatctgagagcatgctctctccctctagtcctgttttcagtgataaccaggcaccccgttttactttttatgtaggaagcattgtttgctgacatagacagccttatgccaggtcggtgcctgctagggctggacccgagtgggaagacgtatttgctccgtttcactgaatgtaattacactttggcctactttaaaatagaggagctgaactacaaaatcatggttttctcaccttaaatacataaggaaaacctgtgatctctaaattagcacccgggggaggggctaagtcagagagaggtgtttgtacccaaagtagctcagaagtcacacattcctttggttcttgggtcaaaacagaacaggcggaagcaccgcccctttccttagttagccagcttcgcctttttatcttgaagcctctattaatcccagatacatttctattcacaaacttctttttcaggatttcgaagcatgttaacaagcacttaacaaaactactgaggaaaatctgatcgctttcacaggggaaaaaatattgtttgtttgaaatcttagaatttgcaaaaatgtgacagaattcagccatcactggaacatcaagaatacaacctgagaacttgcctcaagaaaacatcgtttttatcttcttatctaattggaaacatagacagcgtgtggtccccttcacttcccaagaccccaaccttccaaactctactttccagattggcaccatagcttgggtcaacatctgaactagagacatcttggattcccttgtagtgcaagccctgtctttttgttttgtttcgattgttcctcttttgagacagggtcctggctgtcctggaactcattctgtagaccaggctggccttgcactcacaaagatcctcccgtctctattttctaagtgctgaaattaattgcatgccccacaatgcccatccggcatagactcttttatattttcttttctttttttttttaaagatttatttatttattatatgtaagtacactgtagctgtcttcagacacaccagaagatcttgttacggatggttgtgagccaccatgtggttgctgggattgaacttcggaccttcggaagagcagtcgggtgctcttacccactgagccatctcaccagccctatattttcatacatatatatgtatgtaggtatttaaaatatatatatgttcagttgaatatatatatatatatatatcaactgaactgggggatgcagagagctctcctctattctcctctggcacattggttttcacttccacaaaatttttatttatttatttatttatttatttataccttggacgacatggcagccataaacaaggccatttaggcagaacataaaagaccgaggaaggaactcaggccgtctttcccaggtgctcatcagcggttatccagtgttgaaataccacccacatgaaaagttctttcattggaaaatcaacttgcttgactcttggaggagggcaaatagctgtcaggtttcagtgtaaacactgaggaggggcaggcgaagcactggtctcagaggcatcccacaaggtggtggtgttgtttttgttttaatgtgtttgaatttatgcaagatattcagttatgctagtgagcataaaagcccacctccaggattgactagggataaagtagaaatgtagaaaaatccaaatctctaagtagccgcctaacagtttatttaactagttatagactaatttcattattattcacttttcttattgataacagaaaggtaagaaacaaaaagtgtctgcgtgtttaaaaaaaaaagtccaagcacaacatagcaatacacattaggggtgtcacacacacgtgtgcatgcgtgcctatgcccgtgcctgtgcacactgcagaggccagaggagagtgatattttgtgtcgttctccacattatttcttggggctgttatttggttgatttttgtttttgtttctgagacaaattgtttcttgctgaccagaagtttcccactaggctggctaaccagagggctcttgattgcccaacagtaacggtgtttcaggcacatgtgcccacgtgaggctttttacataggtgctagagctttgaactcagatctttctcacctgttgacctgtcttctcaggccccacattagggatttgttgttgttgttttcttttgttttgtttgcctaactcttaactagtttggtacctagtaatcaacttgtttcaccacccagaaagtacttactaaacacccacgaggaagggttgtgttgtgtgatgtacagtaaggtttattaagcaaagtaactatgcgctacctagaaattacaaatatctgacaaccaagcattaccgtaatcgcattgtccccatccctgaatgcctataggaaaatggaaaattatcggattcctattgaagcatcagggcattagatccaccctaaataacagtaggccagtggccagtcagtcacctgacttcagcggtgcctttaccagagaggtacgggtgggaaagcccgttctcagtcacttcaagggcccagttggccaaagcatcgaaactatgaagtagttatatacggtttgcagtgtgtgttaatacttcagagggtgactctctaccaagggagtcttaagctttttactctacattttcatacacacaggtaatgtactatgaatcacatcccttccatcatcctccttcctcctgttgcaccaaataaatagtctcctgtctgctgtcaagctgcagcagccgcctcttcctcctcctcctcctcctcctcccttgctttcttcttccatccgactttcacacgtgagaaagagcagtcttcaattgtctttctgaatttgcttctttcacttgttattaagacagccagttttatccattctccttgcaagtgccataattttgtttttttttacagaagaaccccatctaactcaaaactcacccaaagcatggtttgcatttcaccaaagatgaagaaaaggctgcctggagcacttggtttttgtaatggctcttaagcagatgtcctccacatgctgactgtctgggactcacatagagcccgtaacagtccgtttctgactcccaacctttttggtattagccatgagcctttagggaggtcttgatcattgcatgcagtgacgatgagctactgatgccatgatccttatatcctctcttgtggcgtggcctctccctagactctacttttaagtttatttataaatcttcaattctgagccatggtctgattgccttggaggtctagttgttgagtgatgtttcctcagagagctggtctcacatagctcagggtggttaagtggatgaagctggctttgaactcctgatcttcctgtttctactagatgttagggttgctggtgtgtgcccccgggcctgaaattatagaaggtttttaaagaaaagtgtcaaactacttctctttggttcttgaagcgcattttcctctggctgacttagaaggatatgacatcctttcactcggttgacacatgattacaagaagttcaatccatgtatccaaaaccaaggcttgtgactaataaacaaagctgaggggtgggagagacggctcagtggttaaaggtacttgctgccctggtggaggatctgggttcagttctgggtacccacgtgactgctcacaactctccgtaactactgtatgcaagcaaacactcagacacgtcaaatgaaaatagatcttttttaaaaatgaaaagtcatctccaggaagtgttttgagcattctcaaagaagcagggaggatgtggcagaacgtttgacagatctgcgggactcgggggttggagcctgatggtgtggggtgtgcaccttggccttttccctgtacaaaacagtgctgctcagttactcagcggtcactaagggagcccttccttcttgctaaggcatcagtcagtccgtggagatccagccccgctttcagctgaagtttactgagaagaacaggcgagccaaagggccacttgacctctaaccccatttctttttctcagaaatggaagtagtactttagtggaaggtggggtaagtgacaagacctttccctggggtgtccacgcaggaggcttacaaagtagccactgtgtggttgcagtaactcactacctttacctttctaactaaaaagaaaagaatcatgctgtctgatgctaccattggctgcatcaacagtacggttccctttctttctttctttctttctttctttctttctttctttctttctatgtcattgcttacgcatgggctttacaaattacgtatcttaacttcatatgagtatagaaaaagcgagtctccctttatgtgatctaataccatacccttgggagattttagagccaaaatacagtcatgtgtatgcatttatggatgagagtacctcttgaataataatagcctagttatattttccataaaattgccttaattttttttgcttcgtttttgagggaaaaatatttgtcagaggaggagaaaaatgtgccataatctatttctgaatagttttttctgcagttgtttttaaatatagtgctggggaaatacattttctctcagtgtccccaactgcccatttattcaatgtctattgaggacctatggtaccaatgtgctgtttatttgccctttttaaaaaaaactttgatagcatgagattgtcatcatgtattcagtaagagtctgcttcgtgccaggactaaggtttctcaacaagcccttgccgtgttgtggggtcacatttggttgattcctggattcatagctttagtgggtgtgactcgctaagtaggtgtatgtaagtagctctgtttcttggatacacagtgaatgccaacaatccgagcagtgagttatgacgcattttacctgctacattctttagttaatatattttggttttaataccatgtcttgcagcttattcgaccatttccctctaagtctagttgcattggcattacccattctgagagatgggtttctatctctagaagtgtgcttcaaggtttaaactatgtacaaggcctctcaagtccccatcccacccctctcagtctctcactctctctctgcatggcttggtatcatcaaactctacagtaataaatcagcagttagtgggacttgggggtcctgatatcttgctgatgtatctaacagctcccaccaaaatcgaacaccatcctgctgtgagtgggcacacaggagctcccacagtgaccaccctcccatgatgccctcatataggctccaaatacttaacacatacattttctaatctaaccatccatctaaaaatatttactattggatatttttaaatgtgaagtgtttttatgtttttagcatgtaaagaggtttctgtgtgtttgcaagagaggagcaggtgacgagcccagtctccatcttcttttgggtctaccttttgtttgtttcctggggtattttaaaacaaatctaaggtacactgtctcactcataaatatatctcaatgtgtatctaaaattgaacctagcagtttgattactataactgttttttttatatgtatatactagttgatcaataaaaaaattttaaagccgggcatggtggcacacgcctttaatcccagcacttgggaggcagaggcaagcggatttctgagtttgaggctagcctggtctacaaagtgagttccaggacagccagggctacacagagaaaccctgtctcggggggaaaaaaaatttttttttttaaatacatacttgcatgtgactgttgtgtccctcaaggtggttttaatctggtcagtccgggatccttagtcagggattgactaagtcacctagagtcacctacaagtcacctagagagaatcatttagtagtcctgcagatggctatcaggtgtgtgtgtgctgtctgataattatgcatttttactaatggcaatattgcaagttaatacttatctaaaaagaataaaggcaattacttcagtgaaatgtcactttttgtaccttggtgcttggtgctatgttgaaatttttgattctaggccctgaaaagaacttctgtctaccctgagcggtgttcactgtgtcctgttggcaaccgcaggatgaatttgccaatagaacatgtctccaaggggattaattttcctttgaagtggggcgtgtaactcaggaagatgccttcggtaaagacagggagctgttgtgagaggtatttcagcacgcctgtctcacaaggtttcgtccatcttcttcataggaagaagtctttcctgttttctgcgctgtacgctgcctttatctttggtggtcggcatctgatgaacaagcgagccaagtttgaacttcggaagccgctcgtgctctggtcgctgactcttgccgtcttcaggtaggtcgctttcgttccctcaggacactgctttcttctccgccaagagatgcaacccttgcatctcaccctcctctccccagccccagcccctttttaaattcactctgagcataaagtcatgtgcagagaaatggctttgttctgatcacatagactcatagacacatagatcacataggtcttctgttgggtgaggtcctgggccgtttcatttgctagcaaagttggtcattcagtaattccagttgcccaaatataaatatataatttcaaaacacacaaataagttgtgaagtccattggaagtcaggacccagggtcgtgggtgagccgttacgagtacttaatctaaagatggcactgagacagaaagccaaaccctggctgtgagtgcgtagacatcactagagcagggcatgttgttgctctgtatgccccaaagccccatctacttgcattccctatgcttgctgtcacgggtttttatacagcccgttcttcctgtgtgcctggcagagcccaacacgaagctgtggggatggcctctccagggacttcagtcaacctacaagcagccacattcctttgtttctaatatttggtgacagaagccatcacaaggctgattagcacacagctggagtccaggcaggtgccagaattcaccaaaagagctatcaaagtcacttgtcctatttgtgatttgcttttcaaatctttgaaagtttgtgactctggttgaagagcggggtcaatggggcggaaaatagggggaatgtaggacaaagcacatcactgtcatcttacaactatctttatatttggggggatgatacgataccttttctagcactaaagaaagatagatggtatcattaaaagcctcattagtcacctaaagcttacgaggatcactcgggaagaggattttcccagagtgccaggagttgcaccatgcagtgtgctggctgcctgcctgcgtgtgtgagaaccccaatggcttatcacttcggggcccactctttatttcactggatttggggaggctggggatttgaagagcgtgtgcttgggtctgttgctgaagacttcaagttcttctcctgttaagttgtaagtctctaaaaacccaaaagaaacatttccatttgtatttatactcccctgcaatataagcatgtcctcattagtccttattctaaagaggactttttgaaaaattgcttttccggtattcccccgcatctttttcctttgacgttctgtgatgcataagccgattaaagtacagtggtgccccatgcacctagcgtacctcatacagactcagctttcaatgggccatgtttcttctctatacctaactttccccttatccccaaatttggaaataatgcagactgaagctcttctgtgagagctgaaaaggcagggctcttttcaatgaaaggcacacagtcctatttcctcacccaaactaatggtagttctttgttaaatcttgaatttttctacctgacttatagtttcctttttatagtttgtttataaaaacctgaaccaagatgaggtctgtgtgttttcattaaccctccagatgtcctaggcttctcttctcctcccttcctcctcttctaatgcaccctgtgaggaaattctttgctctgtatactttatctcagagttgtctctggcatggatttttccggattttagtcttttaaatcctgtaatcctgccatgtcttgcggggttgggagggggtggcggttaagacagggtttctctgtatagttctggctgtcctggaactcatggagacagagagagggaaaagacctcaactgacctcatttgctggctggtctggctgtattgatccaaatttcttggttctggacacatatttacctgttccccaatctcctttaaacaagtgtaagtttgctagctgtcatttatagctgccactcctgataagtacttttttggtttttgttttctgtttttttttttctgagacagggttcctctgtatagccctggctgtcctggaactcactttgtagaccaggctggcctcgaactcagaaatctacctgcctctgcctcccaagtgctgggattaaaggtgtgtgccaccactgcctggcagtcccaccatgtcttataagttggtgtattatattcatgttaaatatttcacaagactttctattataagaatcttatcttcacaggtgtcttagttagggtttctattgctgtgaagagaccactatgaccatggcatagacatggtgctggagagggagctgagagttctacatatagattagcaggcagcaggatgagagaggccctgagcctggcttgagcatctgaaacctcagaacaaagcagatatatttgtcttttttgaagaatgaatgtataaaagtttcctctgttgaattagatttttctcagtccattcctggagcattggacagtcaaggtgagggagaagaaaacagaagtcatattacctgacacacatgggttgtgtcaaatgttaagtcacagagtgatacctagcatctgggcaaagatagatgaagtatctatgttacataaatagcgaatgaaaacccaacgctgccattgataaattaattcttctgtttactccacacccccgcttctggatttctgcctgcaggaagacacctgctaacattttcataactaaacacaccaacgtcttgtccgaagaataacttgctccccacccccaaccccttggagcccaagtaggtgttaaatgttccttttctaaagttagtaaggaaattaagggaggtgatttactaacaactgttttacgtttctttataaaaggggatacgagcaattgaatctagaaacaaaagagttttgagtgtttccaaggaagtagttgttagattaattaagtaaatttgcagtgtggtcttgtggtaggataggttagcgatttcccagctgttatacgaggcatttactgaagacaaagtgggacatccgctctgcagagagagggcacccaggctctggcctcgtcgcaagcacctctgtggacaggttgctgtcttgtaatgaggtcagtaccttcaggtcatcctcctgtctaccgactcatacacacaaaccccacagagcagggctgtgtcttcgcaggaatagcctctgcttatagcctctccatgttttgcaagtagattacaggttcccagcctttgctggcctatcaacaggaatgctgcccagttgtagttgttttagttattgtcatcgtacggttatctagtagcttttaaaaatttaatttctagttttacaagtagtctttgttcatgaaatcaaacaaaaatataaccaaaggaaaaagaaaagcacacatacagtcttaaatctcattacccacagatactcttcagagatgaatgttcttccaggaatcttttgtcaccacctaaatttttaaatgtgggcagtgacattgagttccacactgatgtaagacagcatagttctcagcgtgctttggatcatttactgaatacctagcaccgtcaatcatctcagatgggctgaaatagtgtgtgcctcttctaaagcagatggcatgaatttgcaactgcatcattccatagtggttattttgaattaaggatatagctacagattatggtgtttacctcatcaatccctaaaggctcctgtttgccacgattttgcatggtgtgcatgcatgcgtgcgtgtgtgcgtgcgtgcgtgtgtgtgtaagaatttgaatttcttcagaagcccatcgtaacaaaggaatgaatttctatgaaactgccaaattctgtattctgaaaggtaccagaggacacttgacggccattatcagtccgaagcagccacggtcatctgtcagaggaaaacattaaaatgaacaacatgagtgggtgctagatggtcctgttgaggcgacttctcttagaaataaatagctgtagttctgagaaatgagccttccttcttccaggagctcacatgtcctcagggtgtggacgtgcatagaagactgcaggacagcagtgggctccttgctgtctagaaacaaggctgttgctcacactacacttctcttgttacatcaccagaatttctccttctgaaatttcccatgcaaaacatacttgcaggccaccagcgagcccattcttttgcgctttcaagctcttgtgcttgactgtttgggatggtatgtatggatagtgggatggtatgtatggatagtgggatggtatgtatggataggtgcctgggtctcccttgacttggctatgacctaggaagcaggaggtttttcccttgcaggatagcaattgtttttgccagcactacctaccagtggatgggtttgcttagttaatagcaaactccgttgcctaccatttgcagtggaaacctcataagggaaaactggtgcacactccttagtctcataactaaattattatccctccttgaggctgtggtaaccaaacaacacccactgaattcattcctatttcagatactgctcatactttccagagtcctaaaacttagaaccatatgtgtgtaattaaagtgactgaatttttttttaaaaagtttcattacttgcacaatgcaagttattaatataagcagtggatttctttgatccccttccccctcttttttcccatttgtaagggtacaatggtgtgtggagaagtttctcctcccctccccacatcatggagatctgaaaagcatccgtaatggaacagacggtgtgctcaggtgactgaaggagcagggagaggtggttgttcactgatgccgagttttgtcgggctgaagtagaaatcctcctaatagtgtactagtgacttgaagacgttaggaaccacaaggcatttcagagtcaccttatttgtaagaagcagtgtctgggttctctgaaagcatttagcttcaagttaatctttatactgggtggattaaataaataaatataaaaaccaatgcttcagaaggtgagagatgagctgagaagacccatctaaagtgtcagagccatctcaggctccgatgactatgagactccgaccttctgcctcttgagacttcacgtttgtttgttggttggttggttggtttgttggtttgtttgtctttctgagaccaaactcattttcatcacaagattaaaggaattgcactagagtgtcctctaatctgccaattgacacgagagagagagagagagagatgtgtgtgtgtgtgtgtgtgtgtgtgtgtgtgtgtgtgtgatcttttgatagcacagctcctttagttgatagtttgagattattcaaagtcaagaaaaaaacatgcgctcataactcagtatctcagcttaaatgcctttgtctgcttccagactgtggctgttttactgggcttcttctgcctgcccttgtaatgcattgactgttcctttcatgttcaaacactgaggtagggttactaactgagtgggttctaaagtcagctccaaatcgaggatgccagcttgcttcagggtctccagaggagtcccctcctctggtcctcgctacaagaatgctgtcaccccctgtatttccagctgcttccccagaaaggcatggtgctcaatatcatggctttcgtgtgtaactggacaacacaccttgcagttagtatgtggcgtccttatgagtagaacgtggacattatgggcacagattacatcttaaagaatcaagggtggagctttgtgtgatgtcacattcaagattgtaatcttattgtggaccaacagtaacagattgactaggaaaaagatgtgccacgtttatgcctttgtcttcactgatggtggccttggcgcatttgggttccgaggcaggcggacatctgaggctggtctacagaggaagttacaggtcagcccaggctacacagagagaccctgcctaaaaaacaaaaagacagattcttcctaaaataaatctaaatctgtctcccgatactttaaagggtggcgttctctgacaatgaacagttggtctgtctgctcagaagttctccttgaccaaggatctcaggatcaactgaccagcagctattgtctaaatcctctgctcgcatctccaaaaaaggtgtaggctcttgcatatgttaaagtagaaactttagaagtttgactttaacccgagtttctgaaactcactacagaaatccattccaggcttatagactacatataggtgggctatgtgtctgcattcccgtaccctgtcttcttcatagctgttcatacaaggaagactaagcttgttgtcaccgttagctttcctctaagcatttcaccctaaactgagtctatgaaataactcctagaaagaggggaaagtgaatagcagaataaaaaaatgactaacaatggtatcctcacagggaaaacatgacccgccaaagttctagctaagcaattgtggagtgtccctgctagaagttggctcaggcttcctctggggctgttgtggtcagctttttgatagaattactgtacatttcattttgactcccgtgacgtacacagctgctgcaccctaatgagagtcccgagttgtgttggctttggattaggaaattctagacacagctcgcctggctcctttgacaggaaatgctgtgagaggctggtgattttctgaccgataatggttgggatcaccttagcctgcctgtgttgtagttctggttttcttaaaaagcaaaccccgcgatatgttctataaacccttaagtaggtttatgacttaaaactgtttaattgtcatccatgtaatgctttttctccaaagggtggggatctgataagaggagagacaatctatttcagtctaattactgagcatagaagaagagatctttaagggctagcgagatgagaagactcagtagtttagagacccaagggtctgatgccctctggcttctgtggacatcgtatgaatgtgtgtgctgcacagatactcacatatgttcacatatacatatgtaaataaaaataatctttttataaaattgtcttttaacaaaacaaagtccccagaattcttttcgattggaagaattttgtagtgagaaccacattgagagacagacagacagacagactgcttttcaaaattatttcttccttcactccaccaaccagaagttgcaaagtattgtttcttcatgcaaacccatagctgcgagccaagtgtcgcaatcgtgcctgcctctaacaccaggaaggaaaatggagagatttctaagccaccttgggcaacacaggaggaccctgtctcaaaaattttaaaaagtaaaaaaaaaaaaaatcataaaattacataaaattgtaaaagtggttaaggaactgtatgagcacagtgggtgtccttgccgtgacactagtgacagtgaagacatccatccattcagatattattttgcagaacaaggagccttgtcagcagctggcctggggactcctctattgtttcctgttttggatcaagtccaaaagtgaaagtcattgctttttgcgctgctgagttgcccagctatttgggtgactctgttctcttactagaggacccgagtggaggcgcatgctcggtgcgcgcacggtgtgcgagggagcgagcgcattttctgcggtaacctctcgtgctcgggctgactctgtcggctgcagtgattgggaaactgctttgcggcaccggctgctcagagcccaccccacccaagccttctgcagaacgtacagtacgggccaggaaaggcagtgccgaagtggagggaggaagacgtcttccatgtttaatggggaatgtttgctgttccaacacttgtttttagcctaatttaaaatgaacagctcttctctgttccaaacagagaaattacaggctctcttggaacttcctaacaaccagtttatacaatgtatgccagggtttttatccacaccatcctacaaccagcctacaaagactatacacaccaggcttgcaacctttagttatggcaggcacgtcctttcgatatgtcagaagtgtttctgaactgttatagctcaagagtaatttttgcataagaatagaagccaaacttctagacatgtagatctatctccgtgtaactttgtgtctcaaagcataattgtaaacacagcaagtctatgctaacagccattttccatcctaagggggttctttatttgaaagttgtggctccagtggctgttttcgcactaccatttaatggtgacatcggtagcattgctgtgcttcaccagctgtcatggtcacagctttgtggctccagtggcagcacactaatggagtggagtgccagaacttgaaaagcagaggcaggaggattgcaagcttcagggctgactgggctgaacagcaagtcaggctgtcagtgtcactccatgcactagaacacttgtgcaggccactgtagtagacccagggctcaccccagcaccgttaccacccggtcacactggggacttaagactctcctgatccacaggattgctaaggtgacgaccatggatgacaggcagaaacttcagacactgcttcctggttgcaccgttgtggctcagcttggacaccagctttgaaattgtttcttgagtgtggtttatgtatggggcagggcacacatttcatctaatcatatgcagaagtacatcactggcagagtactgcagaagggaaatacgtgagaaaggctatagacagggtttctcaagccctgacttaaggggcatttacataacagcatctgaatgttaattaaaagtgttttctggattctcccctcaagcctgctacctcggaacctctgatgaccaagcctaaacatctgcatatattataactgccgtggtttactctacgtcacaattccatttcattttagaggctaacatcctctctccacatcctcagcatctcctttcagcatccaggtcaagccaggaatccccatgtgtcctgctgtgccccagcacaatctggctgggactctggcccacttggcatgcttgtctgtatccctaagcttcctgttggtgggctgacctctccagtcattttggccccctctgtgaactattaactacaggccttctcagataacagcactggtctggttaactttcactttagggagtgactttttttagccagcttcctggttagcctaaggccatcttggcagagcagagagaaacaggcaaccctagagcatggcggttctctctagtgacttcctgagcgggcaattcaatatctgagtctctgcttcatctcagtctacattttctttcggtggtttgtcttgcctcaaactcaatcaatatgctctgaaaagccgtatgtgtgtatgtatgtatgtatgtatgtatgtatgtatgtatgtatgtatatttttaaatggtcaacttgtaaagaattccttacaagttaattaatcagaaaataagttaataattgaattagttcctcttgtggaggttggcattttgtgttgtggtatatatatatatatatatatatatatatatatatatatagtctctagaggtataaaaagcatatcatgtccctgccttgcttaaggccagacaatgctcaagtaaatgatttttattgctgttaattattatgccttataaattactcagaggctctatctacacctgtggccacaccaatctgcgaagccatatctcatccccatcccagtacaaccagccttcatggccttggactggcatccccatcttttctgctgtgagacttgtctgtgtgttcatagcaaagccgtggcaggtcaggctcctcctcatgagtccatttatcagatcacctgtcacctccctggtgtctcatcttgtcactgctgagatagctaaccaccacattttatatataagaaatcattaagttactcccgtgcgtgtgtggtgtgtgtgtgtgtggtgtgtgtgtgtgtgtgtgtgtgtgtgtgtgtgtgtgtgttagttgacagcagcagaatatatagactttgtaaaagagatttgtctttctcactttttaaattctggaatactaaagagaacctagcatggaataagcgtagagtgagttttcctaagaataaaaacccaaagagaaactatctaattaagccagagtttgacagtcagttagctgtgtactccccagctcttttccggtggaacactcagttcttgtgtgaccattgagttaaggttaactagttagggcatttacacataattgcctgaaaaaagaaagcttcattagtttgagatatcgttgttgtcgtcgacgatgatgatgagtcgtcgacgatgacgatgatgatgataatggctgagtctatgcacatcctgcaaagttgatcccgctatcataacaatgtctattacagcgacaggtctatccttagccagcctcatcattagtgcccatctcaaattcttcatttttgcacattaactgatttgtagattgaagtgctgagtcattatccagcagtttctcccaagatccccttgtaggaggctgactgaccggctgctctgtctctaggctgcttgctgtattatgctggtctacatgccctggttttgagggcctgccctgtgcctgtcagagcttcaatctatgtgtttcaggttttcatttctttattgctgggacttctgattaatttttagaagccagtttagcatttttctcaaaagcatatgctgctaattgtattgaggccgtgggaggatgggtgatgtttggacaaaatttggagatgtaccacaggctggccattacttttagcttaaaattgaactttgttttttcttttttttccttagtgtcttaaatgtcattaatcaagaaattcacttaactggttttttttttttggaagtaagacctcaaagcacaggaatttagacttggggatatctaaagacccttccttccttccttccttccttccttccttccttccttccttccttccttctttctttctttctttctttcttcttctttatctcaaccattttatcaaggtgaaccagtatgttcaccttgttgtgcaatcaggtttagaaatcctgcagaattgaaactgctaattaaaagaactctccatgtccacctccctagccctgtggcaccaccccccaccccctcccaaagtcaccactttccttccgtctgtctgtacatgtttggctgactccacaatctaagtcacttagtatatgtcttttcgtggtggcttatttcacttggcacaaagtcctcactgtttgtccacttcttagcttgtctcaggatttcttgtcatggctcgttgatacgtcatttgaaaagaccacattctgctatccactcatccactgacggacacttgggttaccccggcctcttggctgttaggaatgatgttgttggaacacttatgtgaagataactttttttttaaggtttcatttttagttcttatagacaaaactgtgggtcccaggtgagattgctgaattatgtgaccatgcattcatttttcagcgtttagggtggctgctataccatatcatcttctaagcatttccttccatgttacatcccctctgtcggcacacagtgggtctaggctacccacattctagacagttctacttgttttctgataggagtgcatgcccacctaaggcatggcactgatgggactccgaggggtcaggaggaggcagacctcactacagaggtgaagtgtccattagcacctctaggaaacatacccaagctgtcgtggaaatccaacagattggccttcaaaagtaaagtttatgaaggaaagcccagacatcagctgaatacttcgcaaagacgctacgtgacctaagtgagatcagtgggcctgagctaatttttcttcttaaatagacctattacgcacgttaaaacgtgctcatggtgcaccctgggtttctttttccaaaccactctgtgattccatcggggctgcaagttcttcagcccatcttatggatccacgaaagacattgatttggggttttaagtactacagagcaaagatgaccagccgtgcttccagcaaaaaggaagtcttgaagtttggattaggatgccagggactgccgcctggccattcacaaatggccacggagctgagccagcgttctgaagctgtaaaattggaagctctcagttgtctgcaagtccagtgataaacgtgccgcccgatgagctctgctagatgtctcttggagacaagtctgtggcagtgtgacatcaccaccgacagatgctgtaagggctgtgcatttgaacagtaactctgctgagctccatcccacatcacagctgaaaagctaagaatgagttccagttagaagggaaattcctacgatgtttatttatttttgttctggtgcccgagaaagccagacgaggacatcagatccctggaacctgagttacagacaatggtgagccaacatgtgggtgctaggaattgatccccagtcttctagaagaacagctttgaacctctgagccgtctgtctccacccacatcccggtgatagttaaaaataaaagttcaaaggctttttattggcatcgcctctgcttttcctttaatcctgcagactcggtgttccgaaggatctctgtcaggtatctagtgagtcagttatataggccaacaggccatacttacttgtctgtctcctctcaaggtggtgaactgagttaaataagaacagtcctgtgtcagatgtaaagggcccaggtgatggcagagctgggcctttctcctgtcatgttcatctgacacactgctcgctgggcccagagaacaatcctgctttctgagttaggtttctgttgctatgatacaacattctgattaaaagccacttggggagaaatggttttatttcattttacaagccttgggtcaacagttggtatgtgatggaactcaaagcaaacattgcaaagaggcaggaactagggtgggagccaagctgcctctgtgacttgctcggtttgctgttttttttcttcatcctaggaccatctgcccaaggatgaaaaccatccacagtaggctggaccctcccacatcaaaaggccatcaagagagtgccacacaggctcgtctataggccggtgtggtaggggcgtcttctcagatgactccagtttttgtcaagatgacaaaacaaacaaacaacaacaaccaccacccagtgtacttgtacttctatacatatctatctttttaaacatcagctaatgataggatttatgacaaatatctttctcctgtcatctctttccagataactgtttggtcagttgcttagtaaataaaagtccacactatgaggtccctcgtgtgggtggatgcctggagttgtgtgtactcatgagtttgccacgagaaataacatggaaggccctggagggaaagtcgacactgaaaggttacctgaggagagaaatcccactcgggtctaagactgaagctctcttccctctgaaaggaaggtggttcgttacccttgaggtaacttgtgtcctgacgctgggagtagtctgtggcagagccagggacagaggaaagcacatcactatgtccacaggtgaatgaatattttacagacacgccccctgcccggtaaaaatacttaaatatgggggaaagcaaaactaagctttttttttttttttttaatgaagagtatagcctaccatcgagtgagcatttatacttcatatttgtggagtggtcatcccctgacttcaccatctttgatatgctcatgatactaatgattcggttatgtgatgacaaaaatgattcctgaagaaattaatgtgctgtttgaaagggtggtcaagatctgattggcttttagattaatgtgcccaaaggaagaccctggatatgcgaaggagcagaaagttaatgatttatggctcccccttttctcgaggctgcagtaagagctgtagatagagcttggcttccagaggacaaccgcagcccattcattttaaggatgtgagaaactgagcaccacggtgacctcgaatcacctcttcctcctcccgctcctcatccccctcctcctcctccttttcctccccttcctcaccccactcctgcacataatggtctatagcgtgcttcaggaactctccccacggttgtcgttaatcatctcgggagcggttgctttccccctgcagctgtgtaagccagggaagcctgtaccgtagtttcgatggagcagggcaattggcgctggaattactgctgctctaataatctgctcctactccaagcaccatgagttttcctgacgagctaagttttctggagaaacaagatgactaaccatttttgtgattcacatgacggtttggtttggtttggtttggttggtttttattttgttttggcttttggcttcaacattccaccttcactgtaccctgctcattcatttcagcttctttctggttcatagaatcaggttttctagcatcctgtcactaatggtcgagttttgtttgatgttctcattataaaagaccagacacctgcatattgttcttctcttaggaaattgaaagtatctcttaggcctgggctagccttctcaggaatggattaggtagcattgtgttggtcgttgagaagataaatcagaggaagagaactcacccatcacaagacacagaactctcagacttcacatcctcacttggatgtctgtggctcatagatgggttgactccctccatgggttactgatggagcgtcatgcacaggctcatggagcaagaggacagtcaagatggtgtcttgaatgatcttagcctagagctagaaccaatagttgctcccaagattaagggctaaacttcttggtgtgggctttgttccaggcactgacatcatgttttagggcttgcaggagattttatcatcagataaaccgagagccactcccctaagttgacagtctggtgagttttcagaagcagctctgagctgtgagctgtagattgaagtggatgctgcataggaactaggggtccttgcttaggctagctcacaagcccctcgctgtctgtgtctttgcctgtaagttaggcacgataatgtctcttggagctaggagcttgcaccatcttgtggctcacatgtgagacatcctgagatgtctacagagtcaagtttgagcccaccacaactgaggctggcacggctaggactcaaactcaggtgagtttgacactttccctattggtcctgaaggaactgaagccatcggtcgtattacacagagagacgtccatgtgactcgtagggaaatgtgatagaagtttcagtaatgtaagatcctggtgcatttgaagacaaaaaatcctaaactgaggtctcagatcctatagccgtacatctatgcctgtggcagctgctgatggacagccagaatggtacccgttgccctcagacttatcttactttctccttgcctcctgactctgcactctgcaaggctgggtttttatcaagttagtcattcaaagttggccccagagtgttagtattttgccaggttcttgaaacaagtgggtcatttccaagttgtacactctagatgtaaggacctgctcagctatatttaacatgtcgggtcactgggagacaaggagttatagtatttaaacaacactcagacccttacctttctcttttatttgggggagaaaaaaaaagctgcttgtatttaccagtcaagggaattaaattgacatatcagaagttgaatcaaagccagcccatcctatcaaacaaaattcaaaacaactgtctaaagcaggagttctctggcttatcaagggagtggcgaatggagacagcagctgtacaaggcacacccaccatggtacttgttttctgtggcacattaggagctatttgcaaagcttctatgtactcttgagtcttttcccaccaactgtgttctgccagaagccttcaggaccaatggaatccatatggcagcttgtagcatttgcttagcctagaagtgctttaagtgggtatgtgctaacttatcagtcacttttagatgtcactacaaatgaaaatgaaccggaagtggtttcctcctcctcgtgaactgggctgaccttttccaccccacacttttcctatcacctgtcttcaattccacttactcattcccgtcctgttgcgagactgttgttcttcaaaaaggaagcaatgtttgtgtgacattacaactccaaaggaatcttttttttttctcaattatgaactaaagatgaatcccaaggactaaatatgaaggaaacattataaaattagaaatcagagtttcatcctacagagaaatctctcactttttatgttgctgaaagataaaactggtctaaaaagatgaaagaaagcaatgagagtttaaaattaattttccagtaccttccgggggcgggggcagagggtcttgttgaactcttgagttctgattatatgggccatgtcagttatgattcatctcatgtacagtttaatgggccttttgagccaccgtatttgggagattttccaagtttctaattgaagtatctggtttaatattccaaggagaaataaatgaatcaaaaggctgagagatgcctcagtgattaagagcactgtctttctttttcctgaggacccagattaaatttccagtcttggcggggaggggcgttgagacagggtttctctgtgtatccttggctatcctggaactcactctatagaccaggctggccttgaactcagaaattcgcctgcctctcccaattgctgggattaaaggcgtgtgccaccaggacttcagtcccagagggatccaacgccctcttctggcctccaagagcactgcaggccagtggttcacaaacatacatcaagctaagcatctatacacacgaactagtaagaaaagtttaaatagacaatcgtcccctaaagtttgacattctctaccgagaacaaagtcttctggagtggaagggctcggcccttgagctatgtgtctctggtagagatgacaggggtgtggaggtgaccttattccatctgacatctacagtctgaatcctctcctcgggtcaatatgcatgacagcagttgctgggtggcggttgttgggttttttggtttttttttgttgttgttgttgttggtttttttttgttgttttttggttttgttttatcctgtcctgggattgttgggtgtttgtcctgctatggatattgtctgagtctaagaacaatgtcagctcagattatgttatcagaaatattaatagccccctcctgtgttcataaagaggggtcagccattgccaagttttaacaactgacaaaatgtcatacacttattatgaaagaaattgtaactttgttgcaattacttttgaatggagatagattgcacaattactttttgatgcaattacttttgaatatacacacacacatctcccaaggtctgcaccaaaagtacaattacttccaggattagataaggaaattgtcttagggcgcgcacacacatgtgcatgcacgagtgcgtgtgttcgtgtgtgtgtgtgtgtgtgtgtgtgtgtgtgtgtttcacatgtctgtaccatctataggatgttaaggaggttttgccctccacatgagttcttcagtatctggcccttactgttaaatacttggtggttcagtaaatgaatcaggattttctccgacaatcccagggcttcgtcacgagcacctctgttgttgtttatgtttatcagtgatgagcagtcacccacttaaggcgttattgaaaatgtcagtctaatacacatttatttaaaaacaaagaaaaaagcaatattgactgtataggcctggagtacaaagaacatggttcttttgacagccttcccaatttagtgtctactagctattcctggtatctcctgtggaaattcaaaacacacttccttaccctgaatcgagaggccagtggtagcaccttagctaaacagggcagtcggccggccggcctcctcactgcatttatgcctcaggtggctgaccacacattctctctctctcctgtcactgaaaagcaaaactaaactctgcaagaaaaagtgtatgccttcagaaccagtagatagccaagtacaggatgagtgcattttacagcaggaaagaccttactgtggtggttatccagccccatgacccactgccgcccaggctctcagctcacctgcccctcaggacgacctttgtcagctgactaaagcaaccatgcacaagaatgagctgcttgtccctgccagcaacctctcttccaagatgttctctgggaaacgctcatatctgggctgcagaaatagctcagcggataagagcactgattgctcttccagaggtcctgagttcaaatcccagcaaccacatggtggctcacagccatctgtaatgagatcggataccctcttctggggtgtctggagacagctacagtgtactgacatatagtaaataataaatctttaaaaaaagaaagaaagaatgctcatatatgtccagttatgaacttgctagctgacataggttgtggggtttgcaatctgattgagaaagcagggagtctgggccaatcccggttgtcctcctcccagtcaccccactcacgacccctgtcctctgcccccatctccatccctgcttatcccatgggtcagaggctgctcagcaacatgctctcaacagcaaggccttcaggccagcagaacctctccaggaagagggcaaagagaatgacctgaacttcagttgtgggcatgaatagagtgtttccttacaaaaaggaccagtgatgtgcccagggagggacaggcctgccaagcctaccagagaagcgtggtcacggagccaaaaccgcacttttttttttttttgaagctgtgtctatcacacagcctctggaaggaacgaacgcaacttacagaggaaagggctctccttcaagtctagtttagtaatgcgtcatggcatggtgctgttagaaggaagagccacctgatctgacgtacacatggctgagatgtggcagaggcagagctagcggctccccaacagcggcattgtcacagctcaacaatacgcctttgcccatgaacacaggggcccaatggctggcactgacatagtccctcaaaagtgccactgtcctcagttctcaggcagccttattgttcagagctcagggaatgaggcttctgtccaaatatgagacaataatttgtgctgtatacttgatagcagtattgtgggtcaccgtgatgtaaaagattgtctaaagtagtccacccctccccagttccaactttcaaccctgtgaataactacttaacaccccccccccagctgaaatgccagcaaaatgtctgctgcatttccagacaatacaccctaagaacagagaaaccatttccaatccaaagcagctctcccgctccattggcttccctacacaggaagtctcccagagccattaaatccattgtgctaaacagttaacaactgagggggtacatttaactattaacaattaaaaattagccgggcagtggttgcgcatgcctgtaatcccagcccttgggaggcagaggtaggcggatttctaagttcgaggccagcctggtctacagagtgagttccaggacagccagggctacccagagaaaccctgtctcaaaaaaacaaagaaacaaacaaaaacaattaaaagttagtaataaattacagtgatgtccaaagtttggaagattgtcttgaacctgctctgcctacttgcagtcaatctggtagtgatagaatagagagacatctctgggccacatgggttttgggtatgtctgatgggctgggtatgatggagaaggctatagttacaaaatagacttatacagaaaagtcccaggtgtagccaatgtgtcttgtactacacagggtcccttgcttcagacttagcagaagtcattgggagctcctctactggtgtatggtgcaagataagcctcatgtatctagtatgtactgtcccggcagtaccagtgactggctgcacttttgaaccacaaaggtcatttcctcactgagtgttaaagaaacaagtcaattgaaagtcacatccatgtgccaggtttacctagggctttgggctgcaagtgatggaaagaaggtttacaaattgatttctgcaatacaagaagtcttgagccaaggggaactggaacgtagtctcgctcgccacctcagccacatccagaccaactattttgctctcctggcttgacttggtcctcggagctgccaaaggcctgctgaattgtcggacagtgtgtattagagagcggagaaacctttcccaacccatcacattggctagaacggaccacatggactttcctaagagaagtctctcctgagtcggggtcctagaactggtttatacgcttgattgctcctatactatacagaaagggtttgattttcttagaagagtaagaccctgggtcaccctgaacaaaggatgaggagtgggggaggggagttcttgattcttcctcagccactggatgacatatctgtggtttttttccaaagcagcagactaagatctaaaaccttaatttggaaaagttggaaactttcatgttaaagttggtggaccatcatcccaggaagcaaggggagagggactcaagttaagagtgaacatttccattatccaacttgtccaatgaaatcgagatcactgcctctactttcgggctgtagaggcatcctcaccaggagttaaacctgttcgagatttgaaagggacaaagagccagccttggggtgaataagcttccagagggaagagtactcaaaagccctgaggcagagaatgtgatgtgcccagcagtgctggcacactgagcagaacatcaggaggtgaaggtgatcgagcagtaaagaagccactcagagttgtgcgatccctggtcaggaatgtgggggtaggggcgttgtctagatgcagagagccactgaaggataaatttcatcactaaccaaaaagtgacagtgcctattgaaatgagggacactatccttagagatgctgcttcccgtcccgatttagacattaatcaggaagtcatctttaattccttaagtctcagcaaagtcaacttttaagttctctgtatgtagtggacaaagttcctggtcggattagctgagtgacttgtaactcttacgcaggaaaagtgttttctctaactcctcttggaaaattccattacccaacctggtgagggtgccacttcatcccatagtgggtcgtatatgtagctcccactgactgtaggaaggctgtggtatcttatggagaagagaagggaaggccaggacatctctccgtggagccagccatctctctctgcatagagactgtagatgccatcctgggtcacacacattaaagtttcgctcacagtgacatccccttgctccaaatgccaagtgctttcatgcttcacattattacatcaatgtgttccagaatgctcctgtttccttatcaggtcctggctaaaaaggggttttgtttgttttgtgtttatagtgtcgataagctttcctctctttgacgtttttatggaacatctgtgactaagtggaggcaaacctgtcaagccaagaacagtgttggcagtttgtatactcagttgggtggatacttagctcttctagggtgaatggaactcttcttagggctggtagtagagagaagtctagaaggtacttttgatgcaaacacagatgagcaacaggacatggccaggaccagcagcttggatcctgctgcaggagccaaggcatctgctccagatgtggagggagagttcgcttaaagacactaacagactttcagggatgagagccaacgggacttggaaagggactggatgcagacagagcagaggtaatgccaaggacgtagagctattctgtctcctgtcagtgaaattggtcccaagaggaaatagttccatctgaaagcccggtgaggactgagtcttctttccatgacctcattgtggagcacagagaaagagcaaacagtcatcaaaacccagtaccaagagtagtgctagctcctttacagggcgtttgaagcttgccccaggtaactgggtactaggattcttctctgcctgctatgaccagtggcagacctgccttctaaggatactcgtattagttatacagcccacattattggagggaagtatggcagaaggaccttaggtagctggcaatgttccatcactgtcaggtgggccaggctatacagcttcagggccacctccagtggcgtgctttgtctcgtcaaaggctttaccttgtaaaggttccagacccttccagaacagaccaccagttggagaccaggtgttgaaatgaatgagcttatgggggttaatttatactcagaccttgggctggacagatggctcagtgggtaagagcactgtctgctcttccagagttcctgagttcaattcccagcaaccacattgtggctcaaaaccatctataatgggacctgatgccctcttctggtgtgtagttatacatacagacagagagcatccatagacatactcagaccctaacagcggttaatggtgaaggtgaacttgaacttggtctcctgactgttgtctcttttctctcttcctttcggaagtatattcggtgctcttcgaactggtgcttacatgctgtacattctgatgaccaaaggcctgaagcagtcagtttgtgaccagagtttttacaatggacctgtcagcaaattctgggcttatgcatttgtgctcagcaaagcacccgaactaggtgagtgtctgtttcccctcccaccccaccccaccccacccccactgcagcttcacatacccaggacttactaagcatgaaccaagaaacacaatgcggagctctgtcttctgctggctgctgagaagctagaatgcctgaactctaaacatttgactgactctctcccacccctttgctccttgttgatgtcgctgtccattatgtatattgatgtctccatcaattcagtcacgcaagacctgtgttcatattctgatcctcataggaaagggttttaggtagagcttttggctactcttccttagtcctaggaagacagccatcaatccaagagtttttgaatgccaacttcctaacaatactaaaaataggccactctcagggatttataaaataacacacggtcccttctctaaggcccattaacagctgagctaatattaaaatgggagaaaaagaagaacagcgctacagtttccaagtcatggagataagcaaacgtctctctgcggtcaagattcagactcggaaatcaagctttgctttgggggcttctgttctcattaactgagctaactattggcttctgctgcttcattttatcacccctgagtctggccctggggaaagggaatgtagggcacctgctagacatgggtggaaattctccctctgcttatagattctcttcgcccttcggtggtcttgaaagtaagggtggcataggcttgccgaaacacgttaagttatgtcatggacctgttatgagtacggttttctggaaatgtgtccttattgctagagtaaggaatccacttgtgagggtgagctgagtgaatccgtgactagcggccaccagctcacaaactggagtatattcttcttgaggaagacaggtcacccttccatctgggattcctaatatttttagtccaagatcaataattatgtggctttagtggaactgagttgaattgtgaaatcagaaggtacaaatgttctttttttttttttttgtcttctttaaacagaggcgagagtgtgtagatttatgggagacttctccggtctgttctgacactagtgttttgtaagctcatcagagttcgtggtcacacatctgtgtagatactgttctctcgagtgtgttgggggagcagctgagccacgtgtcacaacatggtgtaaatctactgcctttgagtagctgacagttggattgatggctgtcttcctaagacaaagactaaggaagagtagccaaaagctctacctaaaaacctttcctatgaggatcagaatatgaacacaggtcttgcgtgacctagactgaatacattaacaatgatgtgtgtgtgtgtgtgcacatggtaggcatacacacaggtagcaccatgaacacaaattgaaaataagatgcactgatagagattctctcagtcagtgaatttatataagcacctaccattcagatataaatctactttacccagaattttataatatggtaactacagatcaagccccaggaaattttgtgtgactgtgggtgtgtgtttgaacacattggtgtgtaggatgcaggtatatacatgccataatgtccattaagaggatggagggcagatggccttgtaagctgagtccttagctttcaccatttgaattaaggtctgggggagggttggcacatgcctttaaatcccagcatttgacgcaggggtgggcggatctctgagttcaagaccagcctgatccttagaggaagttgtaggacagcccgggttagtgttttttcgagagtgcacaccatgctagttgaccccagccctgtctctacctcttcccttagacacttgctctacacatccagctttttttatgagttctgagaattccagcttaggtcctcatgtttcttgttgaggttcaccttgactaacatatagaaactctaactatatatagataccacactaacagttcgccactaaggccagtatggtgacatctgtcatccagttccagatccttcatgtaacggcatggaagttaaaatccttcatggaagtattttaatatctgactacactttcttaatttaacaatatggaacaatggtctccaaatactgtacaacttgtgtcacactggccttgtctctggggtcagctgctaagtgtcacgggtcaaaaaatccaaacagttggcacttacagagtgtttgcctatatgctttgaatgttaactcctagtcttatgcaattagtaagtcctaccattattatttgctaagaaaggtttattcattagaattacttttaattaagttttcttatccgtaaatcctaccttctctgcctttgtatgttctaagaattatggagtcctttatgaataccacaaagaaaggcttactctcacacacacacacacacacacacacacacctttctggacttttttatcttcccccaactgaaactgaactcactccccactgactcctcatcactaaactcttaatgagggtaataagggctctccgttccagtggaaacagtgaacttgtttccatggatttaaaggacttcactctaccagtgagagcaaaagagctggccctctattcttgataccaagctgccaatgtttggattctattaaaacctgctgagatttgcttctgttacaacttggaaacatctgctctgagtccaggcccttgctcagttgagtttattgttgttttgaagtgccaactcagcagtccttcagctaactcttccaagaggagctcagctgtctgtgacaagccacatacacagagttgcatcagcacatctctcggtggctgtgacagccttgggagaagagttgctattgacttccataggcacacagagatcttggatataagaaactctatggcttgaatgctagctgtctcttggctgaaaataactgggccaatggttgtaggactcgccataagcaggatcatgagtcagaggtaacaaagaaaaatgacaaagcagacaccttcaagaaatcaacaccctttgtttatacttggccagccccaattccataccaaggcatatttatttgctcaaaaaagataggctggccaacatcaaacccatcacagtctttggggctatcatgcatttcttagttcctctacagtttttgccatttctgcaaactccatgatttggtatgactcaggaaaatggaaaatgattctgggctgtttcatcagaagaactctatttgcatcaaaaggcaaggctctaactaaatagtaatagcaaagtccttggagtcatggttggaccttccggaacctcagggtatgttatgggaaaccagcatactcaatgtgtgtactaaggacaataactttggtatggctctgagtagcactgctcagaaccattgaagggagctagttaccctcagcttctaccatcctgaacatgagttctgtaaaagactcggtgtaaatttacgtggctattgttttcaagacttcatgacagatcgttctccctttcttacactcctcccaaagtaatcagccctactgagactctccagcgtacagacaggagagagcacagagtacttcagtaatgcaggccctgtcttgttagataagaagttcctcacgcaagagtgatgtgataggatggtatttaaagagtaaggcaggatgaagtgcttattgttttaggacaaattgcttttactacaattgagtattgtatcaaattgatatttttaatgaatattaagagactcattaaaaaccatcttgattagaactgactagattagttttgaagatggaattccttagacttctacctttccactactaacaaaggtgagccagaagtgttgtgtctacattatagtccagaaaggaaaggaaggcacagagcggtatagtagtagcaaggagagtttggcccttaagtatacgtatgagagtggccatcgccttctgtcatttctgtccttatagtcatcagtaaaatcagcatcccacaagagagcagaggatttcaatagaaattttgtactaggcttagaaacgttaccactggcaacttggctttccgttttagacaaatataaagttattaggtttaataattcagtagggaaataaataacagctctggtaaatgcaacagggactgatggcaccagagccctcagaagcttgaggcttcccaaggtccagcattactaggccttgactgcatcaagaactctaggccatccaccaagtatgtgaggggtaagccttgggttgtcctggttccgtttttctgtcatgaaatcttggagtatttggttgggcacttgagtttgcacttcagtctgctacctggtcgtacttgctttgagagcagtcacctgtcccccttctggtcatcttttctgttatatatatggttgaatctgcttggtgctgtctgtttcaggtatgatgttctgtggacgatctcgaagagtagccttgtcttgcttgttcaagatgtctgctccttagagccggccttggtcttcttcactcacgaggctttgttccgctctttgtcttccaggtgacacgatattcatcattctgaggaaacagaaactgatcttcctgcactggtaccaccacatcactgtgctcctgtactcctggtactcctacaaagacatggtcgctgggggtggttggttcatgactatgaactatggcgtgcatgccgtcatgtactcttactacgccttgcgggctgcgggtttccgagtctcccggaagtttgccatgttcatcaccttgtcccagatcactcagatgctgatgggctgtgtcattaactacctggtcttcaactggatgcagcatgacaacgaccagtgctactcccactttcagaacatcttctggtcctcgctcatgtacctcagctaccttgtgctcttctgccatttcttctttgaggcctacatcggcaaagtgaagaaagccacgaaggctgagtagtgtcagggctgaggaggaagtcatagctcagggtcatcacgaaaaataatcgacaaaagaaaaatggcacaaggaatcccatatggtgcagctaaaacaaaacaaaacatccgtatgagcaggcacgaggcccaaggcagcttgggactgaagattaggttgtaagtttatgatcctttctgggtgaggactcgctgagtgcaactcttatctcaaagcacggctgctgaggggaccccttccctctggcctgtcaactctagaacacactagatgcaaaggcagccacgggcaaagagattgggcagagattagtggacggccagcaaaacactgcaggaagcaggtggggggaggaatctactcagcctttttgttttgttttgttttgtttttctctaaggataaaggagtttccccttttcaaacaatgtgagcacacacacacacacacacacacacacacacacacacgcgcgcgcgcgcgcgcgcaatcttttcaacacgaaaccagagctaaaagaaaagataaacatgggagagacagggtttctatctgggacagcaatgcttttgcaaaaggctaggccttttaaagaaaggtgagcttgtaactccttgataaaagatgtcttaattatttttactgcaactgaaagtaaagaggtagagcctttccccttctgcacagcctcagggcttgtatgttcgctacaaccaaacacaggacagtacttcccccatgatactttattactgggagaaagaaacccctgtagttgaaacaccacactgacaactgttatttctgctctccgacgagaattcaagcatccgttgttcagttgccccaaactttaggacggaggagtaaatgcagaactgaaagggaagaagctcagctggctggcttgaaaatggagtcttgtaccatgtgtaacaaatgccagcccatcgtccctggagctgaacagggaggaagggctatgggcagagactagagccggattcatccaatgtgcagacagcgtgttcgcctccctccctgttcgacctcacacataatcctggctttctaaatgaggccctgtgacacactctgtgctttctatatttttgtgactttcaaacacagatctgcagggctctgcctgatttggggtaaacactgtgtttctgcagcctctgcatttgctcccttcagcagtgcagaggcttgagaagtgccctctgctggcttagtgagaagcttcaacaaacacttcacagtaggttgaaataactgaccactaagggcctgcggagattaaaccctaagttctaagtgctgtcaaacacctgacatatatttgaccaaatcagaagagagagagaacctctatgcttcaagtaagcgtcataaattttttaagtgactttcacttgagaactcagaaagtcaatgtattaagagccatattctgaaagagaaagaaagaaagaaagaaagaaagaaagaaagaaagaaagaaagaaagaaagaaagaaagaaagaaagaaagaaagaagcaagctagacaatgttaactgtaatatttcagtcctctacaagccaaataaatgtgtcgatgttcctaatatttcaaagacgcaattacataaagttgttcaatgtgatataatagtattctaattggttaagtagtttaatgattaggcaaactagcagaaacaattagaggctgctacaccacgtagattatacacacatagccacgtacgtgaggtacacggagctataaagctcaaatcaatagtaacacgatttttggctagcagaaactatcacctatcttcctttacttgagagtgtacagtaaaagggatttttttcaaattatttttatattattttagctttaattgtgctgtcattcatggaacagctgctcagcagccttcctgtgagagatgacaggggtgttttcgtgtggcttgtttacgtgtggaattggaaaagaataaaatctgattcccttctgtgggaatgggatcaagggtagacaaaggacccatgtagatcaagtcataactgaacgaccagggaagggagccaggcgggggcgggagtcagctgtggctttcatgttaccattgtgtggtggctgatggacgggacgtggttggagggatgttttcttacttggggtagaagctaaccggagatgaaagtctagaagccactctgtccagtggaatcttagggtgtacttgttcctttgagctttgtaaatgcacaatagtgtacaataataagcctttcccttgccttatggaagaaagtgagcaagataatgaaaaccaagaagccacctatcagttgaattgagtctaatcaaaaggccagcctgaggctcctctggtcggttcagtttaatttagatatttaccatagaatacaggtacaatatggaaatctcataagcataaactttaaaacgactaagctatgcttccaaagcactttagtctcagtgttcttcgcttcatgctctctccacttgtaaaataacttagacttttcattcgcaggatgagtatataataattaagtttccaaaccagctaaactgtagctacaggcaattccagtgttcaccatgggaagaaaaagccacatgtttttttaaaaacacagaattctgatataggctcagcacacagtttttaacatatcagcttagctgctctaattgtatcaagatacgaggctggaccactggcctatgacacatctaaaacctgccagaattgactgccacgtagataatactgctgtcagtgaacattccgggcaagcaagtttttgtagctgccccactatgctgcaatagattatctttctattgaagatttctcgctgcattccaatcccagtgtggtgaaaacttaattcctggattgaatgaacacaaatccaaggtttcatataaacgcagtgcggtcactaggtctgagcatcaactcaaatgtgttgagtttgcaatgaaattctagtgagaatcactccattcacacagtaggagatttttatctggaccttctagtgtcaactgtgaggagaaacaacaactatcattattatttatttattgtatttatatccaatgccaggccaaagtattgatttagatcaagcagtgcccttccccccctcccaaccccccatctttctaatccttctgcactatagaaagtcaagactggaggggaaatccatattcattgctgcaggggaaagcaggtttattaatcctcccgctgtctttatgagaccgattgaccaatgtagctcaggcagaagtttcatgtgggtgggatatctacaggagcctaggaaaacacttccagagaagataaccacagactgttgtttttgttcatttgttttatatcttcatggtaagataagcctgtcacggagttacaaggcaccatgacactaaggtagaatgttccagaagtctggctaccttcccaggctgctcagttacctgggagtgtctagttactatcttgttctgacgagaggagcttttgctcaagaactgccagatacagacaccaagtcagccctggcacactctacaacctccgggcataggtaatgggtctttgactattggattgcctcagtgtcaagtgagttcctagaagaagagaccgagtaggctccaccccccagactccaccacactctgagttgcattggcaggatcggtgtctagacacagttctttgtgaagtgtcaatgctagagacagttgtgaggagatcatgatgacagcccagaactttctagccttcaaatgcatccttttccagtctttgttttgataacagctattttgctatcagtttgggacaacagtagagtctgtggccatgtgatctacagcttatgatcacacagctcccatttcctggtgcctgagatcccagccatcagaaagtgatttgggtgagaattcacaacatatatgtcacctctgcatattgaagtgacatctaataaaacaaggacgtcctattttgtctgaacccgctgaatgaagctctgttatcctagttagtcattgggccgccatcctctgtacccgatagtgacacaaaacagatgtcggtgcctgtacaagaattctcagtgcctgttgtgacagactgtgcttagaagaaacattcgtgagccataaagcaggaaccacagatgaaagggccagttaaaagtccacctgctccaagtatcatagaaaacccaaaagcctgttgtataatctggtattgtccccatccccagatgctttgaaaactaggattctcagagcatggatacccacgcttccatcttcccacaaacatttcctagagttgtactggtgggtgcagcgcctaggtggttggttgggggaagtcttggaagctgtactttgattgcaggtcaagcaaagccaaatccagatatttctgtgtcactcaccagttgtccatgtccacccacaaaacaattgtattatagtcaagttgtcctagctgattggtcctcaaataaggatgcaactatgtttgcaacccagttaggacacatttgaaagaacctgactcactagcatctaaacaatatcatttccccaatgcttggtggcacttcagacttttgttctcctggttgatcaaggtgttgcctggtggtgccgcctcctagtgtgaatatttcagttaagtgtgggtctgagcatgaccgggctgggcttagctcactgctacttggaaaatgactggcattctgcttcctaggccctaaacccatattcagagggaaaattcactatcaagcctcacagcgaaatcacagcagtgttggaattcttattttcaagtgcttatctcacaacattgaaaaatatttttggtgtattaagatttaaaataaagtcatcataacttttgatttaaaa

SEQ ID NO: 52 - DNA, 5975 bp, Mus musculus
tcaaccctggatgtagctgagaggctgggagagagatcggccaggagactgacggcggggcaatacctaggggggtgggagggggaagcagacaggagagcactcaaaataaaaggctctttacagatttttttattttgtatagagaacacgtagcgactccgaagatcagccccaatgaacatgtcagtgttgactttacaagaatatgaattcgaaaagcagttcaacgagaacgaagccatccaatggatgcaggaaaactggaagaagtctttcctgttttctgcgctgtacgctgcctttatctttggtggtcggcatctgatgaacaagcgagccaagtttgaacttcggaagccgctcgtgctctggtcgctgactcttgccgtcttcagtatattcggtgctcttcgaactggtgcttacatgctgtacattctgatgaccaaaggcctgaagcagtcagtttgtgaccagagtttttacaatggacctgtcagcaaattctgggcttatgcatttgtgctcagcaaagcacccgaactaggtgacacgatattcatcattctgaggaaacagaaactgatcttcctgcactggtaccaccacatcactgtgctcctgtactcctggtactcctacaaagacatggtcgctgggggtggttggttcatgactatgaactatggcgtgcatgccgtcatgtactcttactacgccttgcgggctgcgggtttccgagtctcccggaagtttgccatgttcatcaccttgtcccagatcactcagatgctgatgggctgtgtcattaactacctggtcttcaactggatgcagcatgacaacgaccagtgctactcccactttcagaacatcttctggtcctcgctcatgtacctcagctaccttgtgctcttctgccatttcttctttgaggcctacatcggcaaagtgaagaaagccacgaaggctgagtagtgtcagggctgaggaggaagtcatagctcagggtcatcacgaaaaataatcgacaaaagaaaaatggcacaaggaatcccatatggtgcagctaaaacaaaacaaaacatccgtatgagcaggcacgaggcccaaggcagcttgggactgaagattaggttgtaagtttatgatcctttctgggtgaggactcgctgagtgcaactcttatctcaaagcacggctgctgaggggaccccttccctctggcctgtcaactctagaacacactagatgcaaaggcagccacgggcaaagagattgggcagagattagtggacggccagcaaaacactgcaggaagcaggtggggggaggaatctactcagcctttttgttttgttttgttttgtttttctctaaggataaaggagtttccccttttcaaacaatgtgagcacacacacacacacacacacacacacacacacacacgcgcgcgcgcgcgcgcgcaatcttttcaacacgaaaccagagctaaaagaaaagataaacatgggagagacagggtttctatctgggacagcaatgcttttgcaaaaggctaggccttttaaagaaaggtgagcttgtaactccttgataaaagatgtcttaattatttttactgcaactgaaagtaaagaggtagagcctttccccttctgcacagcctcagggcttgtatgttcgctacaaccaaacacaggacagtacttcccccatgatactttattactgggagaaagaaacccctgtagttgaaacaccacactgacaactgttatttctgctctccgacgagaattcaagcatccgttgttcagttgccccaaactttaggacggaggagtaaatgcagaactgaaagggaagaagctcagctggctggcttgaaaatggagtcttgtaccatgtgtaacaaatgccagcccatcgtccctggagctgaacagggaggaagggctatgggcagagactagagccggattcatccaatgtgcagacagcgtgttcgcctccctccctgttcgacctcacacataatcctggctttctaaatgaggccctgtgacacactctgtgctttctatatttttgtgactttcaaacacagatctgcagggctctgcctgatttggggtaaacactgtgtttctgcagcctctgcatttgctcccttcagcagtgcagaggcttgagaagtgccctctgctggcttagtgagaagcttcaacaaacacttcacagtaggttgaaataactgaccactaagggcctgcggagattaaaccctaagttctaagtgctgtcaaacacctgacatatatttgaccaaatcagaagagagagagaacctctatgcttcaagtaagcgtcataaattttttaagtgactttcacttgagaactcagaaagtcaatgtattaagagccatattctgaaagagaaagaaagaaagaaagaaagaaagaaagaaagaaagaaagaaagaaagaaagaaagaaagaaagaaagaaagaaagaagcaagctagacaatgttaactgtaatatttcagtcctctacaagccaaataaatgtgtcgatgttcctaatatttcaaagacgcaattacataaagttgttcaatgtgatataatagtattctaattggttaagtagtttaatgattaggcaaactagcagaaacaattagaggctgctacaccacgtagattatacacacatagccacgtacgtgaggtacacggagctataaagctcaaatcaatagtaacacgatttttggctagcagaaactatcacctatcttcctttacttgagagtgtacagtaaaagggatttttttcaaattatttttatattattttagctttaattgtgctgtcattcatggaacagctgctcagcagccttcctgtgagagatgacaggggtgttttcgtgtggcttgtttacgtgtggaattggaaaagaataaaatctgattcccttctgtgggaatgggatcaagggtagacaaaggacccatgtagatcaagtcataactgaacgaccagggaagggagccaggcgggggcgggagtcagctgtggctttcatgttaccattgtgtggtggctgatggacgggacgtggttggagggatgttttcttacttggggtagaagctaaccggagatgaaagtctagaagccactctgtccagtggaatcttagggtgtacttgttcctttgagctttgtaaatgcacaatagtgtacaataataagcctttcccttgccttatggaagaaagtgagcaagataatgaaaaccaagaagccacctatcagttgaattgagtctaatcaaaaggccagcctgaggctcctctggtcggttcagtttaatttagatatttaccatagaatacaggtacaatatggaaatctcataagcataaactttaaaacgactaagctatgcttccaaagcactttagtctcagtgttcttcgcttcatgctctctccacttgtaaaataacttagacttttcattcgcaggatgagtatataataattaagtttccaaaccagctaaactgtagctacaggcaattccagtgttcaccatgggaagaaaaagccacatgtttttttaaaaacacagaattctgatataggctcagcacacagtttttaacatatcagcttagctgctctaattgtatcaagatacgaggctggaccactggcctatgacacatctaaaacctgccagaattgactgccacgtagataatactgctgtcagtgaacattccgggcaagcaagtttttgtagctgccccactatgctgcaatagattatctttctattgaagatttctcgctgcattccaatcccagtgtggtgaaaacttaattcctggattgaatgaacacaaatccaaggtttcatataaacgcagtgcggtcactaggtctgagcatcaactcaaatgtgttgagtttgcaatgaaattctagtgagaatcactccattcacacagtaggagatttttatctggaccttctagtgtcaactgtgaggagaaacaacaactatcattattatttatttattgtatttatatccaatgccaggccaaagtattgatttagatcaagcagtgcccttccccccctcccaaccccccatctttctaatccttctgcactatagaaagtcaagactggaggggaaatccatattcattgctgcaggggaaagcaggtttattaatcctcccgctgtctttatgagaccgattgaccaatgtagctcaggcagaagtttcatgtgggtgggatatctacaggagcctaggaaaacacttccagagaagataaccacagactgttgtttttgttcatttgttttatatcttcatggtaagataagcctgtcacggagttacaaggcaccatgacactaaggtagaatgttccagaagtctggctaccttcccaggctgctcagttacctgggagtgtctagttactatcttgttctgacgagaggagcttttgctcaagaactgccagatacagacaccaagtcagccctggcacactctacaacctccgggcataggtaatgggtctttgactattggattgcctcagtgtcaagtgagttcctagaagaagagaccgagtaggctccaccccccagactccaccacactctgagttgcattggcaggatcggtgtctagacacagttctttgtgaagtgtcaatgctagagacagttgtgaggagatcatgatgacagcccagaactttctagccttcaaatgcatccttttccagtctttgttttgataacagctattttgctatcagtttgggacaacagtagagtctgtggccatgtgatctacagcttatgatcacacagctcccatttcctggtgcctgagatcccagccatcagaaagtgatttgggtgagaattcacaacatatatgtcacctctgcatattgaagtgacatctaataaaacaaggacgtcctattttgtctgaacccgctgaatgaagctctgttatcctagttagtcattgggccgccatcctctgtacccgatagtgacacaaaacagatgtcggtgcctgtacaagaattctcagtgcctgttgtgacagactgtgcttagaagaaacattcgtgagccataaagcaggaaccacagatgaaagggccagttaaaagtccacctgctccaagtatcatagaaaacccaaaagcctgttgtataatctggtattgtccccatccccagatgctttgaaaactaggattctcagagcatggatacccacgcttccatcttcccacaaacatttcctagagttgtactggtgggtgcagcgcctaggtggttggttgggggaagtcttggaagctgtactttgattgcaggtcaagcaaagccaaatccagatatttctgtgtcactcaccagttgtccatgtccacccacaaaacaattgtattatagtcaagttgtcctagctgattggtcctcaaataaggatgcaactatgtttgcaacccagttaggacacatttgaaagaacctgactcactagcatctaaacaatatcatttccccaatgcttggtggcacttcagacttttgttctcctggttgatcaaggtgttgcctggtggtgccgcctcctagtgtgaatatttcagttaagtgtgggtctgagcatgaccgggctgggcttagctcactgctacttggaaaatgactggcattctgcttcctaggccctaaacccatattcagagggaaaattcactatcaagcctcacagcgaaatcacagcagtgttggaattcttattttcaagtgcttatctcacaacattgaaaaatatttttggtgtattaagatttaaaataaagtcatcataacttttgatttaaaa

SEQ ID NO: 53 - protein, 263 aa, Mus musculus
MNMSVLTLQEYEFEKQFNENEAIQWMQENWKKSFLFSALYAAFIFGGRHLMNKRAKFELRKPLVLWSLTLAVFSIFGALRTGAYMLYILMTKGLKQSVCDQSFYNGPVSKFWAYAFVLSKAPELGDTIFIILRKQKLIFLHWYHHITVLKWYSYKDMVAGGGWFMTMNYGVHAVMYSYYALRAAGFRVSRKFAMFITLSQITQMLMGCVINYLVFNWMQHDNDQCHFQNIFWSSLMYLSYLVLFCHFFFEAYIGKVKKATKAE

SEQ ID NO: 54 - DNA, 5921 bp, Mus musculus
actaagaccgcaaggcattcatttcctcctacggtggatgcggacgctgggaggagagcccctgagctaggagctgggagcagaggcgcagagaacacgtagcgactccgaagatcagccccaatgaacatgtcagtgttgactttacaagaatatgaattcgaaaagcagttcaacgagaacgaagccatccaatggatgcaggaaaactggaagaagtctttcctgttttctgcgctgtacgctgcctttatctttggtggtcggcatctgatgaacaagcgagccaagtttgaacttcggaagccgctcgtgctctggtcgctgactcttgccgtcttcagtatattcggtgctcttcgaactggtgcttacatgctgtacattctgatgaccaaaggcctgaagcagtcagtttgtgaccagagtttttacaatggacctgtcagcaaattctgggcttatgcatttgtgctcagcaaagcacccgaactaggtgacacgatattcatcattctgaggaaacagaaactgatcttcctgcactggtaccaccacatcactgtgctcctgtactcctggtactcctacaaagacatggtcgctgggggtggttggttcatgactatgaactatggcgtgcatgccgtcatgtactcttactacgccttgcgggctgcgggtttccgagtctcccggaagtttgccatgttcatcaccttgtcccagatcactcagatgctgatgggctgtgtcattaactacctggtcttcaactggatgcagcatgacaacgaccagtgctactcccactttcagaacatcttctggtcctcgctcatgtacctcagctaccttgtgctcttctgccatttcttctttgaggcctacatcggcaaagtgaagaaagccacgaaggctgagtagtgtcagggctgaggaggaagtcatagctcagggtcatcacgaaaaataatcgacaaaagaaaaatggcacaaggaatcccatatggtgcagctaaaacaaaacaaaacatccgtatgagcaggcacgaggcccaaggcagcttgggactgaagattaggttgtaagtttatgatcctttctgggtgaggactcgctgagtgcaactcttatctcaaagcacggctgctgaggggaccccttccctctggcctgtcaactctagaacacactagatgcaaaggcagccacgggcaaagagattgggcagagattagtggacggccagcaaaacactgcaggaagcaggtggggggaggaatctactcagcctttttgttttgttttgttttgtttttctctaaggataaaggagtttccccttttcaaacaatgtgagcacacacacacacacacacacacacacacacacacacgcgcgcgcgcgcgcgcgcaatcttttcaacacgaaaccagagctaaaagaaaagataaacatgggagagacagggtttctatctgggacagcaatgcttttgcaaaaggctaggccttttaaagaaaggtgagcttgtaactccttgataaaagatgtcttaattatttttactgcaactgaaagtaaagaggtagagcctttccccttctgcacagcctcagggcttgtatgttcgctacaaccaaacacaggacagtacttcccccatgatactttattactgggagaaagaaacccctgtagttgaaacaccacactgacaactgttatttctgctctccgacgagaattcaagcatccgttgttcagttgccccaaactttaggacggaggagtaaatgcagaactgaaagggaagaagctcagctggctggcttgaaaatggagtcttgtaccatgtgtaacaaatgccagcccatcgtccctggagctgaacagggaggaagggctatgggcagagactagagccggattcatccaatgtgcagacagcgtgttcgcctccctccctgttcgacctcacacataatcctggctttctaaatgaggccctgtgacacactctgtgctttctatatttttgtgactttcaaacacagatctgcagggctctgcctgatttggggtaaacactgtgtttctgcagcctctgcatttgctcccttcagcagtgcagaggcttgagaagtgccctctgctggcttagtgagaagcttcaacaaacacttcacagtaggttgaaataactgaccactaagggcctgcggagattaaaccctaagttctaagtgctgtcaaacacctgacatatatttgaccaaatcagaagagagagagaacctctatgcttcaagtaagcgtcataaattttttaagtgactttcacttgagaactcagaaagtcaatgtattaagagccatattctgaaagagaaagaaagaaagaaagaaagaaagaaagaaagaaagaaagaaagaaagaaagaaagaaagaaagaaagaaagaaagaagcaagctagacaatgttaactgtaatatttcagtcctctacaagccaaataaatgtgtcgatgttcctaatatttcaaagacgcaattacataaagttgttcaatgtgatataatagtattctaattggttaagtagtttaatgattaggcaaactagcagaaacaattagaggctgctacaccacgtagattatacacacatagccacgtacgtgaggtacacggagctataaagctcaaatcaatagtaacacgatttttggctagcagaaactatcacctatcttcctttacttgagagtgtacagtaaaagggatttttttcaaattatttttatattattttagctttaattgtgctgtcattcatggaacagctgctcagcagccttcctgtgagagatgacaggggtgttttcgtgtggcttgtttacgtgtggaattggaaaagaataaaatctgattcccttctgtgggaatgggatcaagggtagacaaaggacccatgtagatcaagtcataactgaacgaccagggaagggagccaggcgggggcgggagtcagctgtggctttcatgttaccattgtgtggtggctgatggacgggacgtggttggagggatgttttcttacttggggtagaagctaaccggagatgaaagtctagaagccactctgtccagtggaatcttagggtgtacttgttcctttgagctttgtaaatgcacaatagtgtacaataataagcctttcccttgccttatggaagaaagtgagcaagataatgaaaaccaagaagccacctatcagttgaattgagtctaatcaaaaggccagcctgaggctcctctggtcggttcagtttaatttagatatttaccatagaatacaggtacaatatggaaatctcataagcataaactttaaaacgactaagctatgcttccaaagcactttagtctcagtgttcttcgcttcatgctctctccacttgtaaaataacttagacttttcattcgcaggatgagtatataataattaagtttccaaaccagctaaactgtagctacaggcaattccagtgttcaccatgggaagaaaaagccacatgtttttttaaaaacacagaattctgatataggctcagcacacagtttttaacatatcagcttagctgctctaattgtatcaagatacgaggctggaccactggcctatgacacatctaaaacctgccagaattgactgccacgtagataatactgctgtcagtgaacattccgggcaagcaagtttttgtagctgccccactatgctgcaatagattatctttctattgaagatttctcgctgcattccaatcccagtgtggtgaaaacttaattcctggattgaatgaacacaaatccaaggtttcatataaacgcagtgcggtcactaggtctgagcatcaactcaaatgtgttgagtttgcaatgaaattctagtgagaatcactccattcacacagtaggagatttttatctggaccttctagtgtcaactgtgaggagaaacaacaactatcattattatttatttattgtatttatatccaatgccaggccaaagtattgatttagatcaagcagtgcccttccccccctcccaaccccccatctttctaatccttctgcactatagaaagtcaagactggaggggaaatccatattcattgctgcaggggaaagcaggtttattaatcctcccgctgtctttatgagaccgattgaccaatgtagctcaggcagaagtttcatgtgggtgggatatctacaggagcctaggaaaacacttccagagaagataaccacagactgttgtttttgttcatttgttttatatcttcatggtaagataagcctgtcacggagttacaaggcaccatgacactaaggtagaatgttccagaagtctggctaccttcccaggctgctcagttacctgggagtgtctagttactatcttgttctgacgagaggagcttttgctcaagaactgccagatacagacaccaagtcagccctggcacactctacaacctccgggcataggtaatgggtctttgactattggattgcctcagtgtcaagtgagttcctagaagaagagaccgagtaggctccaccccccagactccaccacactctgagttgcattggcaggatcggtgtctagacacagttctttgtgaagtgtcaatgctagagacagttgtgaggagatcatgatgacagcccagaactttctagccttcaaatgcatccttttccagtctttgttttgataacagctattttgctatcagtttgggacaacagtagagtctgtggccatgtgatctacagcttatgatcacacagctcccatttcctggtgcctgagatcccagccatcagaaagtgatttgggtgagaattcacaacatatatgtcacctctgcatattgaagtgacatctaataaaacaaggacgtcctattttgtctgaacccgctgaatgaagctctgttatcctagttagtcattgggccgccatcctctgtacccgatagtgacacaaaacagatgtcggtgcctgtacaagaattctcagtgcctgttgtgacagactgtgcttagaagaaacattcgtgagccataaagcaggaaccacagatgaaagggccagttaaaagtccacctgctccaagtatcatagaaaacccaaaagcctgttgtataatctggtattgtccccatccccagatgctttgaaaactaggattctcagagcatggatacccacgcttccatcttcccacaaacatttcctagagttgtactggtgggtgcagcgcctaggtggttggttgggggaagtcttggaagctgtactttgattgcaggtcaagcaaagccaaatccagatatttctgtgtcactcaccagttgtccatgtccacccacaaaacaattgtattatagtcaagttgtcctagctgattggtcctcaaataaggatgcaactatgtttgcaacccagttaggacacatttgaaagaacctgactcactagcatctaaacaatatcatttccccaatgcttggtggcacttcagacttttgttctcctggttgatcaaggtgttgcctggtggtgccgcctcctagtgtgaatatttcagttaagtgtgggtctgagcatgaccgggctgggcttagctcactgctacttggaaaatgactggcattctgcttcctaggccctaaacccatattcagagggaaaattcactatcaagcctcacagcgaaatcacagcagtgttggaattcttattttcaagtgcttatctcacaacattgaaaaatatttttggtgtattaagatttaaaataaagtcatcataacttttgatttaaaa

SEQ ID NO: 55 - protein, 263 aa, Mus musculus; identical to SEQ ID NO: 53

SEQ ID NO: 56 - DNA, 170489 bp, Homo sapiens
ctcagatccctgtatctcccgtggggtaaatacaggtcaactagttaggaagcaagaaaaaataaatccacccatttgaggtttgtttttcagtttagaaatctctagaactgtggaaatagctatgtaatcctggggtgatgtgggggtttggatcagaactcccaggtgcaagctaagtaggtacctgagtcctattctcttaggaaacagggatcaggtattctttagatatctggaccaatagatgccctacatactgtagataactaataaagcctggctctgtgttgattatgttggccaaggattgctaaatttacatcaggacttcccatactggtccatggacttagtgattctgagtttactgcaacaggtccttagcttgccgtaggctgaaagagtaatatgcgtcataaatatatgcacagttatctttttttttttttagacagtcttgctctatcactcaggctggagtgcagtggcatgacatggctcacactgcagccttgacctcctgggctcaagagatcctcccactatagcctcccaagttgctgagactactactactaatgtatgctactacacacaactaatttttaagattttggggtcaggcacagtagcttaggcctgtaatcccagcactttgggaggccaaggtgggtggatcacctgaggtcaggagttcgagagcagcctggtcaatatggcaaaactcaatctctactaaaaacacaaaaattagctgggtgtggtggtatgcgcctgtagtcccagctacttgggaggctgagggaggaagatcgctcgaacctaggagatggaggttccagtgagccaagattgtgccactgcactccagcctgggagacagagtgagactccatctcaaataaataaataaataaataaataaataaataaatactttttttttttgtagagacgggatcttgcccgggctggtctcgaacttctaggctcaatcaatcctcccaccttggtttcccaaagtagtgggattacaggtgtaagccacctcgcctggactcttctacatgtatgaagatgctgttgtaattaataaactacagaaatgccacccattactgaattcacagtggctttttgactatacagggttatggcatggaagccagactttggaatcaaacagattgggcaatctaacctagccatttggcaaattagacaggatccttaaaatttccaaactccactttcctcatctataaaatggagttattgcatggagttgttataaggatgaaatgagacaatgcatgtaaggtcttaacataattcttggcctagagcagatgctcaataaatgagatctattattatttctaccaacatgtacttttctaaatcaactgatagtctcatataggagtctatctggatctttttctcatccatctattgggatggtgcaaatttcttccctatttgcagatgtttccctctcaataagacatcaatattctatcatgtgtgttgaaaatatcttattctctagtacaaattttcagcttctaataagcctacgttgtaggttttgtttccagagttagaatcaaatattgaaactagttcagggcaaaagagacgtattttccatccccatgtaagttaataaagaaaagctctttataaatattcagttggtcaatgttccctgagagtaagaggaggtgatgaagaggaaaaaaggtaaattatgtcaattggattcatcctgttctatggtctaaagttgagaagaaatgtctctttttggctaaaaatacacactctctggcctgcgagtgggaggaggactcaactgtggtggttaagaagatggatccagagtatctggatttagattttgactttacagctaaagaattgagagctcttgggctgactacttaacatcagtgtgcttcagcttcacatctgtaatttggaataatgacagaaaacatacaagctggtgtcatgggaggaaggctgctggggagccatggtcaggagattgaatagtgtcccttcctccaaattcatgtccacctggaacatcagaatgggaccttatttggaataagggtctttgcagacataataaagataaggatctaaatgagatgatactagattagggtggatcctaaatccaatgaaagtgagtttataagaaatagaaagaagacagaaagacggagagaagagggtgatgtgaagatggaggcagaaattggagtaatgtgtctacaagccaaggaatgccacagtttgccagcaaccaccagaagctagtggtatgggacaatttcttcctcagagcctccagaagccaactctgcagacatcttgatttctttttctccctaaactgatcagcagtattttgattatttttttcctgacacctggattttggacttctaacctccagaatgacatgagaatacatttttgttatttttaagccatcaagtttgatcaagtttgtggtaattgttatggcaccctaagaaactttggcttcaggaagtcatcgttcctgcgatcaagggatttttaatttcctacatgggagaggatgatgagctaagggcctgaggtttataaaagctttgataacaaggacttcaagaggttaggagacaagaaagagagaaatcatctctgtgaacagggaaggctttaagtaggaagtcgttcgtaagtatccaaagagtggactgattttgacaggtaggaatgggacaggtggggttaggaggggaggatattgatattccaaacagagggaactgatggagaaatgcagcagagatagcaaagtttgaggtggtcagatgacatcaagtggttcagcttggttggagtcggcctaaggaaagaggcctggaaaagcagattagtgttagaagtttccgaaaataatgtatgtgtattttaacatatttgtatgtcacaaaaattgggggctggtatgaagatcctccagcatagtactggttattttatgtatagaaagaaaattaggctgggtgaggtggctcacgccttgtaattccaccattttgggagactgaggcgggaggatctcttgagctcaggagtttgagagcagcctgggcaacgtggtgagacctcatttctacaaaacattttttaaaaattagcagggcttggtggtgggtgcccgtagtcccagctacttgggaagttgaggcaagaggttcacttgagcccaggagttcaaggatgaggtgggccatgattacaccaccacactccattcagcctgggcaacaaagctagactgtctcaaaaaacaaaaacaaaaacaaagaaaagaaaagaaaattaaaggatcaatttactttccctaaagtcagatacctgtctgtaaaagagccaagactaaaacctgtataccttgtttagtagtcaagtcatctttgcagtaaatctttctgtctttcaaatactcctccttctcttctggcttaatttttatttttttctcgagacagagtctagcaatgtctctcaggctggattgcagtggcgccatctcagctcactgcaacctctgccccccgggttcaagcgattctcctgcctcagcctcccaagtagctgggattacaggcgcccgccaccacgcccagctgattttttgtatttttagtagaaacggggtttcactatgttgaccaggctagtctcaaactcttgacctcatgatccgcccacctcggcctcccaaatttttaaaagtttactaccaaatataaattaactgttactttttgagccccagttatttatattcaatattagctacctatctagttatggttagaaacacacacaataaatcttttcataaaaattcttagtggtgttgctgggcaccctcccaacattccctcccatctttcctaaccttactgtatgtcttgtaattgaaaataagtctagaaaaatcaccattttatatgtttagcttctaatattatgttacatgttaagttgttcagtatagaaaattacaaatagaaaagtgactcattatttcacagctcaggtattcctgttgattttttttctttttttttaaatgaaatcaagttcatggtaagaaaattctagcactacagaaaaataaagtacagaaaccgtcttttgtttgctctcaggttttttctcaatgtatacatcaccaattaattcttgtttttgtctttccagaaaaaaaaagtacagtgtagatgtttctcttttcttttctttctttcttttttttttttttagctgatgtcttgctctgttgccttaggttggagtgcagtaacactaacatggctcaagaccacaggcttgtgccaccacatctggctaatgattttttaaaaattattattattattattttctttttgtagaaacagggtttcactatgttgcctaggcagtctcaaactcctgagctcaagcgatcctccttccccagcctcccaaatggctggcattacaggtgtgagccaccacatccggccttacatgttttcctctttttttcctccccaaccactacaacgagagatgtttttttcttaatgcgacactatatacacaatgtcctgtgccttgctttttcattttccttgaacatttatcagaaatctcttttgatgttgcaacctacagagccttttttaaaagactttatactattcaattataagggtgtgtcaccatttatttaatcagcctcctatttgttagggtccacccaaccggactgtttccccctcccctagacctaagcctcaaaggccaaaagtaaaacccactaccctaaaccttcctgtaactgtctgaccagaggccagctgttccaggatgcagtcaagacatctacctccacgcctggtgctcagagaacgttttacaccccctttttgccatacagtcccaattctgcctccctagccaaggtatattctttctatgcagcacctccacctgcttctgtctacccaccaactgtacaggcacctgtacactggtcttcctcagccctaaaatagacatagctccaggagaaaacctgcccctccaaaccctaaatactcaaatcccacacagcaggcgccaggccatacaacttatcccactatttgtagacctaggcatcacagtggccgcaggtacaggggtagcaggaatcgcaacctcctcttattaccataaaaccttatcaaaagacctttcagatggtatagacaaccttgcaacttccatatccccttacaagctcagctggactccctagcggcagtcgccttacaaaatcagagaggtctcaacctacttaccaccgacaaaggaggattctgcattttcctagatgaagaatgctgcttttattttaaccagtcaggcttagttcaggatgcagtaaaaaacaaacaaacaaacaaacaaaatctcaaagatcgagcccaaaagatcagggaaagcagctcctctacgtggccctcttgatctctcagcacctgggccgcctggctaccctctctccttggacctgctgtaatcctttttctcctcctaatcttaggtccttgcctaatactcctcttcacccagtttttgcagaatcgtatccatgcctttgcccatggaaccatacaggtcatgatgttactccaggagtatcaacactttcaaaaccaaagccaacctccactttccagcctttcccctagcccctgcccactctcagcctgaagcagtctgatgaaatcaatgccccttctctatcatctgttaaaaggctggaatgttagggtccacccaactggactgtttcccgctcccatagacctaagccccaaagccccacctgtaactgtcggacccgaggccagctgttccaggatgcggtcaagaagtctaccttacacaacagaactggcaagaaaaacaactccaggaagcggtcagacacctggcacaaaggatcccctaccccctggccttttctttttccttcaccctgacccagttatatgccctataaaaccttgctatatagcctgtaagcggggctgcctcctctgcttttgtcaagaggtagcccaccaggactgacaatgaatcacattgacttgagtctattgacctcattcctttcttggctgtccttccaattatcccttaaactattattttcagtgttttattataaacagtgctgaatatatttgtgggggttttctttgttggtgttgtcattttttgagacaaggtctcactctgtcattcgggctggagtgcagtggcgcaatcatggctcactccagccttgacctccccaggctcaggtgatcttcccacttcagcctgctgagtagctgggaatatagacacatgccaccatgctcagctaatgtttttgtattttttttttttgtagacacaggttttcaccatcttgcccaggctgggcttgaactcctgggctccagcaatcagcccacctcgccctcccaaagtgctgggattacaagcataatgccagcccaatgctgaatatcttagacatatatccggaatgtttcggtgagtatatccatagcagtgaatttactaggaattatcatgctattattcggtttaacattcttttatcctcctccactccactgcagttgagaataaaatctaaacaccttatcttgatttacctgtggccaagatctgacccctgcctgtctcttcaacctgtttctttcaattactccttactgatggcctgaagccacaccagccttttgtcctcaatcccgcaaatttattcttttcctaggagcctttgtacttgctcattcttctttgtaacacttctgcaagaggtggctggctctttgccagcggggtctcaactcaaagtccttctccctgaggccttccaggtttaaatgagcactcccaggccttcatgtcatgctgttaaattgtaatcctagcatttcattctctaagaaattattttgtcttcccttctggaatgtaagctccaagtgcgcaagagccctgtttgtctcatttgtgagtcccaagagctcagatgagtatgtactcaaaatatatctggtaggccaagtgcgatggctcacgcctataatcctagcactttgggagactgaggcaggcagatcacctgatgtcaggggttcaagaccgtcctggccaacatggtgaaaccctgtctgtactaaaaatacaaaaattagctgggcatggtggcacattcctgtaatcccagctacttggaaggctgagacaggagactcacttgatcccaggaggcaaaggttgcagtgagccgagatcgcgccactgcactccagcctgggcaacagagggagacatcatctcaaaaaaaaaaataattctggtgaattaatggtgtggatttaaaattgtgatatatgctgggtgcctatagtcctagcgtggaaaacataacaagtccccatctctaaaaaataaatgaaattatcatataggctgccaaattgctttccatacagagtcaccagttttcaaagtcactgacagtgcttgtttgtttttgagataaggtctcactctgtcacccaagccggactgcagtggtgtgatcatggctcactgcagccttgacctcccaggctcaagctatcctcccatctcagcctccagagtaactgggattacaggcatgtaccaccacacctggctaatttttaattttttgtagagatggagcctcactatgttgcccagtctggtctctagcaattgtcttgcctcagccacccaaagtggattttctgtcttgattcctttctcacttcttaccttaatttatttgatgaatcattcactttacaaatatttattgattattcacaggctcaggcaccgtgctaaaatggttctttcttatctggccacacctatcttccagcccaatcttgccaagagttttggcctgggccttacttcaaagtgacgtagacttgtactgtagaggtctctagaaagacaacccttggctgggcatggtggctcatgcctgtaatcccagaactttgggaggctgagacaggtggatcacagccagcctggccaacatggtgaaaccccatctctactaaaaacacaaaaattaggcgggcgtggtggtgcttgcctataatcccagctactggggaggctgaggcaagagaaccatttgaacctgggaggcggaggttgcagtgagccgagtttgcaccactgcactccagcctgggcaacagggcgagactcctccatctcaaaaaaaaaaagaaaaagaaaaaagaaagacaacccttaatgggggagatgaggacagtccctacacagaatctttggcagtgtcaatgtatacattaatttgctaatcaactaggctagccctttaatctatatattgtactggattttaaaaattatttctttactttctcattagaccttcctcttttttttttttgtttgtttgtttggagacagagtctccctctgtcgcccaggctggagtgcagtggcagaattttggctcactgcaacctctacctcacgggttcaagcgattctcctgcctcagcctcctgagtagctgaggttacaggtgcccgccaccacgcctgcctgatttttatatttttagtagagacggagtttcaccatgttggccaggctgttttgaactcctgacctcaggtgatccgcccacctcggcctcccaaagtgctgggattacttctgtgagccaccaccgcggccggtcccttcctcctttaaaaatttttctcccagttcccactttttgtgggttagaggcatctaaattgaatgaaagtaccctttttggactactggggaggtggggggatgttctcagaaggggaattttctttctggtcctaatatccacctaatttttaaaagcagggctccttattattttgtaaagtttacaattacatcattagatacttccatgtctcatatttcatttttccaaactcttgggggaaatgagtggagggatggatggaatagaaaatagtttttcctcttggaggctgagggcccagtaggggtcaacagtacattcagccctctcctcacatattctgttctacctacaagtacagcaagtaaagccaaatttctcatgcatgcaaataaagtttttgcatttggccagtcggtccagttctcctgtcagcttccttccccactctgcctctgttcattaatcccccccttcccggtacctaaaccctccacctaacccagccctttcttccacttccggctactagcctctctcgcctatccactatcctcacactcagcatcccctgtctgtacgagattaaggagctctgccgtccgcagggcctgggttagcgtgaatctaagccagagctcccgggtgggggtgggggtaggggtgggggtggtcccagaggtagggcgaggaggtgggaagcgtattcccttcactggtgatctcaacgtagatttgcccggagttctcttgcaagagagctggcaggttttactatttcccaatcgtttactcgccaagctctcgggtccacgcgccgcggggatgcgccctgcaagctgaaacttcattcaaagcaaggcggcccacgaggttgggcttaggggatctggatgacctccaggccacttcctttctctctgcgcccttcccccactcttccaaccaccttcgctgtaaacaaaactgtcccccccgggcggagagaggtcgcgctctttcgcacactccctcgccaagggttaatttctcaaatcgcacgagggggaggagatttccctgtagacgagtaaaaagggtgatggacaaacgtgcgggcactaagaccgcaaggcattcatttcctcctacggtggatgcggacgccgggaggaggagagccccagagagaggagctgggagcggaggcgcaggcaatgctcagccctggatgtagctgagaggctgggagaagagacgaccgctggagaccgagcggcgtggggaagacctaggggggtgggtgggggaagcagacaggagaacactcgaaatcaagcgctttacagattattttattttgtatagagaacacgtagcgactccgaagatcagccccaatgaacatgtcagtgttgactttacaagaatatgaattcgaaaagcagttcaacgagaatgaagccatccaatggatgcaggaaaactggtacgtgatgctttcgcctgatactgttcccgggagccctgcgcgtcttcccggagtgccttaatgtcggtattccctgcctgggcgtgaatggagcgatgaatcgcgggcagccagctgatcgctgagttctcgggtctcccgggtgcaggagacgctgggggggggggtacatgaagcgcgaggtctgtgggtgcccctgtgtgaaccgcggctacataggcatcttttatatagattatataacacagaacatatgtgtgtgcacagggtgatgtctgcgcgacagggaaggcgggagagatgccacagtccagatcgcctacctgtgctcccctcccctcccccggttttcatctagatttgggttttctcgcttggcctctcccgcaaccggagtgtgaaaggcagtggagggaggaccttgtctcctgttgcctttaaccctctcccgcccgccgcccttggccctggtcctcgctgtctctccatccctcgtgtccttcctttctccttgcagcgctcctacttcaccgtcctcctctgtctgccgctcctcaggcggatgccccctttttagtacccctttccccacgcggttccctttccggtttcatagagagaccgggtgggagggaggaggggacaatgaaaacagtaataaatgaatgaacccgagcgagtggagccacgccattattaagtttctgttttacggaaacgccttttggacacacttctaattctgtgcgtagctgctgattggagttcaggcacacagattaaaagcccctccgtctgcagagtccttaggggctcttccctaggaaactaataatcagggaaaacacctttcttgtttactgtagtccccccgccagaccttttgaaaatccctgtgtgggaggcgatccagtgtcaccttgcaatatttaacagaggagggtgtgctcatctcgcttcttgtagacagggttgtggcagaggcattcctctcctccccttaacttcgggtctggcgatctgtaaagttcaagcccaacgcaccccggagctaggcaaggggccggcagcccgggggatggcttgaccggggagggtcgggccgcagggtctcccgggagccgggggattccgcccgccgcgtgcgcgagcgcgcgtgccccgcgccctcccgcctgccctcttcaactggaaaccagaaacgccggcgcgcctgtggcctgggcgggttggtgcagtaggagctggtgccacggggccgcagctgcgaaaagggggtttcaacttcctgtcctccagccccctggagtcgccggccagtgtcgggaggcccggccgccgcttccttctcctcccgcccggccggagcgcgcccactcccagcttcccgcgggctggtccgggccccaatggccatttgcggcggctgccgggcggagcccgcctcctgggccgcgcgcaccggcggggcaggcctgcttggggtgagctgcggcgtggctggtggcggcggtgggctaggggcccaagggccgcgtctggcccgagccggagcctaagaggcggggacgcgggccgctcggaaggactggaagtgcagcagccacacaggcacagggctggtgccctcccgggccgctgaggccagggggtgcaggggtgggtccggaaggaggttggacactaagggtcgagaccgcagatagacctcggcgtttcggggcagccgaggcccctcgagccccaccgcccggggtccttctctggatgcacttcctcctcccgcttagggggtggtgctggaggcggggagggggcggtggccggagccggcgggcgccggaaccgcgctgctggctagccccgggcccgggtcttctccgcacatgtttgtcatatcctccagccggcctgttcgggcccacagtcctcccgcattagcctgtgtggtcagtgtggtcagcatttgcttctgtgccgaatctctgacttgctgcgtcctggtttaacctgctcttccggagtccgctttccctcgctttgctggctgaccccattcactgtacgcccgccattcctagcccactgcagtcgatactgcctcttatttacttgttgctttttctctgaggccacttcctaggcctgcttcaggtaccatttcccgcctcttctctccattcactcagtactgagccagacaggtctcagccctcgtgggactgaaaatgacaaaaatgtgccaacgtatctactcctgttaggttctgaccactgtttcctcctagttctttatctgtacctttcttctggcaatatcctttactgttatatacatggttattaacttacagaccatcagctcttcaggttacggttcttgtcatcccactcttgattctgcaaagcacctagcagagtgctttgcataaggcacattcttgagaaaatgtccagtgagttgaaatggtgattggtgcccattttattgccagcactactcgttaatacccgaaggttaacaggctagaacttgcataccgtggcagagtcacatcttgggatttttcccttcctggcttctgctctctgttgatgttatgttcttagattgcttattgcagtcaaagaaccctgctggctgttacccctcccttgcaactcttcctgaccctaattgtcttactttcatgtttttttttaaatgccagattttgtgcatttctcccaatatcccagggtgcccaattttatctctcctccctccccaaaaactgtacagccaaaaagactttaaacactttttaaaatttaattttattagccgggtgtggtggctcctgcctgtaatcccagcactttgggaggctgaggtgggtggattacctgacgacaggagttcgagaccagccaggccaatatggtgaaaccccatctctactaaaaatacaaaaaaattagccgagcgtggtggcgggtgcctgtaatcccagctactcgggaggttgaggcaggagaattgcttgaacccgggaggttcaaattaaagcttttagtttttatttttaatagaatccagctaatgcaggacaaaaagtcttgaaccagattttcttttcactccctttttaataggagaagggaactccataaccaaggcttagaccctcttgaggagagaggaacttgaggaaaccataaaatcttacctttttcagactcattaacttaaaatggtttgaaatagcttctggaggaaaaacatgatatagtgaagcttctactctgtcttttgggaatttatggttgtccttataaatctcttcttagtaacaggcaaaacttgttaatttagagaattaaaacatcctctctcaaaagtgaactacattggcttttgaagaactgtgagaatggccaggagtagtattttgccagtatgctgcctttgctaactagcatcatttaagaggacctaaaataagaatactttattaaacatacgctataatccatacttactaaccatagcgcaaattaatgttaacataccctataatccatacttactaaccatagcacgtgttaatggaatggggcccgacttttggagtagcatttgtataaaccctaaagggttcaactgaggctagttttcaagtttattgctgctttaatgaatcattaacctcatactcattggcctagccatgaaagtaaatactgcagactttttttactttgctagcaaaaagtttcatatataataggttagaatagcaattgaaatgcaaagtaataagtgtattcccttgtagaatcatcctgggcctcatcttgaaactacatgtccagtgaaaaatatcctgtctggttatattatctggtcaatgagagtttattacatgaggtagagaaaaatgtctgctcataggtccaaataggagttttgaattctaattttcactgaaaagtccttgcaattttacaacattgaaaatagagacattttgctcttttatgagatgtctggcctttacctgtttttctcactaagagctgacttaagttggaagtgctgctagccagggagcaaaatcacctggtgattgctaaggcgacatataattcattgagtgagaagggaagctgggctctctctgccttctctttcagcagcctgccaggtttgtgctaacagcagtggatgctagttgctccagttgtaattgtctagccaatgatgattatcttctgatgtcggctgacacggtgcccaccaataggaaagcaggaggcctgtgctgactgctgtaacattatgtatgtgaggtgacgtcttcaaagggcttgcctagaacttcatgaaaccctccccctctcctggcattctccacacatccagcctttcaaagctttatatatttttctgacttttctccccactcactcccttggtggtgtaaaagggtttacttgttttaacattttgtattctgtattatagagtctataagatagtataggaattttaagaattaaatgctgttcagctgaggaagcctttttattcacaaatttgtttttaccaaaggtaaaaatggagtgaaacattttattttattttgttttatttttgagacagggtctcactctgttgcccaggctggagtgcagtggcacaatcttggctcactgcaacctctgcctccgggttccagtgattcttatgtctcaacctcccaagcagctgggattacaggtgcctgccatgacaccaagctaatttttgtatttttagtagagatgggaattcaccgtgttggtcaggttggtcttgaactcctgacctcaagtaatccgcccacctcggcctccgaaagtgctgagataacaggcttgagccactgcaaccggccgtgaaacattttaaaaggagttgtacatctatatcttttttgtaggtgaagtttggaaagtaacacgatgtacaatttcatgattaaagaacataaaaagcactaaaaacctgtgttagcatttaactcaaatatagcagcataaaaaatatagcagcataatgttaatgaaactgttcaaatgcagacatagtatttggctgttgtttttcatttagtgaggattgctttgaattgcttcctgaagtcttccttgcaaccttctacattcatttgtaagaaaaatggctggaaaacagtgcatctgtgactatggaacagagtaggccagagtttcatttcatcattaacattgcagcaacaaatttggtcagctctgtaggaatatagtgtgtctatattgtactcatgtcacttgctgtttattttgaggtatcacagttcatattgatttaggattaaaacttgtgtgaggatcataacatgacattcaataatttttagaaagcactgggatgtaggcatatgtactaggttaagagtgagaagaatgagaaaatacatagagaaaaaacgtgtaatctgtgtggggtcctagaaaataatgtaaagttgtgctggagctttgatatgaactttcatgtatcttttaataaattataaatattcatgcaattcttgtttaggattccaaaggatgaaagccagcttaatgcaaaatattttatgattatattatccatctgtgtatttgtactagttataattagtgcttaaaattttttcatgaagtctttttcacattggaagtaaaattttgtgatcttcagaggattgcctgttgcttttttgtttgagggtgattctaaatgtgtcaaagtgtataacattggaacttaatgaaacttttcaaatgcagacatagtatttcactgttgtttttcctttagtgaggattgctttaaatttcttcctgaaatcttcctcgtaaccttctgcgtgcatttgtaagaaaaatggctggaaacttcaaagtcaacttattccatatctaagagttgccttatatacttccttgaaagaagaatctttctttttcttttttttctttctttcttttttttttttttcttggatggagttttgcccttgttgcccaggctggagtgcaattgttccatctcggcttactgcaacctctgcctcctgggttcaagtgattctcctacctcaacctcctgagtagctgggtttacaggcatgcgccactacacccggctgatttttttgtatttagtagaaacgagttttcaccatgttagtcaggctggtctcgaactcctgacttcaggtgatccacctacctcggcctcccaaagtgctgggattacaggtgtgagccaccatgcccggccagaggaatctttcagcttagatagtggaagagttatgagggggacggaggttttgaaatacttagggggatatacaataaccatctaatcaattttctttttcttttcttttttttgagcctggtcttggctcactgcaacctctgcttcctgggttcaagcctcagcctcctgagtaggtgggattacaggtgcccggccccccatctaatcagtctttagacaacaaagtaaaatgagtgtggcaccattctggcaattcaggaatttatcttggcttaagtgatctgaaatatttcaggtccaagtattttattttctgaaatgagttaaccaaacattgtcttaatgattaacttaatttttcacatatggacacaggtgagccaaactgtcctttattaataggaaccagacatcattctacaaagtttgcctcagccctccctttactctttatgtagctcacatccacccgctcccatttacttctcatttatcttttttaggagggtttagggaaagttacctgtaccacatatgtcatttctgttgataaccctaggtaatctgagtgaaactatgacttggctatattgtaatgttaaaactcataacttcattcctttatccagattctgattgtacatgtattcaggcaggtacaaatgttggcatagttattgaggtttctgagaactttaaaaaaacccagcatctctaattatatttaccctccaataatttattttagagatacatgggtccttttttaaaaagtattgtatgggtcgggtatggtggctcacacctgtaatcccagcactttgggaggccgaggcaggcggatcacttgatgtcaggagttcgagaccagcctggtcaaagtggcgaaaccctgtctctacaaaaaatacaaaaattagctggtcatggtggtacgcacctgtagtcccagctactctggatgctgagacacaagaatggcatgaacctggaggcggaggttgcagtgagctgagattatgccactgcaatgcagcttgggcaacagagcaaaactgtgtctcaaaaaaaacacaaaaattgaaaaaaaaaaaagtggccgggcatggtggcttatacttgtaatcccagcgctgtgggaggctgaggtgggtggatcacttgaggtcaggagttcgagaccagcctggccaacatggtgaaaccctatttctactaaaactacaaaaattagccgggcgtggtggcgggcgcctgtaatcccagctactccaggggctgaggcaggagaatcgcttgaacccaggaggccgaggttccagtgaggcgagattgcaccattgcactccagcctgggcaacagagtgagactccgtctcaaaacaaaacaaaacaaaaaaagtattgcccaagagtaaagaatatgaatttgtaattttaagttggttgtgcaatagttatcccaaagcttggaaccatgtcagtcatctaaggtcaagcctacacatttatcatgattcctttctgcattgagtgtttgcgacttttagttttaaggttcctattactaggaaaccctttgttgagttagttgcccactgtgaacttactgagatttaactttaagtctttactttgtacaaaaaaaaagtacaggagaaaaaagacttacacttacctttgctaagataaatttgctgagataaattagacatgctgattgtaagtagttttgctagaaaatcactcatagttttgtaatacttttatttacagggattcatatttcagttttttttttcttgctaaaacttttatagaagagttcctagttgtgatataaggaaagttttattgatgaaatatattttggggagggagatctacctcctcaaaacacacatgaggtttataatccaatttttttttttttttgagatggagtctggctctgtcgcccaggctggagtgcagtggcatgatctcggctcagtgcaagctctgcctcccgggttcacaccattctcctgcctcagcctcccgagtagctgggactacaggcgcccacaatcacacctggctaatttttctatttttagtagagacggggtttcactgtgttagccaggatggtctcgatctcctgaccttgtgatctgcccacctcggcctcccaaagtgctgggattacaggtgtgagccactgcgccaagccctataatcctatttaaagtgaaacaagtaaacaagtataacttcattttcttcttttctctctctctctctcttttttttttttttttttttttgagacagagtcttgctgtgtctcccagtctgagtgcagtggcatgatcttggctgttagttcactgcaactcccaccttctgggttcaagcagttcccctgcctcagccttctgagtagctgggattacaggcacctgccaccacacctgcctaatttttgtatttttagcagagacggggtttcaccatgttggccaggctggtctcgaactcctggcctcaagtgatccgcccacctcggcctcccaaagttttgggactacaggcgtgagccactgcgtctagcctctctctctcttttttaaatagagacagggtcttgcttgtcacccaggctggagtgcagtgtcacaatcatacttcactgtaatctcaaactccgcttcttggtccaagcgatcttcttgcctcagcctcccaagtagctgggattacaggcacgcaccaccttgcccaactaatttttttattgtattggagagatgggggtcttgctatgttgcccaggctggttttgaactgttggcctcaagtgatcctcccatctcagcttcccaaagtgctaggattacaggtgtaaaccaccacacctagacagcagggtagattttcttcattcaggagcaatgatactaacagttaatacatggttacctgattgcaggcatccttttataatgttttacttttttttttttttttgagaccgagtttcactcttgttgcccagtggagtgcaatggcatgatctcgactcaccgcaacctctgcctcccaggttcaagcaactctccgcctcagcctcttgagtagctgggattacaggcatacgccaccatgcctggctaattttttttgtatatttagtagagatggggtttcttccatgttggtcaggctggtctcgaactcctaacctcaggtgatcctcccacctcggcctcccaaagtgctgggataacagtcatgagccaccgcgcctggccaatgttttacgtactttaactgttaaacccttgcagccaccctttatgatcttttgcacgatggacaactcaggaaggggagttgggatttgcatgtaggaatcagaaaaggaaaactgggttccaggcttgaataaggcttggatggctggtgtgatgatgaggggtgtgtcacaaggccccaatcatcctcttatttgaatattaatataatattcaatcagaaaaacaatgcacttgaaaacttggctgcactggaaacgtgtcaggtatctgtggttttagtcaatgatctcacaaatgtctcttttgttaataattttcactgggtggatcctgaatacttaaggccagaataaagctttggcctatgaaatatttactgtctgctctgtgatattaatttcttgcactcagcttggttctagaccctgggaatttgtgtttccatctgatctgcagccagactttcttcccagcaggttttagtgtagctacttgtaaatagccacccactgttgacagtaaaataaaaatatgtgggttggggatatccctattcttgaaggtcagctcctacaatgtgaagaatcacagaataccttttgtttcattttagtagctttaaattcttttcctgattctaaggtaagaaatagttacaggaaaagaaatgaaatgaaaacattaagaagtataaagatgtcggaaaggaaacacctttaattcttttccagaggctgccactgttattttgctccatttccttcagccttgtttccaggttttttagtatgccttagaccattcagtacctaaactgtgacagcctgggttccctactatgtgccagggactgcactgaacagatttacgtactatcacattacaattttttttttttttttttagatggagtttcattcctgttacccaggctggagtgcagtggtgtgatcttggctcactgcaacctctgcctcctgggttcaagtgatcctcctgcctcagcctccctattagttgggactacacatgcgtgccaccatgccaggctaattttttgtatttttagtagagacggggtttcactggtctcaaactcctgatctcaggtgatccgcctgcctcggcctcccaagcaatttttttttttttttcattttgctgaggtctaacttgagaagccttcatttgtccaagcagttaggttatatgctttttctctgcttactgtttgctacatagtaactcttgtgaagaggtggaaacttcatgtccagtcaaaaatggctccagaaaggactgaaacaatagatactatgtaaattaagggacaattaagaggtcaaaggacctcttaattgtggtgcttaatcagaagaaatttgttttatggagttttccataggaaaaggagtgattttcagactcttttactcatatgcctctaatagaagtttaaaaaactatgcactgcctcacacatttttaaattttcatcataaattgaaatgttaaaattgtaatagaataaatataaaatgagtgaagataaggattggctaattataataactattacatgacatcataagataggtttacctactttattgaataatacataatgaatttgaaatcacggaacattgacatccacggttttattcaattgatagtttttttttttgaaacattccatatatatgtatatatatatgtgtatatatgtatatatttgtgtgtgtatatatataaatatatatatatatatatatatttttttttttttttttttgagacagagtctcgttctgttacctaggctggagtgcagtggtgtaatctcaactcactgcaacctccacctcctgggttcaagtgattctcccaccttagcttcctgactagctggacttacaggcacgtgccaccatgcccgactcatttttgtatttttagtagagacagggttttaccatgttggccagggtggtctcgaactcctgaccttaagtgacctccgcctcctgaagtgctgggattagagccattgcacctgaacccattccacttatatttaaaataatcactggcactaacccatactgcttgttttgaatcagaaacatcccaacattcagaatgtagagagtctgatcagaagaggacaaaagaaagactatcacactgcttctcagtgttgtttatttttacgttgtgtgggggccggtaggagagagatgggtaggctatcagatgtctcaaaataagttttcttgactgtagagaaggttatagatgatagcatttttgtgtgggttggtggtcagcaggaatagtcacctacttgttaagtcactttattttttttctgtttgtttttgtttttgttttgtcttgttttgttttgggacggagtctcgctctgttgcccaggctgtagtacagtggtgcaattttggcccactgcaacctccgcttcccgggttcaagcgattcttctgcctcagcctcctgagtagctgagactacaggtgcctgccaccatgcctggctaatttttctatttttagtagatacagggtttcaccatgttagccagggtggtctcgaactcctgaccttgtgatccgcccacctcggcctcccaaagtgctgggattacaggtgtgagccaccgtgcccagccttaaataaatcattttcttattcttctcttggttatccaagacctcaggacttctcaggaagcccctttcagtccattatacatggagtggctgattgaaggtatttctacatactgacttgaaagttctatcctttcattaaaggttcttctacatattgacctgaaagacaggttcctccatcagtcctcctgtcatcctaattgtgactctagctgacttttatttccatttctgcatggttgtcttaatactacttgtacatattatgttctctctaggccttcttttctaagccatttctcaaattttatttgcagtccactggtaatccacctagctacttaagaaaaataaaatattagccctcttttggtttgaacaattaagtattacctactagaaacctctaagagatttattaaaacttgctaaaatttggcacttagtacattcaacacagtaagtctgtactagagacttgctcttgagtgggggtaggagtggggttctaattacatattctgctaaaacggctgcaactcattgctttggaacattgcaaagctcctactgtacatacatgacattctacaaaatttaaggacactgttatcagtgaatacaaggttgccttgagttgtatttagttttgaattactgctcttgcattcatattaacaaaaatactttttttgaacctgtattttgtgattgctgatattatgtgtgattgcactactttggttagtacttggttctttgccagctctttgtaatcactaaatcctttgtccactgacaagagaaaagtgtagggtaagaaaaagctttagaagcttgctccatgtccatgatccttacccaggtattgaatcagacttacatagggtttatttttccccagtacacacatgcacaggcttatctcagggattcagatttagcagatctgtggaggggtccagacaagtgttactgtgaaaaaccttcccacttgccctagggagaagcactgctctgtatgaaactgattccatctctcattctttgggtttgtcttctcaaaccatcgattttacagactgaactcttccttagctaatctgctttacctgctttgtcatctatgtgggaccagtacatagctcagcatgaaagtactcatctcccttttctcctacctgtaatttacaaccaattcctgtgtgagttggctgtcagttccctttttctcggttcattgtgcttgccactgacttcctttagctccccaggactacttttagtcttctagattcctacctcccattgtctttctgagtcactgatctgatcttgtcatcacaatggttaaaaaccttcagtggtttcccgttgttttaaggtcattcaaaatctggcaccaaattcccttcttaatgttacctctagaagcagcccttgtccagtgcctacttagttgaaatttgaattccaaagccttcttctctccacccatctatatctattgctctttatttgtggttcactggcacttggtttataaatagataaatattttctctgaaatcagtgcttaccacagaatttggcatattcagtgtttgaatagttgaatgcatgcatgcatggacatacgaggctgttcattaacttttaaatgtatctgattatattatctggcactgctttgtatttcgttaagtgaatcatgggagattgtccagtcccttaaaaatattttactctcttcatctgatctcatttttaagaagaaaacataggcatttaacatgactaattatcagtgaatccatgctaactgttggggattattagtccttttctagatactcaaactatctattccaatcagagagagatgatttttttattttatattttattgattgattgattgattgagacagggtctcactctgttgcctaggctggagtacagtggtacgatctcagctcactgcaacgtctgcctcccagtctaaagtgatcctcccacttcagccttccaaatagctgggaccacaggcatacaccaccacgcatggctaatttttgtattgtttgtagagatgggatttccccacgttgcccaggctggtctcctgagctcaaagcaatccagattgctgggattacagctgtgagccaccgtgcctggctgagatgacttttaaaaaaagacttctctaaagtagaaggaagggtggaattgtatgcacaagaagaaaaaaacctggaagaaaaacatactaaagaggtaaaaaaaaaatagatctgtaaaggtggtaaaacaatggttattatttatctttgttgatgaaaagagcacagcactgtaaaatatttgaagagatttattctgagccaaatatgagtgaccatggcctgaggtatagtctcaagaggtcctgagaacatgtgcacaaggtggctggtttatagcttggttttacacattttagggagacataagacgtcagtcaatacatgtgaggtatatattggttctgcccggaaagcaggacaacttgaattagggaggggatgttgcttacagctgggttcaaatattttctgattggcagtttgttaaaagagttaaattattatctaaaagccaggaatcagtagaaaagagtgtctgggttaagataaggggttgtggttctacataaggttcttaggtagataaagtctcatacgtgactgcccgtagtagcaaagaaacatattttgggtgtttttttgtttgtttgttttttaaataaagtcatctagaagcctcggggtaaaatattttgatttccttctttatctgtcatgtgatgttatgccagattcaggtttggagagattttatgatttgtatggtgtgactccccagaccctttagctaggaatttgggcaagagagaaataaggtcagagtttactccttatccttctgctgttccagttttcatttttttttttgagacggagttttgttcttgttgcccaggctggagtgcaatggcgcaatcttggctcaccgcaacctccgcctcccgggttcaagtgattctcctgcctcagcctcccaggtagctgggattacaagcatgggccaccacgcctggctaattttgtatttttagtagagacggagtttctccatgttggtcaggctggtctcgaactaccgacctcaggtgatccacccacctcggcctcccacagtgctgggattacaagcatgagccaccgcgcccggcctccctgttccagttttctataatctgttcatattatattctgggtatatgtgggtggtgtgattatccatgtggtcttattttcacattctttgcattaactataatgtacttaatgttttaagataagtttcattctacaaagatgtatgtacaatacctggtatcaggtaacaatcttaaaaaaactaattcatttaaaaataaacattaaaattagcaatacaattaaacataaagacagtttgtgaggacattgaactgcccattcttactccaaatgaatttgctttcttagactgaggaggaggggccatattgttgatgtcacaataaacttgtttctccttcttcaataataaattacataatttgatttttttaataggaaaggatcatacttcaagggaggatgataaaaaacattaatttaactttagaattacaacttttacatgtgggcccaggaatgtatctaatgggacaaaggttccccagggacaaaagtcatctaatctaatacagacaaaaggttaagcataaacctgtccctagagtgagaaaaaaatgaatagaataattggctcagggaccttgtggcacctggaaacagatgctgcacacgtacctggagtacgtggttaacaaatatcttcagtagtactgcagaatgcctaggagatagtgtctggttaagaggagctagaaagattttgatactctctgaaacgaagtttagaaggggccagtctgtctagtccagaggccaggctctgtggatccagagagcctggtatgtgtgatctgcttgggagcaatgtgacagggctttccacaggactgctttgtgaagcagatcatactggtctgggccatttctagtcttctagacttcctttctgagagaagaaagatggagaaggttacctttcagtacacagaaagtagatgttttgttttgttttacattttattttattttctctcctctcctccttgttttacatcttagttaaccctgtagttgatcaagttaactaggatctaggaagttggcttagatctatgaagacctggctttccatcccagtctttttctctccattgtctatgtccctagaggttagaggagactggttcaaaatcatatacagttttaactttatttatttatttatttagacagggtctcactctagtcactcaggctagagtgcagaggtgcgatcttggtttactgcagcctcaacctcccgggctctggtgattctcccacctcagcctcccgagtatctggtattacaggtgcacaccaccacacttagctaattttttgtatttttagtagacatagggtttcactgtgttgcccaggttggtcttgaactcctggagtcgagcaatccacccgcctcagcctctcagagtgttgggattacaggcgtgagccactgcgcccggccttaatttaatttaatttttttttttttgagactgggtcttactctgtctcccacgctggaggatagtggcacaatcatagctcactgtaacctcgaatgcctaagctcaagcaatccttccgcctcagcctccctagtaggtaggattacagggatgcattaccacacccagctaaattcttaaattatttgtagagactgagtcttgctatggggcctgggctggtcttgaattccgggtctcaagtaatctttctgccttggcttcccaaagtgctggggttacagatgtgaaccaccacacatggccttggaatatagtttttaaaaatctctataaacagctcttggctattttttgttcctatcctttatctaaatttagacaaaatttcattcttaagctatagaccacttaaattattatttctggatataagaaaacaaagtataggccaggtgtggtggctcatgcctgtaatcccagcactttgggaggctgaggccgtgaggccaggagaattgcttgattccaggagtttgagaccaacctgggcaacatggtgagaactcatcttgctttattaaaaaaataaaaataaaaagagaaaataataattagccaggtttgatagctgcttgtagtctcaactatttgggaggctgaagcaggaggattgcttgagcccggagtttgaggcagcagttaaccatgattgtactactccactccagtagcctgggcaacaaaatgagaccctgttcctataaatacatacatacatatataagtaaataaataaagctttcttaatgatttggcttattctttttaaatccagcaaatgttaattctaaactttagttctgctgttagagtgagacgagattagcacattatatctgctatctgggcttagattgtgggtgttatttcacacagataattcaggcaaacccgagatttttagggggtgaacttgcattatatggatacaataagcacactcacaatagaaaactatgtggcatatactaaaagaaaaaactctaccgtgtttttgagaattataccatggataagtaacagaaggctcatcctcagagacctaagagtttgtcttctgactaaacattttatggctgatatttcttccccacagagcattcagtgtccagagactcctttttccccagcaatgctggagggatgaggaatagggagtgtgaagctgatgacatgttctaccttttcatgatggagtacagaaaataactaaaattaggtgctaatggttgtccttcttcaggattaaattttactcagtggaaagaatataggttcttttatgtttatagtttatcatatctagatgtgctataatagatttaaactgttttctctaggtagttacaacataacagctccgtatgtcttgtttatatgcaatatctaggacatttggaatgaagtagttttccaaagcattatataaattaagttttcattgaccttaggccagaccatcaatagcttgctagttgtctttaatattagcttaaattgtattttttcatgtgaaaatgaaaataaatattcttgttttctctttatttcatttgggtttaatgatttaatatttttgcccttttcttttgaaatggaattttgctcttgttgcccaggctggagtgcagtggcgtaatttcggctcactgcaacctcagcctcccggtttcaagcaattctcctgtctcagcctcctgagtagctgggattacaggcatgtgccaccacacccagctaattttttgtatttttagtagagatggggtttcaccatgttggccaggctggtctcgaactcctgacctcaggtgatccatccacctcagcctccttaaatgctgggattacaggcatgagccactatacctggcctatttttgccctattttctgaagtttacatacatgtattttatttgtctcgtcaattaaattgtatgtatctggaggcctagaattatgaaggtatacatataatctttttttttttaaagattttacctaacgtagagaactactaggattcatcttgataaataaaaaaatacatacttttgcagagacacttgtaaaagcataaacattatcagttgtagttttctgcttcttgtggataggcttggagcaggtaactttaatacattgtagaaaatttaagaaacacaagtgaaaagaagaaaacaaatgtcaccctgagatatacactaacattttggtgtaagtctttcaaaactttttatccatctttatgtttttgtttgtttgttttaggacagagtctctctctgtcaccgaggctgctgcagcctcagtcttctggctcaagtgattctccagcctcaggctcccaagtagctgagactacaggcaagcaccaccacacctgactaattttttgattatttgtagagacgaggtctcactatgttgcccaggttgctctcaagtttctgagcttaagcagtcctgacttggcctctcaaagtgctgggactataggtgtgagccaccgcgtctggcccattttcctttttttttttttagatggagtctcactctctgtcactcaggctggcgtgcagtggcacgatcttggctccatctcagctcactgcaaccttcacctccccagttcaagcgattcttctgcctcagcctcccaagtagtagtgactataggcgtgcgccaccacactcggctaatttttttttagtagagatgggttttcaccatattggacaggctggtctcgaactcctgacctcaagatccgcccaccttggcctccccaagtgctggaattatagtcgtgagccactgtgcacggctcgttttcttttttacaaaaatattatcatagttttcataccatatttttctgtagcctaacttttaagaaatatatagaatggatatttctgcatgttgttaaatacttcctgcaccaaactgtaaatgagagaatttgtttctttaatgtaatgttctggctgacacatgaaaagcttgaggagatgcatctcactctttttaggtagcacattattttttaatcatttttagacgacagggcaaagaaaactagtagctttagagaaacacaaaatatactgaataatagtattacaattgttttaagtttgaccagtcaggtacaaaatgcaataagtttcagattattttcttcatggattatgtcatttttgggtaatactcatcagtttggtgtgaagaacatttatgccaatcagggaacttttaggatgttttcaactgcaagtaacagaacttaattaactgtagcctaaaacatgaagacttttaattatttcacataacaataactttgattggaagcctcagtggttgtttagtggttttaataatgttatcaatgacctaggttctatctgagtttccgttttgccattcataatgtgtcaatagttttttcttcatggtcacaaggtggctgccatatcaccaagcttcccacacaagcatctcaagcagaaagaaaggagcagtggcatgggagcctttttatttgctttcttgtcaaggcaaagcctccaagccaacttgcactcagtaagtttataaaaggatatgctcttattttattattattattattatttattaatttattttttaagaaacaatgtttcactctgtcagccaggctggcgtgcagtggcatgattacagcttattgcagtctcatattcctgggcttaaatgatcctcctatcttagcctcccaagtagtttgaactacaggacatgccaccacacctgacaaattctaaaattttttgtagagatggggtcatgctatgttgcccaggttggtcttgaactcttatcctcaagaaatcctccagccttagcctctcaatcactgggattacaagcatgagccaacatgcctagatctgctcttattattgctataatttcatgccatcagccaggcctggtgatgtgtttcactcttggaccattcactgacagaggatggggattgctttcctacaccaactcttaaatgacaaagaggccgggcgtggtggctcacgcctgtaatctcgcactttgggaggccgaggcaggcagaccacctgaggtcaggagttcgagaccagtctgaccaacatggagaaaccctgtctcttctaaaaatacaaaattagctgggcatggtggcacatgcctgtaatcccagctactcgggaggctgaggcaggagaatcgcttgaacctgggagacaggttgcagtgagccgagatcgtgccattgcactccagcctgggcaacaagaatgaaactccatctcaaaaataatgacaaagaatgacaaagagagtgatcgccttgagaggcttaaaccagtcttgcactttgtctctcaagggccaggcacattgccctccacacaatatcgggtaaagtttatctgttggcaaaggagggggattgggttggctataagttatctttgaccacgctagcacaaaaatgtatactctcagaagaaagaaacaatttcaggttgcggtaaaaatcatgttgggactttttacatgactcttcacaaatggaaatttcttctaaaaaaatagaaactttgaggctaggcgcagtggctcatgcctgtaatctcagcactttgggaggccaaggtgggcagatcacaaagtcaggagtttgaaaccagcctgccaacatggtgaaaccccatctctgttaaaaatacaaaaattatccaggtgtgatggtatgtgcctgtagtcccagctacttgagaggctgaggcaggagaatcacttgaacctgggaggtggaggttgcagtgagccaagatcacgccactgcattccagcgtgagcaacagagtgagactccatctcaaaaaataaataaataaataaataaataaataaggtagaaacattgatttattcatggtgttgttaaatgtaaactattgagtaaattactctttaatctctgaagatagagctctagatactttcttgttctttttttttttttttaactcaccactatgccaatgaggagagctctagatacaaacttcctaatggaagtggaagaataatgatttaaacaagtacaaatgattaagaaagaatagttttacacattacatgacatgagatcctaaaacatgaccccacattgagaaagctctgtgaccattgatactggaatctatcattcatcatcagttactcagcacataataaagatctcacttacccttcctatgaaggcatgacttagactttatttgctgttactgtctctgttggatcatatgatagtaacatcataaagagggatgatagatgtaatgtaactctagggctagactgcctgagttctgatccttgttcagctttgtaaccttggagagggtaaaagtcttctataaagcatagtttaataataataaactaacctgataagagttgttatattgattaaatgagttaatatatgtaaagctttcactgatgctgtatatgttttagttatgttgttatcattgatgttacttacatatgtcagtatttaaaattttacacactacatttactttatctcatagtctccttcaaccctataaaataggatttttcatctccattttataggtgagaacattatatttatgtcttttttttttgagacagagtcttgctctgttgcccaggctggagtgcagtagcgcaatgttggctcactgcaacctctccctctggggtcaagcgattttcatgtcccagcctcccgtgtagctgggattataagcgtgcaccaccacgcgtggctaatttttgtattttttgtagagacagtgtttcgccgtgttggctggctggtctcaaactcctagcctcaagtgatctgcccgcctcagcctcccaaagtattgcgattacaggcatgagccactgtgactggccgatacttatgtcttgattgtatatgagcccaacagtgatttgatttttttttttagttttttaaattataaattatatttatagtataaacaaattataacatacatggaatttacacattcttagattatttggtccgtaaaattagattaagaagaagcgaaaggaatgattagttaatacataggatactaacaagtatcctatgagttaattgcactctataagaataattaggttgttcatttagtgcattatattcttgggatggttttaggtgcatctaaatctaaatatgccaactttgaagcaaaagtaaaaatgtaggtaaaggtcatgttatatagtgtgacaatttcttgtgctttacatgtattctatagttgtagaatttccatctgtgactaataggtcttatagcagaaaagcaaattcattttagtgaacgtgtgttgacattataggaatgtcaacctagcacatcaggaattctaaggtcaatagaaaacttggtaagtctagtctgattcagtagggccacaggcaaaaagagataccatttgacctttttaaaaaatgtatgttcaaaagtaaaagcattcattattatgagaatatatatttaaaatgcctgaaggccaggcgcagtggctcacacctgtaatttcagcacttggggaggccaaggcaggcagatcacttgaggccgggggttcaagaccagcctggccaacatggtgaaaccccatctctactgaaaatacaaaaatcagccgggcatatggtgggatgggcctgtaatctcaggtactcaggaggctgaggcaggagaatctcttgagttgcggaggtggaggttgcagtgagccgagattacgccactgcagtccagcctgaacaacagagtaagactctgtctcaaaaaaaaaaaaaaaaagactgtctttctttacatcctgatattttaaaatctttttctttctttttaaaaaaagtttttaaatttctaatttttgtgggttaatcttttttaaaatttacattgaaagtcatgctattttttctatccaacgaatatttatcttgcttttttatatttttatttttttaacttttattttaggcttgagggtacatgtgaaggtttgttacataggtaaacatgtgtcatggggatttgttgtacatattatttcatcacccaggtattaagcctagtacccaaaagtgatcttttctgctcctctccctcctcccaacctcctccatcaagtagacctcattgttgtttctttgtattcataagttcttatcatttagctcccaaggtaatgctattttatcttatttcttgccagagcatctagcagtaggaccaatcagttgatcgaggaatttattattattattattattattattattattattttcctttacctgatttctagttctgcaaaaggccacctttactttgccctgttattaaacagtccatgtcacttgacctgatcaaggaattttttacagttgaggaaattttggcaaaatgcagccataggctgagtgacatggactgtttaataacagggcaaagtaaaggtggccttttgcagaactagaatatcaggtaaaggaaaccattcttatcaggtctaatacaattttagatgatagtctgaatctttcagaatgtatgagacctggatgttctaggatgagaatggctggttgtgggtatcactagtgacataaacagaacttggaacagttattgccatcctgggactagcactcagagaacacattggtctgctgggatcacatctcacctgcttcccattactgcctacttctgtgccttgacagcctgagttcatatttctctctgtttgttctcatgcttgactaagtcacacccaataatttgttctgtctgggcggagaagcaggtcataggtgctatttgaatacacagataggcagatcaagtcagtggatgaaatagtacactattatggcaataaatggcatgctttttgtctttattacacaaacctgtgggtttacttagcacaagacaaatgggaaggtgtcactggaacataagcatatgagaatccacataggcatatgcagtgtgtctctccttttgcattctttgttgtgcttaggacttgaagacaagaaggtttgggaggtccagggagtattgttggttttcctttttcccctgcatgtgacactcaatgaaaagtctccatattccaggggtatatgtccattgtttcactgtaacaagacttaaaagctcttagcagagtttacagtaaaaaacatcagcaagaatttttaagtactttgggctaatgcagttatttatttttgtaagcatatattttaaactaagtaaaatcagatctcaaaaagacgtttcttaagaagaagggtattcacttaactaagcaaccagtgtcaagtgtggatgctatcctagaaggctcttctttctcagtgcctaatccatgtacctgggatggattagtactatctacctctaatccttgtactttgcaggaggtccaggcaattctcattacttgctgtagttatgctttataaagttgctgggggtactgaattagcaaacactgaatcattgctcccaggtggaatataagaattaagttcctacaagtgtctggtcacaacattttcaacaattgatcaatacatgactttcttttaagtgtgcttctgttaaagacgtcttttgtatgtgagtggaaaaactcaaaactgtttttcctctgttctcacaccactacccaagcaagcagtaaattctgcagcagacatccactgggtgtcctccagttcaattttgacactatctgcttggagatagggacagatcccacaggttaaagtcccaatccccaagactacctgctctccccagccaagagtcacatgtctgggtctctggaatttctgacctctgagtggcttcaagttgggattctcatgactttgggttgcactaatttgctagacaggctcagagaactcagggaaacacatgtattagtttattataaaggatgttataagtctgggcacagtagctcacaactgaaatctcagcaccgtggggaccaaggctggaggattgcttgagcccagaaattcgagaccagcctgggcaatatagtgagaccttgtctctacaaaaagctaaaaaataagccaagtgtggtggcatgcacctgtagtcccagttacttgggagtctgaggtgggaggaaagagcacaggaggcagaggctgcagtgagccaagatagtgctactgtactccagcctggacaacacagagagagaccctgtctcaaccaaaaaaaaaaaaaaaaaaaaaaaaagaggatattatgcaagatacagatgaaaagatacatagggcaatgtatgggagaagagcttggagcttccacgtcctccctacgtgcaccaccctccagtaacctccaggtgctcagctatctggaaattctccaaacccaatcttgagcttcttatggagacttcattgtgtaggtatgattaacaaccatgcagaaatgtgattggacaaaaaaggtatgatctaatactatttatttatttatttatttatttatttatttatttttgagatggagtttcactcttgttgcccaggctggagtgcaatggcgcgatcttggctcactgcaacctctgattcccaggttcaagcgattctcctggctcagcctcccaagtagctgggactacaggcatcaaccaccacacccagctaattttgtattgttagtagagatggggtttcaccatgttggtcaggctggtctcagtttaaactgacctccggtgatctgcctgccttggcctcccaaagtgctaggattacaggcatgagccacagcgcctggccaacctaatactcattgactgagcgggaaacccagcaaggcctgtctgttcagattcttcttggcctgtgtgtcacattccttcctccagggtaaggggcaagatcccttctgaattgagggtctcaggactcaatcagaaaggcctgggaaggttagagttctgccttgggctggggaaaccagggcaagggaaggtcagagagagagagattccattttttgaggcctttttctgggcctaaagtgccccaacattataacaaaagactttaacagggctgtgggagttgcgagccaggagctgtggatgaaacctgtatatataatatcacacatcttatttaatatattgttgatttgttgacattgagcttgcagtcaatatcaactcatgcctgaactaagctaatctaacgtgtttttctaaggcaaatcataatcttgtggttaagaacactcctcagcatgtcagcactagaggccaatttaaatagggaaatcatgaaaaagcacaaaaatgtaagaaaggtaggaccaagtacactgcaaaaaggacatttgtttagagaatgagagtccaaaaaagaagcagagcatcacttggtttagcctcagctagggatgtgcacattgggcaacttaattttttcactgctctttgcatgaccacaaatgactacaaaagtactatgagtattgatttggaggttacaaataaattttagcgagtatgctaaataagtatgaattcttagtaatgaggatcagctgtattctgttctagaagtaacatgcaaagttcaagcctttatcttgttttttgcataattcaaatttataatggcagcacacaacctatacttagcagtaaatatatcacaaaatgctgataagggaactttattttcatatagagaacttgtcttttcaaatttaaatcataaagcatgttcttaaggctggagatttaaaaaatttataaatctaataaatatagaaaacaaaatataggctgggctcagtggctcacgcctataatcctagcactttgggaggccaaagtgggtggatcacctgaggttaggcgttcgaggccagtctggccaacatggtaaaacatggtaaacccccatctctactaaaaatacaaaaattagccaggtgtggtgtcacacgcctttagtcccagctacttgggaggctgaagcaagagaatcgcttgaacctgggaggcagaggttgcagtgagctgagatcgcaccattgcactcagcctgggcaacaagagggaaactccatctcaaaaaaaaaaaaaaagaaagaaagaaaagaaaactaaatataaaatgaatataagcataaattcataaaaataaaaattttcttaaaattagatcaaaaatttttgtttcctaagggagaatccagagagaactgggaagaagagtggataatttccaaacacctgtgtgtgctcacacacacaccgtgaatccttcaccattgttttaatatggaagatgattggagtgtgttttctagaaattctgaataatacttatttaaagacttctattgggctggccaggcatggtggctcacgcctgtaatcccagcactttgggaggctgaggtgtgtggatcacctgaggtcaggagttacaggccagccagcctggccaacatggtgaaatcccatctctactaaaaatacaaaaattagctgggcatggtgttaggcacctgtagtcccagctactagggaggctaaggcaggagaatcacttgaacccaggaggtagagattgcagtgagccgagatcgcaccactgcactccaacctgggtggcagagcgagactccgtctcaaaaaaaaaaaaacaaaacaaaaaaccccaaaactctgttggggtcgggtgcagtggctcacacctgtaattctagcactttgggaggccaaggtgggtggaccctgtctctaccaaaaatacaaaaattagccaggtgtggtggcatacacctgcagtcccagcaacttgggaggctgagatgggagaattgcttgagcccaagaggtctaggctacagtaagccatgatggtgccattgcaaaccagcctgggtgacagagtgagaccctttctcaaagaaaataacatttaaaaaagacttactggacgtttaataaggatattattaactaataatcattgagcttaccacgtacccactaaaggcttcatgaacattaatttaattaaccctccattttatgaagtaggctttgtgattgggcatgtcttggagatgaggttaagtaacttggaaaaggtgggacacctggtgattggcagagtgaggcttcaaacccaggcagtctaggtccacactgcctgtccacagagtctgggtctctcctgctttggcttatgacgtcagcacctactgggaaaattacagaaaccattttcaaaggtgatattttgaaaagcatatggtggggctcattttgtttaaatgagctctgcacaatgaaagcacgtgagagcagtttttgaaaaagttctgattgcatccattgaatttgactttttttttttttcttttttagacagtcttgctctgtcgcccaggctggagtacaatggcacgatcttggctcacagcagcctctgcctcctgggttcaagtgatttttgtgcctcagtcacccaagtagctgggattacaggcatgcaacaccatgcctagctaacttttgcatatttttttagtagagacggggtttcgccttgttgcccaagccggtctcgaactctgggcttccagcaatctgcccacctcagactcccaaagtgctgggattacaggcatgagccatcacactggcctgaatttgacccttactctaatgatttatagccatataattctcatgcaataagctaaaaatacacctaaaaatgatttactctcaaagggttttaactttttttcattgaatctcttttatgttcacttaaattttggctctgttcataaattgatacaaagacaaaatttccactaaaatattaatcttaagtagtagacgttttctaactataccttccaattggaattaagcatttaatctaaaattatatatcaaaaatacaagaaagaacttccttaattgcctggatatgtttctgcctctcaaggcctcagaaagttttgtacaaactgttagaatagccctaatcatggagataggtgttttattttttctctccaaaagcataagagaggttgggtgcagcagctcacgcctgtaatcccagcactttgggaggccagggtgggaggatggcttgaggccaggagtttgagaccagcctgagcagcacagggagaccctgtctctacatacaaacatacatacatacatacatacatacatacatacatacatacatacatacatacataactgaggtggtggcaggcaccctgtagtcccagctacttgtggaagctgaggatcattgcaccactgcactccagcctgggcaacagagtgagactctgcctcaagaaaataaataaaatttataatgttcccccttcactcccctctctgcaaccaaaaaaacatcctttagtaactcttatgtaaccattaaaactatattatagaagaatatatcttgacaaaaaaaatgtataccacatgttgcagaaaactctgcttatgaaacagcatgtataataacaaggccaatttgtaaacacacacagagagagacatatttacagttagtataaggttaagtacttaacgctgtatgtactaaaacacaagtccttttactgtgcatgtaaaaatactctaatagcgattacattttgaagatgggataaagtttttattcctgagaaccagaagtgtgtctcaatgcacctaatatttttgccagtggagagatactgaaaccctgtgatcttcagctactgtgtgcattcagactgtttggtcttcttgggtcaagtcagctggtgattactaaatgatgagagtgtgcctgacatgcaggagacaggtgagaagacaaagaaatagaaggcaatgtcctagcattggcagacagacagaccctctgtatatatttcaacttatttggatcacagtctgtttaggaaggcagatgtacatgcaaaatacagtagaatgctacagaaaaagaacaaatattccagtgctggaatatagtattatagtaactatagtatagaaaatcactatgtgctaagaaatttagaaacactccagcaaaaggcagggactttgagagctaatagttgggttgatgaaaaaggaagacggagtttcctttcatggtggtagcaccagaatactcatgatgtcttatatgctaaccatgagggctgaccatgctgagattaacaggcagtgttcattgccttctggcagcaagggcaaaagtggaaacacaagaattttttcttttttttgagacggagtttcactgtcaccaggctggagtgcagtggcgcgatctcggctcatttacaacccctcctcccgggttcaagcgattctcctgccttagcccttctagtagctgggactacagggcgcgtaccaccacacccaggtaatttttatatttttagtagagatggggtttcacggttgttggccgggatggtctcgatctcttgacctcgtgatccacctgccttggcctcccaaagtgctgggattacaggcgtgagccaccgcgcctggctgaaacacaagaatttaagagaattcttgttatctgaaaagaaaggtgatgtctcattattgctcaagtaagttaagaacaaaccaaggtcctagcccaaagacaacaacatttgaaggaaaatcagggatataatgtcaaagaacactgcagtccaggggcaaaatgaatgtgccttgagcaacttctctaggatctcacttgatagcaggctgggatttatagtacccaggggaaggctgacagtatctttcctccagatcagctctgagctgggcttttgttgataagctgtcccaggagtgctgaggctctgtcactgacagaggaggcagatgtattgaaagcaggatcgtgggttgataatttgttagggatgtagagaagcctaactggttttcttacgtggaaaagaccaccctcttttcccacttcccagatgtgctaaactcttctggcagaggatataggattgtccttggggaattagccttgggttcactccaatgcatgggtaaatgtttggttttgcaaggcaggtgttacctggccagctccacatactttattacaaaaatcctcctgttagttctgacaggaatgcatcataattgttattttatagttgaggaagctgactctcaaagaagtgattaactcatctctgtgtgtgattcagatgagattagaaccgcccagctcctgagaccatgctacttcctgcctaccacagccacatgtgctacagagaacaaagctgaagtgcaggctgctgtgtctctgagctagacaacctgagctcatccctcctgtttcttgcagtgctattaaaatggaggatttgatgagcagcagtagctgagaggagaatcagcctggcctgactaaggtttatgtggggtttgaggaataaagttgggttgtgagggtcgattggaagcttggaagccaggctaaggagttggagtaggtctgctagacaggaaggaaccacaaaatcaggaacataatggtggaagggcctcctgtaaattgtcaatacttaactattttggcctatgaatggcaatagcacatggttccactaaacaggtgccctggtattgttttctgtgagaggataatggagagggttgcttatagtttgtagatatctagcaaatggtctgttttgctagtccagctagtcagaaaccagtcctctttttgaagaatagagatcaaacctgctctacaagcttatatgtttaccacaatttgggtggcatgataaagactaaatgcacagaaaggccacataccacattacattcaggaaatcctttcttagttgggtgtggtggggtgcacgtgtagtcccagctcctcgagaggttgaggtgggaggattgcttgagcctggggggcagaggttgtagtgagctgtgattgtgctactgcactccaacctgggcaacagagtgagactctgtctcaaaaaaaagaaattccccaaaacaagaaattctttcatcagaaataaatgagcagcctaccaacccacctgccttccaacctgagtgtttttttttttttctttttttctttttttttgagacagggtcccactttcacccaggctggagtgcagtggcatgatcatggctcattgtagccttgacctccctgggctcaagcggtcctcccacctcatcctcctgagtagctgggactacaggtgcatgccaccacaccgggctaatttttctattttttgtagagatgggctttcgccacgttgcctcagcttgtttctgccttggcttcccaaagtgctgggattacaggcatgagccacctcacccggctgtgcttgctttcttgtgacaaatgttcatggcatcttgtggcagacttatgaaagctgagttaggtcaaagtgtttccttagtgcctagctcagaatactcatgctatacaaaccgttttactttttcctttcctagggtggccttggcttcatcttccctcaccttaacttgtcatcagggcagcagtgtatcaaactctgggacctgtggattcagacacagtttcaattctgcctttgctacttaatgacttggtgaacttgagcacattcattaacctccctaggcccccatttctaagtgtgaaattgagataatcaaattaggctgtagtaataattaaactagttaaggtgtgtcaatggcttacaaaatgtccagcactttctaggctctccatgaaaagtagcttttactggcatgactctcagcagatattttagtattattttgctttcaactgagtaatgaattcctagccaacatttttgaacttctcattacacattcagaaatgtcatgtcacaaccagggctaagaacttttcattgctcccaaattgcctgtcactatgactcagatttacccacctgataaggaagattccttgaccttaactcaccattcgatcttacagttagttctcccattgctctataagtatcttatgaccctggcaaattaaaccactggaatatctctcttctttctctatttctgaaacttagaaagcccaactcagtgctgccaccttcatacaaccttttaaggttttgaacttttaatcttaaactcttccatttttgcttttcatttggcagtggtagattttctcatattaaagtcagttgtgacttgtatatcacccttctagcattttatactcattgatgataagacttggccttcatcccagtctgctacactatgcggtcagtccataactgttaaatttcagtgactcagtttgatgaatatttattgaggagcctgtatttgccagactctgttccaggcacaaggccgctgttctcagagaccgttcataccactaggacacaaacactaaacatgtaaacaagtatatagacaaaataacattagatgttgctaactgctataaagaaaatagtgtgataggaggtgacttggggccagagggagctgttttagctagggggtcagggaaagccttactaaaggattggcatctgacctagtagcaaatgagaagaccatgttagccctgggcccatctaggagaagagagatccagataggacacaacaaatacaaagccccctcaggtgaactgtgtatggcttcgcacccaagtaggcttctgctttctgttttgtgtctgaatacctcagatattgattgcacatttgaattgtagtttggagttcatatattctcagtgtgattctgtactatttttatctaaatgattgggtctttcttcattcacagggactgattttcccctacatagtcttggacacagaccatttagttcaaaccccagctgcaccactgactgtctgggtgacctcaagtaaattgttcactcctgaagactcagttttctcttcatcaatgagtgtcccaataactgctttgcagagttgtgaaaatctaattaaataatgtctattaactagtatgtagtagaagctcagtaaacagtggaatttattatgttgcatatcacatttgggtaccttaaaatttggcgtacttcagcacattcattaacctcctgtagggaggcaggaggaaaatggcaactttaattttctggggaaaacagtcatccaaaatatctatatattcaggcctggcacagttgttcacacctgtaatcccagcactttgggaggctgaggtgggtggattgcatgagcctaggagttggagactagcttgggcaacatagcaaaaccctgtatccaaaaaatagaaaaaaaattaggcatagtggcatgtgcctgtagtctcaacaactcagaaggctgaggtgggaggatcacctgagcctgaagagctcaaggctacagtgagctgtgattgcgccactgcactccagcctgggcaacacattgagaccctgtctcaaaaaataaaataaacccacaacccacaagatgtctatattcagcaaaatggttcagcacagcctcttgaaatcactacattaaagttttactgagtctgactaaaattaagaaaaaattttggttgtctgttacctttataattaattttactatgggtaatctttcaatcatttgctcagttttctactgttagcattcttttagtttattttttaactttagattaaaacaattataaactaggcatggtataaaatttaaaatgttccacaagggtatgcagtgaaaaagtattttatataaaggactacatccctttccccaaccacacaattctcctccctgcggatagccagtgtgctcttcagagatgttttgtgtgcacaaaagcaattacaaataatgagattctcattattccaggtagatatgttctgtaaagtcaccgcaaacactgaacttgtgaatatggaacccttgcacttagggaaatacagcgttagtttcctgagagcttttggttacaatatttctgatcaacacataacctagttttgtgtgtgtttctgcttaaaataccttatttaacatatattgttgattccttaacatggaactcacagccaacagcactaactcatgcctgaatgaagcttatctaacatacgtagtttctctgtaagacctgttgaagccttctcgttcttaggaacatgagatagcagtaagcttgggagccattttaaaccgtgaaattgccaacacaaagcacaaaaattggaaagacatggaactaaataagactgcaaaagagacacctattttgcagtatgagagctgaacaggaggcagtgtgtcaccttgctccacctcagctggggatgtgcaggtcaggcaactccaatttttcatccctctgtgcatgtttgaaaatgaccatgaaagtgccatcagtatagagttggggttaaattttcataagtaggagaatttgcaaatacagaatcagtgaatgaggattgactatatatttttttcctttaagaacacaaatgctagtatataatacatagcattttgtatcttactctatggacttaacagtgcatcttgaagatattttatacatacacagacatatttcatttgagtaaactacgagcttctgcattctatattgttcaggctgtatataatccattacataggcgtttgtgtttttttccagtcttttattacttggattacattgcactggaaatgttgctagatactgtcttctgtaatggttgtatattatacctctctaccaccattacaagagggaatagatagcattctttcatatagcagcatccattgctaattgtactggataatgacttgaattctatttattctttagtactgatctactctgttggagaaaccaataaggtgcaagactccactgaatagaaaagcaacaattaaaaccataaaggagtcagtcagtgtgtgagatgcttgcattccttctctctgtttagctgtttcccaacccttttatttgttgcatgatcatatctcttatccttatcttcactgtggaatatagtcagtgtttcacatgaaggaatttattaatttccctttgtaattaaactttctatagaaaacaatgtatttcaaaagtgcacattgcaacaacatatgggcaacatgcatatttttagtatttaattgttacaatagcctagagaggataatttcagtaaatcaaaaatatctgaagcttaaccaccatgagactggtgttgatggaagcttgtaaactagcacgcctatgcaaattatttactgatactgtttttaatccctgacttcatttcagtaacaagagatagaccatagaccaataagtaatatattattatagtttgtatatacatagcatgtctgatagcgattcctgctaatgagtaaagcaacacaggaagtcaggggtgggtgggccagtggaaggaagatataattttgcagggatgttcaggaaaacaatattgagcaaaggctataaaatagtgagagtgatctatgccagttttgaaattcaaggccaaggagagggccagtgaaaatgctctacctgtaaggagcttctttgtcaagggagacagggtgtcaggagcaacactgtcatggaaagatctccaagatacactgttaaaaagacatccaatagtgtttgtgtgtgtgtgtgtgtgtttgtgtgtgtgtgtgtgtaagttgtaagcaaaccctcatgtgttgttttttagaaaactttgatgtttaagtgtttttctttaggtgccacttttcctaatgttaaaagaggtcgtaccaatccataagaaaaatatagctcaataataacgacatgaatagaaagttcacaggaaaggaaattttttttagccatttctttcagtagacatgtgaaaaaatgcctaaatatactcataacggaaaaaataaaatagcaatgagatacactttcatcttttagattgtgagaggttaaaatttttgagcagtcatctgagtgttagagagaaatgtgctgttgaaagtgtgaatttttgtacattttggaatccttttgcagggtgactttgcattctctgtaactgttagaaacaccaacgtctcatgtgttaatgtgcaaagatctcaaagatacatcattgtaaagtgaaaaacaccaagatgcacgatagtttttaaaatatgatttttagaaagtatatgcatttattgatacgtgaatatgcataaaaatctgaagtggaagagagttcattaggaaagagaaggagacttggcttttattttacaactccctgtgttacttgacttttaaaaaaaaaagaaaaactgtgtactttatttctatagtaaaaaattaaaaccatacaaatttaattgaaagataacttctttttctactttacatgattaagcaaagtaacttttgtcatcaagttattatcattgtcctctcatatattgttaactaatagttctcttgtactataaatcccatgacagatttttgtctgtcttgttcccctgggtttgccctggtatctgggcacatggaaggcactccataaaagtgtattgactaaatgcataaaggaaaatctttatttaaataaagtatctaatattccagcatgacactatcttcatgctgtcaggtatataattattgtctcagttttacaggtaaaagagagaaaaatctatgcaaatcacaatgtaagtctagaagtgattaaaattgataaaaagcaaagcaactatgcaaagtaagagctgagattcagattttgtgagtcatgactatttgtttaacttagtaatccaatatcttggccaggcacggtggctcatgcctgtaatcccagcactttgggaggccaaggcaggcggatcacctgaggtcaggagttgaagactagcctggccaacgtggcgaaaccccatctctactaaaaatacagaaattagccgggcatagtggcatgcgcctgtagtcccagctacttgggagactgaggcaggagaatcccttgaacttgggaggtgaaggttgcagtgagctgagattgtgccattgcactccagcctgggcaacaagagcgaaattctgtctcaaaaaaaaaaaaaaaaaaaatatatatatatatatatatatacacgtgtatatatgtgtgtgtatatatatgtgtgtgtgtgtatatatatacatatatatatagatgtatatatatatctctctccaatatcttggctgccaattagagaatggttattaaattttgtcctggttcttgactgatcgtgccctcgggatacagaaaaatgttaatgagtgtggagtttttcttcctaagagttgtgttccttctcagtaaacctagtatgattagaggaaatgtgtaggttgatctcacaggtgctacaaaataaagcacatgatgtttagttaaaaatgtttgtgatcttcaaaatggggtttattgaattatagactgtgcacacaatggtccactaggttgttctttactgtagttatctatttctgtggagatggatgaatatgtagtgatgtggaaagatgaacttttcataatataaagcagaatagggttgtatagtatgtttggatttttgttaataacatgttaaaagtgtcaaattgccaacaagggcaagagcataatataatgattttctgaaaccatgtgttaaagcataattaactaacttgacaaatacagtttcaatgtactatatccatgaactttggtttatctttgtgtttatatataaagtaattggatatttaatgattatttaaatgtatttagttaattcttcttgtacctagaaaaggatttgccctgtcaaagacaaagtgctggtccacttcttcatgaatatatatttcctacttttaataatttgcttgtcaatataatgagactaacaaagtgccatttaggctatttcaacatgtgtagttccctgagggcacatagctttacagcttccatagcagatactataattccttgaggtagttggcactcagtaaatgtttattgagttgatgattttcttaaggaaataaaatatccaagaaattttttttttttttgagacggagccttgctctttcacccaggctggagtgcagtggcgctatctcagctcactgcaacctccgcctcccaggttcaagcaattctcctgcctcagcctcatgagtagctgggactacaggtgcatgccaccacgtgcagctaatttttgcatttttagtagagacggggtttcactatcttggccaggctggtcttgaactcctgacctcacttgatccacctgcctcggcctcccaaaatgctgggattacaggcatgagtcaccgcacctggcctatccaagacatattttagagtattcagtcacttcttttccctccctctaattactgtgtactattatttggcattttaccagctcaaagtggaataactatttttgcttcacattgtatgtaccaaattaatttcatattatgcttcagtttctcctactttttgcaataaattatagagggaacaaatgaagtttgtggttacttgacactaggggcgaataaaatgtttgagcctttcttttccctcctccttcttcttggccttgctagaagaaccccaaatgggcagtgacccagatggccatttacttttggactatcctccttttcaaatctgccaaaaatgattaatcagaatgatgattagccagtttctatcagttgttacaaatcaattatgtgactaaggaaactgcatcttttaccagccttgttatggcttcttttaaccgcaaatatccagttactggttaccatatgaaagatttctttgaggactaattttgtgttttcagtgtggatgcttttcagttttatgatatattttgttccaaggcagatactcgttaatcctattttacttactaaggtagtataaaactaactgcttaaagaaatgaattcaatccacttgtctcttctgtcctgaaaaagaagcatgtgctttattacatgggcccgtttctttttctgtttttttgaggcagggtctcgctctgttgcccaggctggagtgcagtggtgcaatcctagctcactggagcctcagtctcctgggctcaagtgatcctcccacctcagccttctgagtagtcgagactgcagatgcttggtgccatgcctggctaattttttaattttttgtggagacggggtctctctaggttccctaggctagtctcgaactcctaggctcaagtgatcctccacccttgacttctgctgggattataggcatgagccactgtgcccagccagaacccttttatttgtgttaatatttagtaagattttagatggaggtcagtccaatgtggaaatgtcttggaaaagcccttacctttcattatctcctctgcagcaatccttcagggagaatcacatcctaattctaggtcacttgttacctaatcctcttttcctgacacagcttctcactccagaaaacattttaacttcctgaatattaagattctactaaatgtggcaggctctgtaacaaccaccaatcctttacattttcaaggtggctctggtgcagcctccagttttcttgtcttccccttcttattttctattcctttatttgtctcttgaataggtatttaaagaaaggaaagcaggcatatttggatatgtgcccactaaggcactattcctgagagaagtttgcaaaatgtctttttcaaatgcctgtgtgctttattattcctatactgccttgtagcaacgctcattattcagggcagtggttctcaacatgagctgtgcttcccgtgttgtaattgtctgggaaccttttataatcaccagtgctgaggccttgacatctgtggaagtgggggtgggaggttaataaatctctccaggagatgtgatgagaacctgtggtttaggaagatgttagatacgaggaggttgttgatctgcccccaagctctctagcaattctgattattttaaatgtacctgcaatatgtagccattgtatcatgcatattgaactgtctcggggtctagatatggatatatgaaccaggacgacttgggactcttactgtctggaaagaatggcattgtgttagaggaaaaataagtgttccaaaaaagctcaatcgcatagataaattctgatatttgtgatacaaattgttaaactttgattttgtaaaatattcaatttgtaatacaacctatttaagtatctttgatagattgaaaaattatttttttctgactattgtaaataataattttttttgctatagattaggagtttcctatgctctcagtctctagggctatcccttctgtattagtataactataactatataatatgtaataaatagtatgtgaccaaatgtaggaagatttttaaagccatgaccattatgatttgattcttaaaaaacaatcataataatttataattgaaaaacttttaagaagtaaaagttttggtctatgtgagtgtggtcaataggtacttcaaaattaaatgttcatagaagtttaaaaaatatattactagttatgccccaaatttgctaaatatttattgggcaattatatattagtatataatagcagtatatgctatgtagattgtatagtacaatatattgtagcaagcatatattaagtgcctaacgtgcttaaaatatattgctcatttaattctcaaataatgctgcaagaatcagtcacaggattgataactgtcaaaaaagtaaaagttggactcagatctctctttgtggaaagtccctgttttgacctctagcacatttttgacctagcatttcttctccaagttaattacaaataagagataggatccatagttagtgtgacattatagcctgtgattatctgttttggtggttacactgccacttccctttcatgtagcaccaagccatcttctcaactcagtggggatggtgtaagagaaaagttagcagctggtaagaaattcggtttgggtctgatgacagaaatagctcaaaaaataactttgctgagaggcaatcacatgttcacatcaagaaattaatatcacagcctgggcaacacacaagagcttgtctctattaataataaaaataggccaggtgtggaggctcatgcctgtaatcccagctctttgggaggccaaggcaggaggatcacatgaggccaggagttcacgaccagcctggccaatatggtgaaatcctgcctctactaaaaatacaaaaattagtcaggtgtgatggtgcatgtctgtaatcccagctgctcggaggctgaggcaggagaatcacctgaacctgggaggcggaggctgcagtgagctgatagcgcaccactgcactccagcctgggagatacagtgagactctgtatcaaaaaataaaataataaataaaataaaatattagctgggtgtggtgtcacacacctatagtcccagctacttgggaggctgaggtgggaggatcacttgagcctagaatgtgaaggctgtggtgagccatgattgcgccattgcacaccaccctgggtgacagagtaagactatctcagaaaaagaaaacaaaagaaaagaaattaatattgatggacaaaaagcctggtacttttaaaatttcttaattttactaaataaaagtggaattggtaattttaatagacaaagtctgtgccttggtataaaattggggagaaaaaaacttcctgtttccttgcaaatgaagtaaagaatgctgttagggcagtggggacagctaagccttgtaaagctgcttacattgcattagaaactacaaagtaagaaatagcccattattccacttctagttatttcaggaatgacactggagagctctgtggatcctactttaaatgaagatctgttagtttaaatctgcaaaaccactcttaaaattttaaaaattataacagtttttcatttctctatatatgttggagcataaggtttcaaaagcttcaatttcagggtgccaagaagaaaactgttttaagaatgggatttacataaagggtaaaatgtgtcaacagcttatgaatctgaaaggagcatttattggctataattttttttacatggcattttcagctgatcacccttgttggattttatgtcaataagtacatttctcatcatctgtaactgtggcaatttttaatcctccactattaattatcaattaagttttagcccaccatctataagtagcatttaaattatcacactattaaagtttaaatcactcaaaagagataagtaggtagtaattgctgtcattgtattttgaagattaatattttgagcaaaaaattaaattatgtataaggtctcataagttatggaagctacctactttctgcagaatggtatgtgtaccacaattttactgtaattataattcccttttcactattattattaaatcttaacagtgataccagaaagttttcataatgtacattttggttataattgtttcttcatctctgtcagggttctggtttcctacttacaagctgacacaggttgtgctgcctgatcatcattaaaatgtgaatttcttattttcaaaaccatacccaaaggcacatcaaaaagaagtggttcgtcaactactgtgtcattcctgctcttcaatagaccagtgtttatactcacggaggggtcacataggtttggcatcctccttttgagagacgaaggattgtctttgctaatttgaaaaagcaaattttgaaagaatgaaatgttcattttgaaataaggtttctaggacagtgcagtaaaatgctttccccttctaaaattttctgaaatatttttagccttctaacataagtgcatgtgtacgcacacactcacatacactatatatagcaacctggttgtcacaatcctcactacttctacgtgtgatctgtgtatgtgaaccagcagcatcactgcagagcttgccagagatgcagaatctcaggcaggccccaccccagacccactgaatcagaatgtgcatttcaacaagattcccaggtgtttcatatgttcaaatatatccacagtgtgagaagctctggtatcaggcatcactgcctggcagaaaggccgggcgtggcactatctgtattttcacggaataaattctcattcagtgactgagagaaccctttgttctttttaaaacaaaggtgatcctgagctgggtgtcagagaggtaagatttgggaaagtaaaggttttataattctaataggatgacaatagcagctatatatataatgccaggaaataatacaggagactctaccgtgatagatgggttttttcctcaatcattttgtctctgatcgtgtatttagttaattctctgcaaagagaagtgtccataataggacttgatatgacataaggtatgccctcttgatagtctttaaggaaactttattatagggtaacccaaccaatattaagttttaaagatattttgggggggcatatgggagggccaagagccaaatcaatagcagtcagctatttagaatgaatcttctcatgaatatttatcttactgttactctgtattaaactcccttttattttacatctaggatttctacccagtttagaacttagagatgccaatattttcagataaggactttttagttgttgaatgctataacttgtgtaatattaatattcactgactgatgattaaatgtaccctgtacaatccattatctaagttaatcttcacagcagtcctaggcaacaacggacttttaaaatctcctttttactgacgaggaaactcagaaaccaagagattaagtaattcaccaaacattgtacagctagtaagtgggagaagcaggtgttaagtctaggatctctcattcaaaagtccatctcttatttatgatacaagattgccttttagacttctttatggcccacaaatgctgtctcttaatgggcaggcatgtcaaatctcaacatcattattggccttttggtaaataattacatatatagaagtcttctgacacacccaagcatctatcccataggtcaaacccaaatactgatcttattggcaactcattaatataacaatggtacaaattgaacatccctaatctgaaaatctgaaatcagaaatgcttcaactccgaaactttttgagtgctaacatgacaccaaaagtggaaaattccacaccagacctcaagttgtaggtccagacaaaactttgtttaatgcataaaattattaaaattattatataaaattacctttaggctatgtttataaggtgtatatgaaacaatcaattttgtgtttagacttgggtctcatccctaagatatctcattatgtatatataaatattccaaaatccaaaaaaaaaaaaatctgaaatctgaaacacttctggttggtcccaagcattttggataaaagatactcaacctgtattaaaaaatattgaaatctttagtcatgtagaatttatgcaattaaaaggtgctgaaattcagttaagaatttcaaagttaaagtttatattttaaatttttttttttttttcagacggagtcttcctctgtctctcaggctggagtgcagtggcacgatcttggctcactgcaacctccgcctcccaggttcaagcagttttcctgcctcagcctcctgcgtagctgggattacaggcatgtgccaccacgtctggctaatttttgtatttttagtagagacagagtttcaccatgttggccaggctggtctcaaactcctgacctcaggtgatccgtccacctcggcttcccaaagtgctgggactacaggcctgagccaccgtgcccggccctaaaactgtatttttattttaaaatatgaatatctattatcactaagtaataaaattaaagcttggaaatgaaaggatcatacaatgcaagagtatctaaagtcatttaaataatgtcaagaataatgttttaattattctgctcttagaattttaagcatttttagttttaaaaataaaaatggagtatttttgacaatattttgcttaacattccctaattgctgagaaatcatctgtttcagaaattagccattgacagataatgagtttgagattcccttttgccagaaaaaattgtagtaacatacaataatatggaaattgccagtatgtttgggtatttattagattgagaactatttcaaacacatctagatcaatctgtaagcaaagaatccaaaacttgtgagtttatttcttgtcgcctgtctgtttaagtctgacagtttaggcaaggagaatgtcttatgaatttgagtataatgaatttgtggaggggttttactgaatgcattttcaggattattttgaaaatacatgaagtagactgaacacggtggctcacacctgtaattccagcactttgggaggccgaagcagaaggattgcttgagttcaggagttcaggaccagcctgggccacatagtgagacggtgtctctatgaaaaactaaaactaaaactaaaaataaaatgcatgaagtaaatgcagaaaaaaaaagaaacagtttccattcaaatttctacttttcaaatctgaaacacataactgttcactctcactacatgatgtacttgttttaaggggaagaaaaattcaagatttaagaaggcatttatttacgctctcaaaaatctataggatacagtctttgaaaatgaatacatttattaattatttttggggtgcttacaacatgtttttctatgttggtcttttctaagtggagatttttctatgtaggcagataaataccagtattaggaagagatatatatttatactcatggagtacaagtgcagttttgtcacatgaatatactgcattgtggtgaagtcaggccttcattgcatccatcagtggagcaacacacttcgtacccaccaagcaacctgccatcatctatcaccccatgcctccaagtcttcattgtccatcatttcacactctgcttcttctgtacaaattatttagcttccacttgtgagaacatgtggtatttgtctgtgtctgaattgtttcacttaagataatggcctccggttctatacatgttgctgaaaaagacatgatctcaatctttttatgactgagtagtattcattgtgtacacataacacattttctttattcggtcctccactgatggacacttaagtcgattccatatgtttgatattgtgaacagagctgtgataaacataaaagggcaggtatctttttgatataatgatttcatttcctttgggtgtatacccagcagtgggattgctggatcaaaggttagtcgtatttttagttctcgaagaaatctccatagttttccatacaggttgtactaattgatttgcattcccgtcaacaatacagaagagctgggtgcggtggctcacacctgtaatcccagcactttcggaagccaagatgggtggatctcttgagcccaggagttcaagaccagcctcagcaacatggtgaaaccttgtctctactaaaaatacaacaaattagctgggcatagtggcttgtgcctgtaatcccagctacttgggaggccaaggcaggagaatcgcttgagcctgggagattgaccttgcagtgagctgtgatggtagcactgcactccagcctgggcaacagagcgagactctgtctcaaaataaaacagaacaaaaagtatataagcgttcactttcctctgcatccttaccaacatctgttatttttttgtcctttttaaaaaaattattttaaatttttgtgggtacacagtaagtatatatttatggggtacatgagatgttttgatacaggcatgcagtgtataataatcacttcatggaaaatggtgtatccatcccctcaagcatttatcctttgtgttacaaacagtccaattatactcttagttatttttcaatgtaaaattaaattattgactatgcttaccctgttgtgctatcaaatactaggtcttattcattccttctatttttttacgtatgtgcccattaaccattcctacctccccccctcccccgcacaacccccttctgggcctctggtaaccatctttctactctctatctccatgagttcaactgtttagattgtacaaataagtgggaacagagaagatgcagcgtttgtctttctgtgcctggcttatttcacttagcataatgacctccagttccatccatgttgtacatgtattttttgtcctttaataatagccattctgattggtataagatgatgtttcactgtggttttaatttgaatttttctgatgactagtgattttgaacattttttcatatgcttcttggctatttgtttgtcttttgaaaaatgtctgttcctaccctaaacccacttgttaatgggatgattatttggcttttttttttttttttttttgagaccgagttttgctcttgttgcccaggttggactgcaatggcacaatctcggctcactgcaacctctgcctcctgggcggattctcctgcctcagcctcccagatagctgggattacaggcatgcgccaccacacccagctaattttttgtatttagtagagatggggtttcaccatgttggccaggctggcctggaactcctgacctcaggtgatccacccacctcggcctgccaaagtgctgggattacaggcgtgagccaccatgcctggcctttttggcgtgcacgtgtgtgtgtgtgtgtgtgtgtgtgtgtgtgtgtgtgtcctgctctgtcacctgggctgcagtgcagtggctcagtcactgctcactgcagcctcaacttcccaggctcaaatgatcctcgtacctcagcctctcaagtatctgggaatacaggcacacaccaccatacccagttgatttttgtatttttttgtagagatggggtttcaccatgttacccaggcatttgagggtttttggttaagttgtttgagttccttgtaaattctggatgttagttccctgcaggctgtatcatttgcaaatattttctcccattccaaaggctgtctgttcactctgttaattatttctcttgctgtgcagaagctttttagtttagtcccatttgtctatatttgtttttgttgcctgtgctttgagatcttagtcaagaattctttgcctagaccagtatctagaagaagagttttctctaggttttcttctagtattttcatagtttcaggtcttccttttttcttttttttttttttttttacttttaattgcatttatttttttgctgaattaatcctgtgccataagtttttgtttcttcagtttcttttgggatatctttttctgtatccaacctcctcttctgctttaggaacaatttgttccttttcagtaaggatcttctcagtgtggcagggagagctcctgtatgaactctggaagtctggtggtgcatcttggatgctttgttcacctggatatgtttaatgaccagagaatctacacccaaatccttaagttcagcattactctgcttttttttttctttgagacagagtctcagtctgttgctcaggctggagtgcagtggcatgatctcagctcactgcaacctccacctcccaggttcaagcaattctcctgcctcagcctcctgagtagctgagattacaggtgcccaccaggatgcccagctaagttttgtatttttagtagaaaaggggttttctcaggttggccaggctggtcttgaattcctgacctcaagtgatccacccgcctcggcctcccaaagtgctgggattacaggcgtgagccaccgcgcccagccattactctgcatttttaagcatgtacagtaaaaattcaatagtctttttgggccactgactttgtctagttccactgtttggccagggcacacctgacaactctatcattgtaatgtttgaattgtacatactgtttttgtaaagtgacatctttctcccattccactaggtgtagcttaaaaataaaaaagtgacatttttcagatacttagcggctttttgtatatgcatacctttgatggtctgggcagtttatgaaagtgaacacaaagatttgagcctcttgatttgcatgattttttctgggttaagccagatcacctcaggctgcatagaggaagaggttttacttcagctcttaaatccatttccaagtaatttttgtacatggtgtccaaaatttttgtacataggagtccagtttcacagtccaattttcccagcaccatttattgaagattatcctttcctcagtgtatgttcttgttgactttgccaaaaatcagttggctgtaagtatgtggctttctgggttctctattctgtccattgatcaatgtgtctgtttttaacagcagtaccatgctgttttgattactatagccctgtagtgtaatttgcagtaaggaaatgctccagctttgttctttttgctgctattgctttagctatttggattcttttttggttccatatgaactttagaatagtttttttccaattttgtgaaaaatgatgttgatattttaatagggattgtgttgaagctatagattgctttgggcagtatggtcattttgatggtattaattatagtcttaggaagattctttaacaggaaaagagcagctacttaaaaatgttttaacaaaccatgcaaggaaatttgatgcatttgccaagccttttgtttggcactcttttcttcattatttcttaacatcacaatatttctaggagtgacatattttgttatcggtggtttctttgttttgtgttttttttttaaacagtctctgactaaggaaggagtgaggtattatctccactttacagatgaggaaaacaggcaaaccctgcaaggtcatagagctgaaaagtggtccaggtagaattcaaacccacatctgttctattcttcatgcttcattctgtctgtagtaattgtctttttctgtttcatctttgtactgctttatcacatagttgtggatagacagttcgcctctttggtagaacatctgaagcctttactatgggaactgctcagtttgggaatggcctttgtgatgtagcttccaggtaatttccggagtagggggctgctgggcaggatcccttctgcctggatatcatgtatatttgtgtttcttaccttatggagtgggggttggggaagagtggctgggaaacagtgcataaccctggctccagaaggctggctagggtttgttttccttcttcattcctgccagccctgttagctaggggctgggttgtctgtccacccttactggttccagtcaccttgcacagcttctttctcactctctctctctctctgccctatacttctgtttgccttgtctgctcctctgatcagaccatccctttccaccttgagccaacctgaattcctcctccagctggtctgtgtgctcttatattgtatcctgctggataccagccttatcagactctgatgaggatgttaacatgcttctgtgagcttaagccaaaaaggagagtacaaatcagaccagaaaaagagaggtgattgactacaatagaagagaaaggtttcaacagtggatggattctgacagctaaaattccatcttttgaagtgctggaatttccatcttaacaacttatttcttggcaaacatcctcttcacagtgattacagctgttccattcagaattatttcagttcttcaaagcaaggagagtctgtttaaagagttgcttacaaattgtatttttattggtgatggtcactcctgtatagcacccaaggaggagacactaactgcatccattatggcttatgatgccatctgtcagatcatttctgcaggttaggtaccagtgtaaagttggaaagagtagtgctgcaattgacaactgaggtaggacctcaggagtcatctgtactctgatgggctcatcagcttactaatgactattcacattctgttagggaaaaattatttatataaaatgtttatattcatcatcaaaaaatgaaaaaaggagctaagcaaatatgattttaatgccagcatagtattacattatgtgaatatactgtaagcatggggtcatttatcgatttatagtggaagatagcctttccaggttctaaaatattcatagctactccctatggctctccatttcttgtaaaagtaccaagataaggattcttgattggaatggaatccaaatgcaggtaactgcctagttttgtggattatttcagaggtaatggaaactaacagactgaataacactagtatctagctagtgggtcaaagagaatgcccctgtatgacagatttggtatttttgcaatgaaattactatgtcaattccctggcttttatttttctcaagacccctcatctttttttttttttttttttttgagatggagtttcgctcttgttgcccaggctggagtgcaatggcgcaatctcggctcaccacaaccttcgcctcccaggttcaagtgtttctcctgcctcagcctcccgagtagctgggattacagacattgccactatgcctggctaattttgtatttttagtagagatggagtttctctatgttggtcaggctggtcttgaactccagacctcaggtgatccacccgcctcagcctcccaaagtgctgggattacaggcgtgagccactgcgcccggcctgcccctcttcttatattattaaagtaacttactttatattccttttgttactgtttttgtgatggaaaactaactttctaatgcagtgttgctcaagctttaatgtgcatccaaattgcctggggaatcctgttaagtgtaggttcctttttaggaggtctgtatgtagaaacacagattcttattcttagataatgctgactgatggtgctggttatcatcaccctttgaatagctcattgtcctaagaaatataagataagaaatataataagaaatgtatttcttaggatgggttattctatacaaaactaacatttttcttctgaaaatcagcatgaaatcagaacatgaaattttctgaccttattctcagatgcaggagcgccattgaaaaaagattgaactaatgaagtaattggatgataaatattatacatctaatatctcaaacgattttttttaccgttaaaaatcatatggtaaagataagttaaaaaaaaaagcactacagtctaatttgtgtgaaaatctcacttctatttatttgagctgatcttgatgaaatatgccactactagcaacgtcaaatgaggtttgttttgttttgttttgctttttaatgatgtgtctttggcatatcctggaatcaggagtttgatgtttctcacacaattttctaagaaattataagtcaacatgtattatgttccagcccacagttccttcctggtagagaggtaggctattagcttctaactggtagatttaaggatctgtggaagtaagcaaagggccattccttacgtgctgagggacgggagaggggaattgcatgggggctaatcaacaagtcaacaatcattttagaagatttagcactggcataattaataacttcttgagaaggtaaaaccacaatttaaagatgagttatattgaaggattggtatgttataggactgtgataactagaaaaaatggcagcatagccaacaaaactcccagccaaaggatactcagtgataaaagaaggaattaactagaagttgaagtcagtaattatgttgtttacctgttcagtgtaagtgaggaaatggcatgatctacctgaaggaggaaggacccatttgattatccagagagcaagagttcattcttactattggagacttcaacttcctggttattccattaagtcattcatttaactgttttttcaaaaattccttaggcaaactaaatgagtagactgattacattaaatggcagtaattccacacagtttagacagggatagatgagattgtctgcaatgtttataaattatttttagaaagggagtgagattaaccctgttgattcctgttaaataggtaaggcaaatttcctttaatccttggacgttactaaaaattagtaaggggtggccgggtgcggtggcttatgcctgtaatcccagcactttaggaggccaaggcggatggatcatgaggtcaggagatcgagaccatccttgctaacacggtaaaacattagcctggtgtggtggcgggcacctgtagtcccagctacttgggaggctgaggcaggagaatggtgtgatcccaggaggtggagcttgcagtgagccgagatcacaccactgcactccagcctgggtgacacagcgagactccgtctcaaaaaaaaaaaaaaaaaaaaaagttagtaaggggtgggatatcaaggatgaagttccttggactgcaaagatcccagaaacaaatgatatttggtagagcagagctgaaggtagaagatgagtgtggcagccagacatcagaccactaatatgtcttggtgagtatatatgtatatattgtattagtatatatatagtattgtattgtattagtatatatatatatatatatactaattgtattgtgttagtgtatatatatatggtattgtattgtattagtacattgtattagtatatatacatatatactgtatatatatactaatacaatactatatatataaatacaatacaatacaattagtatatatatgctaatacaatacaatatatatactaatactatatatatacactatatatatatactaatacaatacaatacaatattaatgctgtaggatcaaatacttctgcatgatctcagtgattctcaaggttaggatcgcccctccccagtgggtttttctccatcatctgtagtgctgccttaggtcttccaccctcctggtccctagatctcctgatacaccccctttctgagtgtgtggtcccagggaactactgtttcagttgcatttttcaggtgcattgtaggtatccttcagatgtatggggccaaaggttagagttacctaggcagcttttatataccaatgctccagccgggcacggtggcttatgcctgtaatcccagcactttaggaggccaaggcaggtggatcacctgaggttgggagtttgagaccagcctgaccaacatggagaaaccatgtctctactaaaaatacaaaattagctgggtgtggtggctcatgcctgtagtcccagctacttgggaggctgaagcaggagaatcacttgaacccgggaggcagaggttgcggtgagctgagatcgtgccattgcactccagcctgggcaacaagaacgaaactccatctcaaaaaaaacaaaaaaaaccaattcaatacttgaatcagaacaactaccacagagatagtttagccccagcttgagaagtgtcatttctcaacaatcccgtaagctgccgtgattgtgaggcctccccagccacgtggaactgtgagtccagtgaacctctttcttttgtaaattgcccagtcttgggtatgtctttatcagcaacatgaaaacggactaatacagtaataaaagaatatgcacaatattatttagattttgctaaacttttaggtatttgaggaccttaatattatatatataataataatatatattcatttaaaaaatgacccttggttgcaattaacaaatagtcattgaagtcacttgggcaataaggacaagcttaatatcatttagactttgctaaaactttgagtatctgttgataactttaagaattcataaaaagtattatctcttggttacaattgagaagtgcttagaattgaaggcagaaaaccattttaaaaaattaaaaagaagcatggtggcatgacgcttgtagtcccagctactcaggaggctaaaacagtgagctgtgattgcaccactgcacttcagcctgggcgacagagtaagaccccatctcaaaataataataataataatgataacaaaaatacaatttaattaaaaagaactagggcctgagagtcaacatccattcttttttagcagagcaggggatagaaactgctagggatctgacactgagcacaaagtttaggaagtaagcagcaggaagcaccaatcaatcattgcagttgcagaaataaaccatgtccacaggcttcccctagctttatcatcttgtggaaagaaaagtaaaagaaaagagacccaactttttcacctactgtgaaacacaaagtcaagtttgggggcttatatagaaaagtactagccctgcctatctccaaagtggcatgggcagtaaaggactgtaaagccagcggcaacctgagaagcatgtcagccagtcccagctaaggcagccagggattagggaagtcatagataatcaccacatggtaggatcagtagggaataccaaacagaccagtgacacagccatccgtccctgatggtgcttaatgactagtgtaaggggtaggttctgtaaggtgtcctgccagggaggggattagataggacaagcgcaccttaaacactagagattacaaaataatttacaaccaagtgggaaaatttgagattctttgctagcaagatccagtaatggtagacattatttcagttatgttagagggtggtacctgtcgaatgagaggttggctgaagtggacttgggaaaggggaggcaggggtaggttaaatgccagcaaaaaaaatcttagataaacaaagctgacttttgcttaaaaactgttaaaacactgttgatgagaagaggaagtcagctatatagcaattctctcctttgcttccaaaatacgtctgaaaaaagacaaaaaatggagatatatattagagaaaaagtccaggtctagcagaacaagaggaattttttgtgtgtgcattgttattctctaaaattatatatgtaagcaaaaagaaaaaatctttaacagggaaaactacgatagaaataaaataaacttaaataagagaaggaaagttactgaggtcactgtgattatctacatgtgtctttttatcgctgaaaagtaaaatattgacagactggagccccaaggggatggaaatgtatccaattcttactcaaataaaaatgtattgagctcagttccagagaacattcttggatttgatgtttttagctccctaagttaaaacagctgaaatttcttcttattaggctttcatagaagaaaaacgttttcattttgttgtttattttttaattaaaaatatacatatacccacaaacatgctaatcccccataataccacttttttcttaaaattaaaaagaaatgaaagttgccacaatcttcaaccctgcaagataagaacttttaatatccctttaaaacttttttctataccagagacacatatctatatctatccactgatgtatctatatcaatacctaaaattatatataataattttacttcatgcagatcttcattgaaaagatagaatactgtgtccttggcttaggtactatgggtgtaatgatatttttatatgtttaatctgtaatcatttttggattaccacacagttattcaggttgtggctgatggaaaccacaggagtctgaggacacacttaagagctgcgtgggactcacccctgccccccaccccacatccacacatcttatcacacaagtgaccattgctcagctccttacatacaccaaactctagtgttcaggctttccagtatgcactttcttttcctttgaatgttcttccttctgctcttctcaaggctggctatttctcattttttgtgatctcaatttattcccatgtctttagggaggcattctcattctccatctaaaagagctcccctccacctgctaacaccgtctctttgatgctctaattttccttcaaaacacatcgtagtgtgttactattaatttgttgattagtgtgtatctctctgcttttcaatgaaacaagctctgtgaggctcatttgtacccattttgttcagtactgtgtatccagtacctagcgtaggatctggcagataagaaatacccagtaggatttgtggaattaatgaggtgtatagaactttattagcacaaatccacagacatatattactagcttgctttacaaccacaaggccatgaagaaagaggttgctatttcagtggtgtttattagacatatttacaagttaaaagttaaaagtgaatccttagtgaaatagttaaatcagtaataaattatagagcatgttgtattaggtcactgctctttagaaacctaagcaataacgtggaagaactgctctatgcatttctgtaatgactttagcagaagctgtgggtggaagaaagaattggactcactttgaacccagagttcctctttattagccagttataagcaagtccttttttgagccccagttttcttgtctgtaaaaggcaataagtttgtctgaagaatgatgtaggtgctacatgagatacagttaagctctgccctaatcatgtaaatgaatgtgcacagttctgttgttttgaaattaaagtgggagcccatgaagctagatggctggagttccgtagccaattgtgttatttctaaaagtttgttatggcctcagagtgtgttgttgaggaatttatgtaatgttagtgacttgtaaagagccatccacatttatggtcctatcattactattattgttatatgcttaaaaaaatccacattctattaataaataagataaatctgataagactgagcattagctttttaccttttgaattcagatagatttagtggaagcataaacttaactgacatggataataagatctatagtaaagtcaaaacagcttatcaaatcttgaatgaaactaatcttgaaaaggggctactgaaaatggccccttcaccaggcagtaggaagtgagtttgtcccatttctgattgactttgacctctgctttccaactttgccccaaagaaagttagtcacgactttgccccaaagaaagtaagtcacgatgatgaacttcttaggcggaagcagccataaagtggaagatcactaaaggcaaccagctagttacttaagtttccactcagctgggctagatttaatccaggctcagagtcagagaatcacggaattctaatgctggaaggaactaaaatttccttttttaactacaaagtctgatttaaagctttctaagtttctaatttaaagttttccaggtttctaaggaaaccaaagaaactagttttattatatttcttgacctatttgatatcagattataaaatttctgaaggtaccatttttcctgccaagctttgatatatgtttggtagtattaccatggcacccttggccttctaaccaacaaggaagaaagagagtaattctgcatttatatgagtgtcacagctctttaacagacaatcccagaagacatctagatattcctgtgataaaactttctttttgggcctctatttctccacttccacctttctcactcttcccctacttctgtgttataggatatgggtggacatagtatggttattgattagatgctaattttgttagttttgcctgaaacagcagctttacaaattaacatttgaggacctgaaacacaaaggtgataggaaactcagaaaaccatggctcaccttgcaccagttatttagaatgtaaaataatgttcactgtgatcattgggtgcagctggtataatcaggggcagctggcagatcctacagactattctgagtaaataaagaaaatcttcatagccaatgggaacactacatctcaagttgttagtttgtaaggaagtgctgattgctcctaatataggtgattgtatctgtcagtcaagtgaacatgtaatcggtcctagctttggttacaggaggacatattttctttattactacttacacatttcgagttttaaataaggcgttcaatatagagtgaacattttattatagacaaacccatagttgtaggaattctactcagaagaactatcagcacagcctttaaacactttataattgagcttaaatctgaagcttgaagtattatgtttatgtgcctattcctaatgctgggtgttttccgactcaagggcaaacatttgagtcactcatgatatgtcaaaaagtgaaataggaatttgagaaaatttgtctagaaatctgagaccaaaataacacaagaaatttcaaacatctagaatcctaacaagtgcagctcagtttatgaacatgcagtctttgtgatcaatgctttaagaagcccatcataagataccttcaatattagcccagacttaattattaacatcctaatcacatatccaagttaagaaacaaaaattcatttttctactagactcacacacactcaacatccaatgaatctgaggaagttcttgagatgttaaggaaggtagagatcagttccttccaagccttacattaaattgtgatcagtcttctctcttctagaattttttattttgaccctttgttcatcttgaaggatcttctctgaacaccaagttgtctgtggtgcctggcactggatcagaccattgctgataataggaggattacttcattattcccctaggcagccttaattgtggtcagttactacaagaggagacagaagggaaagagagacagtgcttgcttgcagttcgtctgctgattggcttcttacccactaaggtctttacctgtcccttgaacttacctatttaaacaattttagtgtctgacttttttccctaggctactaccctgctaccctgtaagtgttcctattgagcttcatttcatgtgtttctgaccttttctcgtatttgccaactaaattataatttttgccttctaagttgctgactttggctttgaagtcatacagaagccagtttgaactgagacctcactccatttcttacaagttatgcaaacttacgcaagttatttaacacagtatgtgctgcatttctttatctgcaaatgggggatggtacacatacctagtgaagttagtgtgaagaggaaaggagaaatcagcatcaagttcttagtgcagtttctgaaaagtctcaagaaacactggactctggtacaggcttactaaatcacattcattaggtaccttcagattattttaaatgacttccttgttagccttaaggtgattctcttatcgtcaaccagttatacatccacataataaaggaagaatatcctaggttctattttatacgtctgttagtgatatacataaaaggaaagtactcacatttttagcctggaatataaggcccttcatagttcctcttccaccttatgtcctacatcatcacttttttttctggagacagggccttgttctggtacacaggctggagtgcagtggtatgatcacaacttactgcagctttgaactcctgggctcaatcttcccaccccagcctcctgagtagctgagactacaagcctgcataaccagcccagctaattttaaaattttttgtagagatgaggtcttgcaatgttgtccaggctggtctcgaattcctggcctcaagtgatcctcctacctcaactcccaaagtgctgggattacagacatgagctaccacacccagctcacatcatcccttttaaacactgtaaacacatctgccaaatgtcttcattctctgcacaaacattctctaacctttatttcatgttgttccttcattctgtaatgttttatttcccgatctccacttttctctatcctgccacaatacatgtccccccagaggccttgtgttcttacagcctgaaatgatcccactatcagctgacttagcataatttttaaaaatcattttctcatgactgatcacattcttccatgtgtcatagtgactcctgagggtaagaagtgttttaatacttctatccctcccaaaccatgcttaaattggtgcctggcaacttgtagggctcagtgatggagtatcgaaggaaggaccatatcctggggatcagaaacagatatcaattatgcagtcaaatatgttctctcatcacttcaagcatttatgttcatatatttctactccactaatagaggtcttccctgagcaccacacctaatgaagccttgtcattcctgggccatttgctttgttttatttttgtacacaacactataacattgtaatgtatcctcagagttatttgttaatttctgtctcctgctagaatgtaggcttcatgagcacaagttcacctttttaatgccggtaagccttataagtatttgttgaacgaatgaatggatacatgaaataatcacaggatctactgcgttaaagcgttatggatattattattctacttttctaaacgtatgtaaacaggcttctggtaattgtcattttggatgtttagatgttacatttttagagaagctttaagtaatagacatttaatcagtgcctgcctaagtaactatgaggtgagttgtttctataaatgttagtcaggtcttagaaatactctagtttaatttggtgaatttaactttttctttcatatcttaattttcttctttggacacccagagagattatattgggaaataatgacttccttttagcctaggactttgctctccaaacagacttgggacttaaatgaagggttaagcaagatgagaaggtgcatgccttttcttccctttttccctgtcctctcaggctcccttgacacctgtgacaaccccgcctccgcaagcctcatcttcccaaagcctgtcaccttacctcttcccatttgcccaagtgcagtgtcagtgttaagtaagccatagttcacagcttttattaatacacagtgtaacatttgtaaggaaatgcaacatgctttcgctatgctttcacagtaggatgaggctgtccttgaggtttgaggtttatttgcctaacacctggcatgcaggaacttcagtaaatatttgttggagaaatgaatgatccattcacagactcattaggccctgattgtgtctgtgggttacaatagaacactcttcttatcagtccttatctgacttgatttgctctgtgacacttaacttcctctcttttctctacccctgacccatgacactccttaattttcttctttcctcttgaatgtgtcttcttaatcttctttgcttctcttccaccttctctgtaagtgatgatgctccccgcccttcccattaggttctgtattgaccttcgatattccccttggatgatctcattcgtgtccatgacttcaaccaccaccacccagacatggatgacttccaaatagatatctttagccctgatatttctatgtcccacaccctgtagatttctttccatctctgggagtaagtcctatattgctattaactatctctactagtaaacactaaaatgccacttctttttttttttaaagacagtcttgctgtactgcctaggctggagtgcagtggtttgatctcagctcactgcaacctccacatcctgggttcaagtgatcttcctgcctcagcctcccaagtagctgggattacagccacacacgaccacactcagctaatttttttttgtattttttgaatttttgtatttttgggggtttcaccatgttggccaggctggtcttgaactcctgacctcaagtgatctgtctacctcggcctcccaaagtgctgggtttacaggcatgagccaacgcacctagcctctaaaaggccacttcttcttgactccccatcaaactaacactgaccatccacaaatcatcccttaccctctcttttgcctctctccccatattaaatcagctgccaagacctctctgttctatctcttctgttgaatttatttcaataaatatatggaataattactgtattttgggttaccatctttcagagccatccatctctctgcttctaccaccttaagcatcttctcttgaggaaaactgcagttacctggccactgtctctatcaggttactcatacccctcccatctgcccttcacattgccactgccaagcgggctttctacaaatttaatctcagcacgctcctcctcccttacttaaaacccttcatggcttcctgtattttcaggataaagttcaaactagccccattcgagcataaaagtcattcaagatacaagcttatcttaattctccaccctcatttctgactcctgtagcccaggagtccaggtccttcaacctgcaccccaccccactgagtggttgtgtccagctttcctcctgcagaagcacctcttcccccattcttttctggccattctggcatgccttaaaaactggccatttcagcaagagaatttctgtccttctctttatttttttcccctatcctcttcataccattctgaatatttagagtgcattatagatttttgtttacttgtctatctcactagatgatgagcaatttgaggtttgtgtcaccagcatctagaactgtctagaccagtgtttcttaaagtgaggtccccaggtcctcctggcaatgacagaatcatttggttgttgttaatattcatacttgggccctcctcacccccacaggacctagaggattggagtttttgttttttttctttagtttttaaaatttttttcttgttttagtttctccactttgcaagagaaatttttgattttttaaactaggtgatgtttatgaatattatagatattgagtaaatgtttttgaataaacaagtaaaccagctggagccctcgttcatgtttttgagttcacatacgctgtattaacttggatttgttactgataattctaaaaatacccctgtctataaaagaggcagtttagttttctagagaagactgcctatttgtcataatatgaacttgaggatttggagattctatggccaattttgatcaatataaacagataatttgaatagttcagattaaaaaaataatccacacaactctggatttcagcatcccaaactcttctagcccttctggtgactcatgaaaggtgtcccacctctctgtaactcagtttctgtcagtgtaaattagaatcatactgtgaagcaacagggattagaacatcaacgcaacagatatttcctaggtacttcattattttcagttcaatgtccaaggtgcagaccttacatgtagtacagtcaatgataatttagaaagcttccttacctgtaaaaaattctcttatattcaaataaactagtgcagccagagcttttatataggagtgggagttagagtgaagtatctaatgatctttatatgtgttaaacttacatgtttccttgaaagaaatgtgtacttacctatgtttgtatgcatttaaatgcctaaatacagacccatgcacagatataaattttctgtctttgatatcctaaaatgactgatggtcatgtgcataaaagctagtctgagaaccctggagcctgccagacaggttgagcttctgagtaagcactgtagctattgcagtgctcagcccacacgatatgttttgcttaaagggaactatccaatccttggccggatggatgatggtggacactttggtttaatactgcttattactgtgtcactttaatttgcctaaaattgttcacagaacgttgtccttatatgtttctgggagttacttttccttgggctactgtgttggttttgctttagcatccttggttcagtcatttttagtacttggtcattcaagcttaattaaatgagaataattacggccagaatgcccaggaagtataggacagctttttgtttttgtttccccgctgtcttatggtactgacagagctcccacagatcaggcagctcaacagaggagggaggctatacaaatgtcactttaaatatatttacattttagaggaattggcttgctagttctagtccatgttaataaatcaccacagaatcccacatactgttagtagcaacagaacttagtgccttacattcagagaagttttaattgaaatttagagtattaagattgtgttgggtggccaggcgcggtggctcatgcctataatctcagcactttgggaggccgaggtgggcgggtcacgaggtcaagaaatcaagaccatcctggccaacatggtgaaaccccatctctactaaaaatacaaaaattagctgggcatggtggcgcatgactgtagacccagctactcaggaggctgaggcaggagaactgcttgaacccgggaggcagaggctgcagtgagtcaagatccattactgcactccagcctggtgacagagcaacactctgtctcaccaaaaaaaaaaaaaaaaaaaaaaattggattggattggaaataatggaaaaaatcaacaaatagaatcttaatcatgtatgggaattgccttgtttcactcaacagacgtctagagcacacaatctagagctgacaaggcagctggatgatgctatcaggaaactaagctgatttcatcttttacttcattgtctttctcatgtgggctgccccacggctataagatggttgctgccacgcttcaggtttgtgactaggaagaaaagagaagagcaaaggaataaaactccaaagggacatgcagacaagtctgtatgttttaaaaacctttcccagaagccccacctggcaactcctgttttcataatcattgccatagcttcactgcagactaatctctgaaaaagagcaaggcaaatgagtatcatggatgggcattcagtcatattgccatacttagcctcacaattgatccagtccagtgaagctagggttccaatcaaagaacgtcttgtggggtgtatcacttactataacatctatcctggtgttaaggcatctcttgagagactcaaggactttttaggaggtgacagatgacactagggaacaccctgtttctcagctggtaagaagagaaagcaatccagtgtagatgtgtctcacttgagaaatatataaaacaataacagaaatatataaaacaataacaattatttgattcttaaaaataattattaatttttcttaaataggaaagctccccaaatgttttcaaaatacaatttagttttttgaaaaaaagatttatacataatttttctggactaaatctgctacataaagcaagataagcctgtccttttgaaaagtttgcctttgagtactgaatgtgtaggttggtgcaaaagtaatggcaaaaccacaataacttttgcacccacctaaaatcttagtagctcagttacctacttatctatcctcatcagtccagcctttcttgtatcttccaaaacatgttccaagtgagctgagaagtttcctttacaagttctgtcttgttggttggaaatatggatgactgttttctcagtcttgaaactgacattgttgcatgttggtagctgacacatggtgggaggagcataattttatatctaagaacatgataagcaccgaaacaaatgaggaaatgttagatcttgctgttgcccctacgctcacagataagtgtctgagtgaaactgtttgcagaaggcactcgatggacttcatacacccatatgtgtaaaacatttaacgagttgctctgaaatgatgctccagttgggagggtacagatgcaggaacttcctgtaaccgcactgcccatgacgcctgccttatcctcacctacaaggcctgctgttgtctaaaacctgtgccattcccaccagacttactcaagctccagctttcatttcatcagtgagtgatctttatatatcacaaatccaagcacgtgacttcattcatttaaaaccttcattggctacccattactcttaagatgaaaaagaaacgtcttagcatggcctataagagtcctcatgatcttgcttccacttaacttcttgcaccttcatctcaacactctcccacttactctgtaattgaaggtcaagtgctctaaatttcttagagttgtttgaatgtgctttctctctcatgcctctggctctttgcccatactgttccctctcactttctttgccaggcttatactcgtcctgtctgaatatgtctccagaaagccttctctgacccaacaagatggggttatcgtgcctcctgtgtgtttcctaatttcactttttactttttttttttttttgagacaggatctctctgtgtagcccaggccagtcttgaactcctgggctccagtgatcctcctgccttggcctcccaaagtgctgggattacaggtgtaagccactgtgcccagcctgtttccttatttttagtcccctgcttttctgattacttgtctgttttcccccaaaacatgtctgggtgcaaggagtgtgtctgttttgttaactattctcaatgcttaggacatagttagcccttaataaatatttactgaatagctgtatgcaagaatgaatgaatcaaaagtctccttattctcagcccagataaattcttcttggtcatgatagataattcagcaaaattttgtaccataaaccaaaaggctttgaaaagttttattaaataaatatatttgatctctgtcattaaactaccatcctcaaagcctggaaaactatctttcacctggaaaactaactcataacttatgaagaaaaataaatgttatccattagtttcagttttacatttaaaaaaggataaggaattttagattaatgtttttcttaggctctcccatagaggagaagctttaggagcttagtgagacataggcttaccttcttttctttttttttttttttttttgagacggaatctcgctctgtcacccaggctggaatgcaatggcacgatctcggctcactgcaacctctgcctcccgggttcaagtgattctcctgcctcagtttcctgcctagctgggtttacaggtgtgcaccaccacacccaactaatttttgtatttttagtagagacagggtttcaccatgttggtcaggctggtctcgaactcctgaccttgtgatccaaccatctcggcctcccaaagtgctgggattacaggcgtgagccactgcacctggccaggcttttcttagagccatggtattgtggcaacaacggtacatatatcctgtgtctcttagtgtagagtaggagagatggtctactacttttccttttcctctcttttcaaagtctttgctttttttaatgcattgattttttttttgtaattacagtattagccagaagtattttattttttgtaggatacaattaattttgatatgcatgttatcaaagtgatgttatctttgagataggaaatcaaagagtcctgagggattctggaagagagtggctgaagataggtagctaaatcatcatgataaaagcatgaaatagtggatcaagctcaaatttaaaaatcttctaagacttttacttcagtgcacactttatggttactcttctggattcagaaagtctgggaggaggaaatctgtctttgcaagcatctcataggttctgttggaggtggtcagtgaaccattttgagaaacacataagattagctggtaaaaatgcttagttcaaaaatgtgagtgtgtgtacatagggttgttagatgactagcaccttcaaatcctcttaaatttgttacataacaccagagagtgtattagaagtttggaggaaactggcatcaaatttttcactaccatccatatgtatacttccttgggaggcctcccaaaagtcaatgaggggcaaaattgagttactgatttgtcattaatgggaattccaagctttgcccctctcccttgttttactctgctccactcaggccaagatttgagggttgggtgcagcgactcatgcctgtaatctcagcactttgggaggccgaggcaggtgggtcagccttgagtccaggagttcaagactaccctgggcaacatggcaaaacctcatctctacaaaaaatacaaaaattatctgggcatggcggtacatgcctgtagtcctagctacttgggaggctgaggtaggacaattgtttgagcctgggatgtagaggttgcagtgagccaagatcaaaccattgcactccagcctgggcaacagagtgagatcctgtctcacaaaaaaaagattggacagtttttgtttttaaccatcactggggccaaatcagtttctctcaatctctaattcttgctcccaatctttttctcccttctctcactctgattaaaattgacatattgttttattttttattataaaagtaataaaaacattctttttataacccacatgaatgcaagtacaaaataaaaatcacccataaaccaaatctctatttttttttttttgagatggagtctcgctctgtcgcccaggctagagtgcagtggtgccatcttggctcacttcaacctccacctcccaggttcaagcgattcttttgcctcagcctcctgagtagctgggactacaggcgtatgccaccatgcctggctaattttttttattttttttttaagagagatggggtttcactatgttgaccaggctggtctcaaactcctgacctcaggtgatctgcccacctcagcctcccaaagtgctgggattacaggcatgagccaccatgcctggcctaaatccctatctttctaatagagtaaagaaaattactttttattaatttataaagaaaattaaattttatccatccctttccttatgtatattgacatggtcttggtctttcattcatagagccactgagttctataaagatacgaagatactctggaaacacgtagggaaatgtagaaagactttttaaaaaagtgtttatgtttttaaagaaacaacaatatcttatctttgaaacatttatgtttttacttaatgatggtttcctaaaattgagatcagcttataggtatataatgttattactcagctaaaaatttaaaacttcatctcaactcactgaagcattggagtcaaaggctttattttttaaaaaatggaaatgggtagttgttagagtatatttttaaaataaaaattactcaatgactttttattttagtttaaaagtaatatttattcatttcatttgccttcttttcaaaagttctgatttccacaataccattaggttttacttctctatatgttcatttagagaaacatatattaaaaagtcacttgtgccttgtccttcactgctgactcatgatgaaaattgaaagcctattttttgtccttgtcagaaatcattatacttttttgcaacttggacctaaaaacagttggccagtgaagcagaattaatgtgcttgtagaaaaatctgtctagttgagagtaatcctggcagtttcttcaagaactagcctttgcttatatatattcaggtttgggtttgcaagaggaaatcctgaaagaacaataaacacattcttttttttttttttaagttccaggatacatgtgcagaatgtacaggtttgttacataggtaaacatgtgccatggtggtttgctgcacctttcaacccatcacctaggtattaagccccacgtgcattagctatttgtcctgatggtctccctcccctaactccctgtaccacaggccccagtgtgtgttgttcccttcctcgtgtccatgtgttctcattgttcagttcctacttatgagtaagaacatgcagagtttggttttctgttcctgtgttagtttgctgaggatgatggcttccaacttcatccatgtccctgcaaaggacatgatctcattcctttttatggctgcatagtgttccatggtgtatatataccacattttctttgtccagtccatcattagtgggcatttgggttggtttcatgttttgctattgtgaatagtgctgcagtaaacatacgtatgcaataagcaaacattcattataatagaataatttgtaatcctttgggtatatacccagtagtgggattgctgggtcaaatggtatttctggttaaacacattctttatgaagaaagattaaataaattcttctctagagtcaagctactttaaacctgttttaattcaagactttaccgtggtaccttctaatctgtctacagactgtctaatttaactcacaagaggcagtagcagaaactgggatttcttggtaactaagatttatagttaccttttaaagaagattttagttattgataaaaacaaacaaaccttctttaccatagtctagatcctttcatgctcattttttcctgaatgatatttatgactatgcaaacttagctggatttacctgaaaagttactgaaaggagaattattgcccagatacacatttatagatacatgctcaaatgacatctcaatatgttgaattttccaaagacaaaatcagtagaatctggtaaattttacctttgaagatagttcttgccttggctattccctgccttatacatttcctcccagaatggctcattcccatacttccttccagtcttggctcacatccaccttcccagtgtgccaccctgtttaacactgtgctctgtccctcactctccatcccattttccacctgcaccaacttgctttttttctttccataatatttgtaattttctaacatactatataatttacttattttcttatttattgtctttctccaggcttgtaacctccatccacgaggacggggttttttgtctgtttggttcactgatgtattcccggagcctagaactctgcttagcacacagttggcactcaattaatacttgctgaatgaataatttaaatcatttcaagatttaaactacctatcttaatttgtagtattctttctgctactaagggaaaagagctataagaaaatacaatttttactgtttagatttaaaataaagtgagtttgaagcagagtttcacagatcacttgagcatcagttattctatttagtcttcaataatgtattttccctgttaaaagtatgtccaaaacacaagatttaaaaaatcaaataaaccatttattaattcatatgttgaggaaagacgtaaagtcctgggcatacaaagttgagtaagatacaatctgtacccttcaggatttcaaaggaaagacagatatgttagcttgtgtgtaaaatacaaacagacaagtgctacagtaggtaagaaaaagacatatagaaagcacagtggtgatgaaggaagggataggcaacttgacctagaagcagtcagggagtatcttcacagtgatcataaaaaatgacaaggttgcatgggaagggcattcaacgtactgagaacagcatgtgcgaaggaaagtgggacaaaggggcgtgatgtctttggagaatgacagtatagttgtagcacagggtgtcacaggggaaagttatgacatgattccagaggagtagggagaggtgaaaccatttgaaccatgtcaaagcattttggggccgggtgcagtgcctcacacctgtaatcccagcactctgggaggccaaggtgggtggattgcttgagctcaggagtttgagaccaggctgggcaacatggtgaagcttcatctctacaaaaacacacaaaaattagccaggtgtggtgacaagcacctgtagtcccagctacttgggaggaaggcttgagaccaggaggcagaggttgcagtgagctgagattgtgccactgcattccagcctgcacaacacagccagactgtgtttcaaaacagaaaccacaaaaaaagaaaagcattttggacatcttagagatgatgccaaatctgttaaaattcctacagtctgtagagcctagaatctaccatataatattaatgccattcatatttaaataaacaagatagttggctaatagtgaagattatatgctacataaagatcttgacttcatataatttaatgtttacatttccttttatatagtcttgcacacttgtgtcctcaacagtttttctatatcagatttaaggattttgaagcaaagggccattgtccttttggacagctggaaatacagaataagtcagtctaagtgggaaaacacaaagacaaaacaacggtgtagtatgcctaagctcttacagtatgttctgccattaagcagtcaagggtatacggctgccagtatatagcaaagtaggcaaacactagatggaaaaggagtagtcagcttcaagcatgtagtgactttggaaagtctggagaccttttcttacagatttctctggagaccttttcttacagatttctctctatgtccaaaaattaagccttatgaatgtgacctaaagaaaggaatgttctattggagacaaagtgaattgcaagtgtaagtgatttatatttttaactggcagaaatagtgatggggtgtgagagtgagaagggatgataaaaactactactttttttttgagacagagtctcgatctgtcgcccaggctggagtgcagtggcgcaatctcggctcactgcaacctccgcctcctgggttcacgccattctcctgcctcagcctcccgagtagctgggactacaggcgtctgccaccacgcctggctaatttttttgtatttttagtagagacggggtttcaccgtgttagccaagatggtaaaaactactactgttaagaaccaactgggatttcttggtaactaagatttatagttaccttttaaagaagattttagttattgataaaaacaaacaaaccttctttaccatagtctagatcttttcatgctcattttttcctgaatgatatttatgactatgcaaacttagctgaatttacctgaaaagttactgaaaggagaattattgcccagatacacatttatagatacatgctcaaatgacatctcaatatgttgaattttccaaagacaaaatcagtagaatctggtaaattttacctttgaagatagttcttgacttggctattccctgccttacgcatttcctcccagaatggctcattcccatacttccttccagtcttggcttacatccacccattacaggctcaggcctgtaatctcagcactttgggaggccgaggtaggtggatcacctgaggtcaggagttcgagaccagcctggccaacgtggcgaagccctgtctctactaaaaatacgaaaattagccaggcgtggtggcaggcgcctgtaatcccagctacttgggaggctaagccaggagaatcgcttgaacccgggaggcagaggttgcagtgagccaaaatcgctccacagcactccagccagggggatagagcgagactctgtttcaaaaaaaaaaaaaaaaaaaagaaaagaaaaaaaagaaaagaaccagctgagaagtgtaacattcctggtatacaatgtagtggttgagaagtgtaacattcctggtatacaatgtagcggtggaatctcaagtgctcagaacacctccatcagtacctagaatatagtaagtgcagtttttaaaaagtaattactattttgatcaaattgaaacacattttaatttcgtggcctggaacaatgcatagtagtagtttgaagtcaggacccaactgtttgtgtataatggtgcatcaagttcccataggagagctatgtgaagagctgcaacccatggatattcagtaatactttttaactattgttatcacactcagacatctagaattcctcaaattgatcaaaaaaggccttagactcaagaagtatcttgagtaaatacttgccaaatctttttttttttttacttttttattttttattttttggtaggaaacctttctgtgtaaacatagctaaatattgttactctcaaatcttggtgcttagtaaatcagtcttgacaaacaagcaaagtagaaaaaagacaagaaaagcaaaggctcaggtttactatccagagcgattgctacctatccacatggtgtgtgcatgccagcataagcaatctgaagaacacatttccccataatgcattctcaaagggcatgctttgggaataggggaagacacattaaccttctgactttcaaaggaatgttgagtcacatacacactcttctctccctaagcatttttccttccttttgaaactctgaagaaaaggatgctgtaggcattgtgattttgagaatctcttttctgggaatccatgcttgatcaatcccagccataccatagtcacatgcagcaattcacctgacatgcaaagaaaggagaaattattcttgtgtctcacaacctggcagtaaagagaaacttgtaagaataaagttccctttcactttatgaagaaatgggagctatggacttaattttcttgttttctgagggatcttgagattttttttcattaagattttccccaaaaggtctttctttctctctttttttggctttgaatctgtgaaggggcaaagagaaaaaagaaagtgaaagtctgtgggaaatgatgtaaaaagatatatagataaaagtcttctaagctatatagagataaaggactcctaaaccagctccggacactgtctgaccagttttactctgcttcccgctgtagaaactgatgacaggcacaagcaggagcgcagcttcctgttgaactggtttagctttgtgcacaatccttagaggagaattagtgccttgcaacatgttaattaggggagcaaaggcctgtgagtagctaataaagatgattaatattttgttagaagatttagaaaacagtgcaattgattttgtccatctcaattgatatactttatcatgtgataccacctttttttttctttctttcttttgagatggagacgcactctgtcaccaggctagagtgcattggtgcaatctcagctcactgcaacctctacatactgggttcaagtgattcacctgccttggcctcccaaagtgctgggatttcaggcatgacccactgcactcagccaataccacctattttattacaattccaatacttctgaaaatagagctattgctactctcaatttttattaattttaattaattaatttgtttgaaatttcctttgtggcccaggctggagggcagtggcatgatcacagcttactgcaacctccgccacctcccaagctaaagccattcacctacctctgcctctcgagtagctgggactacagatgcctaccaccatgcgtggctaatttttactgtagagaaggggtttggccatgttgcccaggctggtctcaaactcctgagctcaagcaatctgcccaccacatcctttcaaagtgttggggttacagacatgagccattgcatctggcctactctcaattttttaaagtgtatgtcatagaaaactttggtgatatcaaattttcggactttgaatatgggagtatccccatgttcattgtagcattattcacagcagccaacatatggaatcaacctaggtgcccgtaaacagatcaatggataaagaaattgtgatataatggaattttatttcgcattaaaaaagagattctatcatttgtgactacatggataaacctggaagatattatcctaagccaggcataaaaagaaatgttattgtgtgatttcatttatatgtgaaatctaaaaaagttgaaaatgtagaaacagagtagaatagtggtaacattgtcccatactgggtgaagttaatattggttatcatggaattatctataaaagtggttaataaagagatgactgcagtaactaaaattctacttcaagaagaatttgaattctgtgtggagttaggggggtggtgtcttggcagttaccatgaagtctggttctattcatttaagatcactggccaggcgcagtggctcacacctgtaatcccagcactttgggaggccgaggcgggtggatcacttgaggtcaggagtttgagatcagcctggccaaaatggtgaaaacctgtgtccaccaaaaatacaaaactagccgggcatggtggtgtgttcctgtagtccctgctacttgggaggctgaggcaggagaatcacttgaacccaggaggcggaggttgcagtgagccgagatctcaccactgcactccagcctgggcgatagagtgagagtttgtctcaaaaagaaaaaaaaaaaaaaaagattattcctttttctcctctctggggagatatatatatatatatatatatttttttttttttttttttttttgagacagagtctcactctgttgcccaggctggagcgcagtggtgcaatctcggctcactgtaagctccgcctcccgggttcacgccattctcctgcctcagcctcccaagtagctgggactacaggcgcccgccaccacgcccggctaatttttttatttttagtagagatggggtttcaccttgttagccaggatgttctcgatctcctgacctcgtgatccacccattttaaatgcagttctagatgaccttcattcaggagaggcactgaagcagatgaataattgtaagaattcaatctaccagccttcaggatgcagctggacatggcccatcgtagtcagaagtgaacctaattctagaacagtgaagagagtaatatactgactcactggttgttattttgttttcccttttaaatcgaactgctcacttgaaacaagaagcttgctttatttactctgtgcttgaaatcaatttgaagcaattcagcctgagtgtgtctgaggcataagtggtatcaccccaatcagtgaacgtacttttgaagcagttttgcctacaccctcttgagttttccaatttctcttttcttaatttctgtctccatatttctcttgttcaggatcctcaaccttagcactattggcatttttgggggctggataatttttggttgcagagggctgtcttgtggcatccagggcctctacacaccacctgccagtagccaactgccttccagttgtaaagaccaaaaatgtcttaagatatttcaaaatatcctctgaagggcaaaatcatcaccctctgtgagaacccatggtggaggccaaaagagaagaggtccacagattgaattctggggatcctcagtttgtggattgaggagatgaagggaaagcagcaaaggaaaatgaaaaaagaacagatggtgaagttggagaagaagcaagagaaaacagaaaggaaggaagtgaaggaagcattgcaggaaagaaggagttgccatctgtgtcaaatgctgctgctagcaggccatctgggtggaagactgatacttgaccattgctgcatagaaacctatctttatagacataagcccaaaaagagaggaaggataaaacaactgcattgccacaaacaggaaaacatacttaaagtagcctgtagtacgtattttaagattgggattaagagaatggttacaaaccaagtaacctttgttgttgcaaaggagtgttgagagatggcaatttaggactgtggacagtcagaataaatcgaatacatattagtaattttagtaaattgtatattatactagaaattctgaacataggtacctggttcattgtaaaggatacagtaagtcatgtgctactaagagttcagatgctgatatttgtgagtcacatgttaatgagttgcttaaagacaatctccataagagtgttgctctcgccctttggattctaaaatgctttcttgagtagaggggaagaacctggctttggggatggcaaaccaggaatagacatgaaacatgtgcatctgtaggggtctcctatgtgttttagtagaagaatggctttagatcttacgatttagtttaatccacatggtaaacagaataacagtccctcaaaaatgtgcccatcttctgtgaatatgttactttatatagcaaaggacatgttgcggatgcaattaggttgaggaatttgagatggtgagattattccagaatatctttgggcaggggacatctaatcacatgggttgttaaaatggaagcctctaggctgtggccctggattatctggtgggcccattatattcacagggttcttaacagggagttggggggatcagagtcagataaggtgacgtgaccatggaaacagcttggtgtgatgcattttgaagatggagaaggaggcagccatgagccaaggaatgtcaagtggactctagatgttggaaaaggcaaggaaatggattctgccatagagccttcagaagaaatgcaaccctggtgactctttgattttagccccgtaagactcatttcagattctaacttccagaactgtaagataatacatttgttttgttagaagccattcagtttgtgagaatttgttgtagctgtccccattatcggagttctcaaagctattgtctgcaaactttatcctcttatgtcactgaatgagagttcagattttgaaggagcagtatgaaagccccagtcaaaatgttgccatattattattatttctggaagtttttttttgtagagacaggttctcaccatattacccaggctggccttgaattcctggccttaagccgtcttcccaccttggcctcccgaaatgctgggattacaggcatgagccatcatgcttggccctatattattatttttaagaacaagatgaaattcagagttctttcttgggtaatcgggtgataatctcataagtaaaaacaatgtttaagtcattttcactcattactaaaaatatatttcttctgattactgccagttttttctcaagcttaatttcttatgtacatttgattttgctgacaaaatcaatttataaactaaccatgagatcatcgtcactgctgagatattttctctaatccagaaatagtatttggggtatattttctcattgcttccccagtttcttttcaaaatttatattgagggaatcattagtgacaggagtatatttatttatccaatagttaacgtgaaaacatgccatgttttccccttcattttattttctagcttttggaattttcagctgtctatgaggtgatttggggaaatgaaaaccctatataaatattaaggtagtggtaacctacaacagaaatggattctcctttgatataaatgtcagtccttgagtacagagaaagtgctcataaacatggatatgtttatgcttgtttatataattgtgcaagctgttatttttcttggttttgatttaaatctaggaaaattttcagtttgaattggacttaatcttataaacctgaaatccggttttcaatgcattgtgaataattgtctccttttgacagtgttttttcacttctagttttagcctccagctctgataggtctattagttataagacgtcctaggcttctttaggataaagacaatcaggaaacaggtttttatattcaactctaagtgtagcctgttagtttgaaagggtgttggtcatccataggggaaggatgagtggcttcagcatttgggtcagtttttaaagaagcccagctgtaccatatgatcaggaactaatgacctccaagttccagtcattatttctacatttagtagaaattagaggaccatcagccaggaagtttttagccaggaattcctaagctgaaaagtttagactagatgtctaaggtctgttccaatcttgagattctatatgtctagggtcattaggccactggactggaaaagaagatctaaaaaaaagaaaaaaaaatgcctacagctttgactgacatagcccataattgtatttgtgtaacttcaagcccaataaaattttatatttaggaaaatagatgactaatgcttcatttatattatagaatagatttttaaggctataggagataaagtttagcttggtgacaggagagtcactcaactactcttatttaataggaggcatttcagaattatagtacagtttttatattaccattattgttacactttttttcgttttcaagggatggagtcttgttatgttgctcaggctggatttgatgtctcgagctcaagggcttctcccacctcagcctcctgagtagctgggactacaggtgcatgccatcatgcctggctcatcattattatattttgaaataatttaacaagtgagcattgcctcattggaaattaatatgctacctttctcgtagaatgaagagtatttcttcaagaaaattagtgcaatgaaattgaattgctgctggaaccaccttctgaattctatttctacatgctgcctctcttattcagaaattactgttttaaatggccacaagagttttgttttactatcactagatcgttacctggaaattctcacctgcaacaatcaatactctcaaacaaaacagaaactagaaattattttttcatcatagagatcatttttagtttgttttcagatgggcatgggagatttgtctaaataagaccaatgactttttgttttgtttttggcttttttaaagacagggtctcactctgtcgcccaggctggagtgcatggggcaatcatgctcactgcagccgcaacctcctaggctcagtcctcccaccctagtttctcaagtagctaggactacaggcatgcaccactacagcagactaatttttaatttttttgtagagatggagggggtctcagtatgttgaccaggctggtctcgaactcctgggacaagtaatattcccgccttgccctcccaaagcattgggattacaggcatgagccaccatgcccagtcactgatatgttttctgccaggttttgacttgggggtgatggcaagctttcctctttttttttttttttttgagacggagtcttgctttgtcgcccaggctggagtgcagtggcacaatcctggctcgctgcagcctatgcctcccaggttcacgccattctcctgcctcagcctcctcagtagctgggattacaggcgcctgccaccacgcctggctaattttttttgtatttttttagtagagacggggtttcaccgtgttagccaggatggtctccatcccctgacctcgtgatctgcctgcctcagcctcccgaagtgctgggattacaggcgtgagccactgtgccctgccggcaagctttactctaaggagataaaaaattgaatggattttaattcttttgtttttattttcgtttctgagatggagtcttgctctgttgcccaggctggaatgcaatggtgtgatcttggctcactgcaacctctgcctcccaggttcaagagattctcctgccttaggctcctgaatagctgggattacaagcatgtaccaccacacccagctaagtttttgtttttttagtagagagggggtttcaccatgttgtccaggctggtcttgaactcctgatctcaagtgatccacccccctcagcctcccgaagtgttgggattacaggcatgagccaccacactcagcccggattttaattctttgtttgattttgctaactagagcagcaaggacagtctacagtctttggttctaacttcaaaactgattttttctgatcagttttattaagccatatctactgaaacaaaaagtattcttgtacctctctaagatgcaacgctttaggattgaaactgacaattctctgagctgcaaacatcaactctactgaaataatgctgtgattagcctagcggtttgctatcttttactatgaacaggagaatattcattcctaaaggtgatcccatctgatgattcctgtgaagagccgcagttcacacacacacttcagtgcattgatcgagagatcaggaattcaacttttgccacatctgccctcagggatagaaataatgcataccaagtttctctgtgaacatctttttaaattctgtcttccttcccagctcagactttcagtacccttcatgacttcatccagcagttctctatccatttttctgggggcacaagttattacttccccatctctcacccatgggacatgatggggtatgtgtgatttagtctattgtttatttaagaagaaaaagaagaaaagaaaattaagccatacatttcagtcctgtactttaattagtagtaacaaattactgggcacatgcctcacaacttactgcaaacttgaggtgcagatacagcctgaactctgctgcagttttcagaatgtcacacaacccaactttagcccgcatctccaaacaggctttctaccatacccaacccacagcatctggtatgacagactcccggtttagctcacacctaactccattgcctattgctacttgccctttgcccatccatccaaaaccttcagggtccactcttaaatcttccacagcattttctcatgacaatagtctccttccttagctctttataaaacattatctgtaacacacatttgctactgaccccctatataaccatgtgttaccatgtaaatttttctttctagctagattagcagaggcagaatttactctcacataaggatccttttttcattcaatgtcttactaaccatactgcaaaggaatacaatgagtttattaaatttcttggccatggcttaaacctaacagaagaaaaaaaaaaactgaaaggtttattgaattttgaatggatgggtggatgtcaacattttcatcagctactgaaaaaaaaaaaggaattctaaggaaacaaagggaattgataacctgccgatttaagtattaaagagtctttttagatgtgcagttttttcgttttaacattttgagagtattttctcccccaaaatcttatgtccagttgtaatacaaaaacggaatgcaccaagattttttaaaaggtgacaaggggggaaaaagataagtttacagatgtatacaaggaatttctgtgtccaatctgcttctaagaggggtatactttcctggaaagggatgtgcagccatgttattgaatctcatggactaaatgtaactctactttgcttatggcctacttcaaggatagaaaaactaaaaactagttctcacaccttttttaaaaaaatagatgaggagaacctgtgatctctaaattagtatctggagggggaagcaaaaaggtaaagtgcttacaactcaaagaagcttggaaatcacactttagttggtatccttggtcatacacaacagcttggaataagaataaggaacctttaccttagttatggctttgtcttgcaattgtaaagccacttttcatttgtatcaattacgggcatattttcatgattattcacaaaattgtttgtcagaatttctgggcatatggttaatttacttacgaataaaacctcctggccaggtgtggtggcttacatctgtaatcccagcactttgggaggctgaggcaggaggattgcttcagtccaggagttggggaccagtctggccagcatactgggatcccatttctgcaaaaaaattaaaagaatcaggcgcacctgtagtgccagctacccaggaggctgaagtgggaagatcgcttgagccctggaggctgaggctgcagtgagccatgatcacaccactacgctccagcctagatgacagaatgagaccttggctcaaaaaaaaaaaaaaaaaaaaaaaatctgcggaaaaatttccattttttttaacgtaaaaaaaatgcctatatgaagtcttgcagaatccttaagaatgtggcagaattaagccctggataggacttcaagaaacctcaggatccctctcaagaaaatcttattttcttatcaaattataaccaccatagacatacattaaatgtcatattggcaaaaagtagtgttatttcctctagtctctgggtccctactttatttgtatccctaaaatcactttcagaaccataagttgtttcctgacttgagtcagcaactgaactgcaagaggactcttaaaagaggaggggggtgcaccagttggcattctgtctcagcgtcagactcttcaccttagaacatgaaaactttctctgcactaggtagataggtatcagctgaactgggcggtgcccttttcattttttcccctcactgctttttactttcccatctccttgtacctcacatgtgtacagtagccataatgaaggccatgtagatacgacatgaaagagccaggagggagctcaggccagcttcccaagctattcattagcaattatcctatgttgaaatactacccacataaacatttcttcattagcaaataaactagtttgactcttggggtatagaaatcttgacgtgaatgctaacgagactcaagctaagcactggtttcagtgaaatcccacgagtttaaaaaaacatgtatttcaatttatgcatactttttcagaaatgttaatgggtaaagcaagaaataccaatcataagtgagaacttgctcagctactctggtaagaatcaaaaaagcatgtcctaggaatgctttggaacaagatagtatgatagagaaattcagatttctaaggatagatccactattcatttttattaattatggaataatttccattgttcatcttgatgacagaaatagaagggtaaaaaggataaatataagcttgacagaattaaagcacatcagtatttcatttgggttgtctttatttggttggtcacctggtaatcataactcctgaatcaccacactgaaaagtacttattaagtacctataattatgggttgtgctatatgatgcacatttaaaatttattaaacaagaagagtccatgctatctcaaaatgactgattatctaataataaaacagtatagtgttaccattatacccaagtatggaggcctgccagtatacaaagtattaccacagaaccattaggaaagcaatctatccacattaaaaactaagtgggctagtggcaaaccattattcatcttgaatataattgaactttaccggagagatgccagaaaggaaaggcaattttaattcatttaaattgtcctgttcattaaagaaaatcttaccttcttctaagcaatatggaaaacaaatagtacattcaaccataaatgacaactcagttaaagaggtaattattaatgcttaggcaacttccacttatagcagatgcttaggtttaattccaaactaaccccaaggatttgaatttcactacagtaaaagatttctgtgcatgcaatgaaaaacttactttgatcacagcactcaaaccgattcccattaactacctgtgaccctgatatagcttatacaattattttgtgtttacctacctgcttgaccacagccatgacaatgttggatagtcttgaccagtgtagcatgaagctgtgtgactgtgagtgactattgtcatcggttccctattctcttttctgtcgaaggaggaaattgggctccacctctaaggttccttgcttgcaattatcaagttctatgattctgtactgactgacttcattgccttagctgttgaattgctttgtaaagagagctcttgtggaaaagtgaatggcccttgctgggaagtgagcagtgcattaggattaattctcattttagaagttaggaaattggagaaaaaatacatagggaagattttttgttcttttcttggttcttgaggcattacttttccctttatggctagaatgataggattgtatgaagatattcatttaacttggtttatgattgcaagtaatacagttaatacaaccataatcagaatctcaattatgttgaatgggtaagataaataatggtaattttaaggaaatgtcttccatggtatatgtataattaatttctgttctcaaagaagcaaagagggtttggatgaaagcttcccaggctcagaaaatatgacagtagaaacatgaagatgggaaattcttcttcatcttttcacagttacacaatgttctacacattatgcaatgattatgtaattcaacaggacagcttaaggaatttttacagcttataagataacacttcaagtacccctttttcttctgaaagtttaccacaagaacaggaaaatctagggctactttacctctaagcctgtttatttatgaaataaagataatactttacctgcaccatgaggattaaatggtaaagctttttggcattatgtctacccataggaatcactctataaatcataatgtgattattgtcacttattacctttataaattagaaaaaaagtatatactttttcagattactatcacctacattaacttggtagaactttatttttctttagtctttgcttatatgtgcataaacagaaacagtgattgtgactcttaagtaatttaattccatgcccttgtaatttccagaggagaaataaagcaatatataatttatggccaaaagtactttcttcctgaaatgtccaatagttaaagtttccacaaaattgtttcactgaagtatagaaataatcaatgtctttctgggggaagaaaatgtatcataatatttttctgaatatttgactctttagttattaatgtattacggggaaagtacaactttctgttagtgtttgctgcctgtttactgtacacagatgcctgattattttccccatcagaaaatttgataggacaagaccacgttcattcaacagatatttattaagcacctactgtgttccaggtcttgtgggcccaagagaagagtctgtaaacctcagtgaaagtgatttattcaacatttacttatgggttgatttctggaatcattgctttatttggtggtattcactaagtaggtcacttgcattcatttacataggaaagctgcttgtgtaaatagcaaggtcccttatgagtcagcattacatgtcagcataaagggagaaaacacgaagcattttacaaataatactctttaggtgaacacattttgcttttgatattatgttttgtaacttatttctcaaccctttccttattgatctaattgaatagggaagacccattttaagagaaacattgctttctcaggaaacatgctcaactgttttaaattatttataaggtttctgttgctttcagtcgaatcatagttctattatagaagtttgtggatttttgcttttgaatttatcttttggcattatcagtactgttgtcagaggcatttgtaccagagtgactttatcttgaataggggctaagtaaaatgaggctgagacctactgggctgcattcccaggaggtaaggaattcttagtcacaggatgacataggaggttggcacaagatacgggtcacaaagaccctgctgataaaacaggatatagttaagaagctggccaaaacccacccaaaccaagatggtaacacaagtgacctctgatcatcctcactgcttattatatgctaattataatgcattagcatgctaaaagacactcccaccaacaccatgacagttcacaaatgccatggtacagtatacagtctaaaaagggaaggaaccctcagttctgttcctggggaaatccccgcccctttccccggagcactcatgaataatctacccctcgtttagcatgtaattaaaaaacccataaaagtagccagccagcagtcctcagggctgcctatggaataaccattcttttattcttttgccttttgagatggagtctcaaaaatctcagctcattgcaacctctgccttctggtttcaagcaattctgcctcagcctcccaagtagctaagattacaggtgcccaccaccatgcctggctaaattttgtatttttaacagagagggagttttaccatgttggccagtctggtctcaaactcctggcctaaagtgatccacccacctctgcctcccaaagtgctgggataacaggtgtgagccaccacacccacccaagataaaattttaaatggctatcttgttccaagacacaaccttgtcaccaaatagttccaataaaaacacttctttttaaaattcatgtatgtatctaaattggctcaacaaactctaaagaataaaattatttctctcagtgaaaagactactttttgtacttcaatgctatgttgttgaaatttcagtcctagagcctacaaaggaaatatatctatcctgacatgatacttaatatgttggttaaactactggaagacctgatttgtcaagggagatttcaacagaacactagtttgccgtgtagactagactccctcttcagtgaagcaggaatattctcaagaatattttttcagtgcttacaaagaggagaactggtacaaaatttggtgtttcctaatgactaaaaatatcttaaagattttgtttgcttgtttgcaggaagaaatctttcctgttttctgctctgtatgctgcctttatattcggtggtcggcacctaatgaataaacgagcaaagtttgaactgaggaagccattagtgctctggtctctgacccttgcagtcttcaggtaggtttttttcatttttctaataaaacgtatccattttatcacttgctgaaagaatgcaatgattgagcatttgattttaaatctgatatttttgattattgaatatgatgaggacataaaataaagtcatgttcagaaagaaagccttcactgccaccatttgccatgatgtattcaaccttatatattttgagaggtgtcaggccatctcttgtcctgtccaaattggtcatgcagtaatctgattgatctgttaggatgagaagcagtacagcaattcattattgttattggctaaatatagatgaaaggttaaatgggaaggcacacaagtaacctgttgaagtctattggagaacagggttcaaataccctgggtgtgctgttcctaacacttaatcaaaagatgacacttagacatagaccagacactggacatctgtgtcagtattgctagaccagagaatgcttttgctctgcatcttcaaaagcaccctccaccctcattccccgaactgacttgcagacatgtgtttatgtagccagctctggctttgtaaatgtgaaagaactcaacacagagactgtcaggacaaggcctgttctctcagggcatctgtcagctggtgtgcagactcattcctccagaagctttcaggagcatttccagtcttgtattattttgtgatctaggcaatcacaagactaattagcacccagctggtgtccaagcaagtgccaggatttacctagagtgctaacaaaggcacctgttctatttgtgttttgcttgtcaaaaccagcaagttcataactaggcttggggaggaacgggagcggagtaaatgtagatatactatgaaacacaaaactattaattttcatatttataaatattcatttgtattttttcatatattaactgttctaagcagaaatggatgttatcattaaagcttcattagttacttaaagcttattaaaaatgactgaggaagagtatttccattaaactcttatgatctgtgtttttccataatgttggatccctccatctaaaacacccacttactcaccactactgaatatactttttatttcagtgcaatttctaaagccctaggtttgaagtactcatgatttggatctgtcactaaaatctccttccagttcaatctgtatcagatcatgattctctataatataaagaaggcttttcatttttatttacatttaaggttgacagagtatgcctcacctgaagtattttgatatttgtggggaatttatctctatcctaatgaagcctttcaccattttactgatttttcaatattccctgcacctttatcttttgttattttaaattttaacacttgtaagcggagaaaaaaagtacaatgactcccctgcaacccctaccttggttaaacaattgtcaacacttggctgattttacttcgtttaatcttgctcaccttgtttctcatccccaaattatttggaactattaataatagaggctgaaataattcttattgaaatcataccatggctaaaggttaagtactctttaaaagcaaacacagtattatgatctcacctaaattaataatttgttcttattaaatttcaaatttcttcagttgtctcataaatgattcctgttttacagtttaagaacctagatcaaaatgagatctttacacttccattaactgatatcttttggcttatagatttcctctttttccttatgattcatcctttgaagaaaccagatagtttaccccatagagcttcctctggcctggattttgcttgattgcatttttctgtaccttctatttcttataagttgtagttagatctagaaggtttattacattcaggtgtaatatttgaagaggctttctataagaagaaacttgcctttatcaactattcggttatcttgaagtatatacagttattatagcaaagattaggataaatgcttgattctttgtctatattcatcaggttttttttttaagttagttagcatgtaaacaataagatttgttttcttaagaatcattataaacttatggatatgtactttttcatatgccagtgattttgagatatgattttgatgtgttttaagtccattgctattccttttgatggtgatagtttgatttttttttctttaattacaagataccaggccaggcatgttgtatatttcttgtccagaactggaatcagccatttctccaaagagcctgtattagttcgttttcatgctgctgataaaagacatacccgaaactgggaagaaaaagaggtttaattggacttacagttccacatggctggggaacctcagaatcatggcgggaggtataaggcacttcttacatggtagaggcaagagaaaaatgaggaagaagcaaaagtggaaacccctgataagcccatcagatctcataagacttattcactatcatgagaatagcacgggaaagaccagcccctatgattcgattaccgcccctccccaccccctacccgccccccgtcccccatccctcccacaacacgtgggaattctgggagatacaattcaagttgagattttggtggggacccagctgaaccatatcagagccctaattcctatggtggagagaagataatatttagaaaccactgtctgggtactaaaggtggttgttggtgctgagtaagttcttatatttaagtctttaaaaaagccagaagtggaaatttacttattgaggtaaaatatacatatataatctatcatctttacttttttttttttggagacaagatttcactctgtcacccaggctggaatgcagtggcacaatcacggctccctacagcctcaacctctccagcctcaagtgatcctactaacttagcctcccatgtagctgggactatgggcatgtaccaccacggccagctagtttctatatttgttttggtagagatggagtttcactatgttgccctagctagtcacaaacaatctttaccattcttatgacttaacttttatttctccttcctctcgggtcaaaaatccaaattcccagtgttggccagtaactccccatttactttatcctgcaatgcacatgcagaagtcagtggtgatactttatcttttttagactgacaaattattgtgttctctttcatttaaaattctgttattttactttcttcagagccatgttttgtataaaatttaaaaatccagaactatatagaaaaatccaagcatctgcagtctaaggttttaaaaagtggatcttaatttttttaagccagaatttgggaaacattgataatggaatgctatgcttctgtgtttggaagaacatattgagatttctctatgcttaaagaatgctagtcaacaatgcatggaagtaaaaaggctaactacacaatgatacttttaatataaaaatatttatagagatactagaagaaaataaactcaattttttactttttggggggcaaaagcagagaagatgtcttatttattaaattcctatgatttattagaaaataagaccagcctgggcaacatgacaaaaccccatctctacaaaaagtacaaaaattagccaggcatggtgtcacgcacctgtagtcccagctacctgggaggctgaggtgggagggtcacctgagccaggggaggctgaggctgcattgagccattttagcaccactgcactcaaacctgggtagcagagtgagaccctgtctcaaaaaataaatgaacgaatgaataaatggataaataaaaaatttcagcatttgtacaggttggttggtgtggactggcaatttagaagaaaaaaaatttgtgatgtgttattcagaacaaatgaagcaaatataatcatgtggacaactctcaattttgcatattggccatttattattgtttgtgtttttctgcatttaacacatttcctaaaatatacgtacacatgttcatatctaatctcctacacaattctgtagaatttcaagtgagtagttgctttttttttttgaaatccaaatatttcatgaatgaagttgatataaaacattcatcaaaaatatgctcttctggccaggcgtggtggctcacacctgtaatcccagcactttgggaggctgaggtgggcagatcacctgaggtcaggagtccgagactagcctggccaacgtggtgaaactctgtctctactaaaattacaaaaattagccaggcatggtggcacatgcctgtaatcctagctactcgggaggctgaggcaggataatcgtttgaaccctggaggtggaggttgcagtgagctgagattgtgccactgcactccagcctggactacagagcaagactgtctcaaaaacaaacaaacaaacaaaaaactgcttttcacaaacagttgttttaatgagtattaagaaattttctattttggtcataaatgaaaacttcattattataaaggatatatttttgtagaaagttttgagtggctcttacactataattcatgcattttcaactattgtctaatgacaaaaatatagaaattctttgctcaggagatagttcctctattagatggtctgcaatgaggtgatggcccaagggcctatcgcccactccatctccccgtcctttgccaccatagcgtaatcaatttagaaaatgaaggaaagagaaagaaccaaacatttcagaagaagtaaatttttcttttggaaaatcaccaaaaagaggaatttttgtgtatttcactgcttaggaataatttcttttccctcaagtcctcaaggttgcctgttagctcttaactgtagccagggacccagttatgcttaatttccagatgccatacactgttcactcatgaactgagacaacattatgggaattaaatcatatctgcagcatacttaaaaaaaaacaaacaaaagaaacctcttcaaaccagtctatttcaaaaagtgatggggttttaatattgtttgcaagaattgcctgcagtttttctctttatttttgggggctgactgaagcagccttcatggagacagaagtcttcattcaggtggtaatttattgaaacctatcataagctttgctagagtaaacaaaatatggccagttgagttttccttaggcctataatggatcatttcatttgaggaagatttctctgggtttccctgaaaatctctccccacgattcctccaggctccctttttcagaaccaaatcaccaggtcctggtgtcaattaatctttataaatatggccagtatgatggcatagtgaccaacttccacctacatcccacctaacccaaggacaggcatttctgtatttgataagataattttatgtggcatttatccatgggtgtttgaacatttccttagggtaaatgctgagaacaattctggttatgtgaatcagtaagacttttagatgagattgctcctggtggcaaagaagttagatttggctaagttatccaactttgatatggcaacagagcatcagatacttcaaggtgcctatcccctgttcttcacagacactcctgagtcattcaatcatgttgctatgacatgtcagctgggttactacagttgatttgaaaaagttttccatccttctagattgggtccaggtgtgtgtgcttctgattcaaggagcctctaccagttacctgtctggcagtgttttcttttcatcagcagcataaggagttccaagaagccatctttgaggttcttgacctaacacagatcaaagcaggatgtctagttagtgtacattataaaaagataatttggtgttaaaaatttataggtgcaaatatcacacttgcttcacctttgcttactccttttcctggtgattactctggcctcaattgtttttgcttgatttgcacaaatccagatgttctacactttatagtttgacttcttgcctattaaccaccagtttttcctgttgaacctcattgtaatttcctggctatattttcattttgttattaaatttcttctctggcttaagtatgaaatatattcaagattagtagaaaattattctctttttttcttttgtgggattcttatgaacaaagtgcttaaatatagcacaggaaactttcagaaaagtcttaacagtgcaagcagtagatgaatggtatttaatcaaatcatttgagatctgtttcccactgatatcataaacaaatttagtgtttaatatctgaagaattattggcaattaccttatttctaaagccaacaagtatataataaaactaactgaagctgttcaagtgaaaaaaacatgacagttcttaacctatatggaaggaatgaggacatgaatgacctataaaatgatggtacaatgaaaatgacaaattttagaacaatgaaatcagtttgtacataagaccgtcataagtgtcttagtttttttcctatggttgccaaaattgcccatcttaatccacaaaaacaatgatgatgacaatgattgtactgatactatttatataaaataaatggatccataagctttaagtgtcataggacaaaagctcctactttatgaaaaacgcattataaatgtcagatttttaaatgtaacaccaaaagggcagaagtaacaagcaaaattggaaagcataatgctgagtaataaaaaagcaagctgggaaataatcctggaagtgtaaaatcatttatgaaaattttaaaaactcgttaatactacatttatgaatatatatgtagtaaaagtattaaaatatgcacgaaaacctcaggatagtaattatctctgtttaggggaagggaaggagagaaatacgaccagagagagtccaaagggggcttcaattccttttgtaacatttcattacatgtagtaacatgttacaacatgttattacaaaatggtcaaaccagggaaaaatagctttgataaaaagtatggctataaaaaagcaaagttgaatgcaattaatgacatttggtttgttaaaagaaagagcaacaattgtagccatgatataagattcaggtcatactggtggtgcataagtaaagcaagtttatatcaaaacacaaatgttgtactttattggtcctcattctctacctatcccacccaataatgatcggtttatagttagaatgaagaatagcttttgtttcccccttttttttgacggtatccctcagttaagtgtgtatattttgctggaaggatgatttgggggacttttcttttctgtccgtgttcaactcttgaagaatctatcacggttaatgtttctaacttgtagacagatacgatgcaggtcagatattgtgcatttaattatttgttttatcaaaacctgtttttgttttatctttagcctactcgaaaatgtaaaatgtcacattttctataccaatacttcgtaactcccttagcctcctattttggtgtcattttatcaaagaaccatagaaattgctgactccaatgccttgcttctaatgccatatttgtaaattacagcttctcctattcttctaaaagtaaaattaatggatatataggaaatcctttttttttttttctgaaggcagagtataagacagttttctttggagaatcagatttttcttaaaactaaattgctggagcaattatgttttataataaacataataatataataatttattgagacataaaataactgagactaggaataacacacacctagataacatctccagcacactgactgtttgaaaggtcaggtcacaaaatgacaccaaaacatattttgtttccctctgcaccaagagaaaagtgaagcacccacactgtattattatttaaaagcccaacaaatgttcaaggcaaaaatcttaataaaatagtaaagttaaaaaagcccattgccacaggaaaaataatccttccatttacttagcactgccggagttggcttctttccttgatgaaggacaccctgctaacatttttacaactggagataacaatgtctagtctgaaaggtagtggggtagaggatttcttaagctttttttttttttttttggagatggagtctcgctctgtcacccaggctgaagtacagtggcacgatcttggctcactgcaacctccacctccctgattcaagcaattctctgcctcagcctcctgagtagctgggattacaggcacccgccaccacgcttggctaatttttgtatttttagtagaggcagggtttcgccatcttggccaggctggtcttgaactcctgacctggtgatccatccacctcggcctcccaaagtgctgagattacaggggtgagccactgcgcccagccatgttaagcattttgagttgtatttgaatccctttcaatctgagagctgcaggatacccctgttcagttatcctgttcagttttgttattatcctgttcagttttgttattaataccaattttgttggtctgttaacctatacacacattcacataactgcctaacaaattgcagctatttattatattaatatcaattttgttattctgatgacctatacatgcagtaacataactacctaacaaattgcagctacaggataaagaaaattctttctgtacctgcacatggtatatatacacacaaatcccgttaccctttatacactcttcttcctgctcaccaggaattttttctatccccctgacatcagagacagctcaagtaaaatactgcttcaactgggacctgacatcagaaattccaatgtcaacccagactagctcagatccccacccacccccttgaataaaacctccatgcttcattaaccatgccaggagcatcatgagtaggtaatagtggagttatatgacataagctacttcattaacattctctttgttttctagatgtctaaaactgcatcctttgccagagctcagtctttccagtctcaaatcaaaataaagtgaccctaactgaattcttgaccccttttgagaaaccacgagctataataaaaataagaaattgacaactttctatcttttaaaagtaagatggaatttttaactggggtccatgcaacttggtctgctcaggacagtctttagttttatgcacgttgtctcagtgtaattattaatagctccttcttcactctcaaaaatgtcccaatttggatgataaataaaacagttattctatttataacccactgagaaattgtgttggctcaataaaaaagaaaaaggaagaacaccatggattatttgacaattaactgctaacaaattcttatttttaggattgacctcttgactaaaacttgctctgcctgtctgtgatatttccaaacgtttgacacatcatcactcagatttaaaatatccaaactggttctccttttgatattcctttattcattgaagtttatcacaattttcctaatgaacatctttaagtcattctaagttatgtatgcaaatctcctttacccagtcaccaagttgtatcaattctcagaatctcttaggtagctgactacacctgttccaccctggaccctccaattatggtctttgtcagttcacatcttcagttttgcaaccactagttgctgtccttcaaatgtttcctctacccaaggatattctacatagcatattgtttccctgtttaaaccttaattaaaactcttttgcttatacattaaaacctcaatctcaccataaaaatgtacaatcttgccttgactcaccttttaccactgccctatgcaaacttttctatccaagccaacatggtatatcgaatcttttcctgcaaaacagacacaccttgcccattcctaatttcatgccttttttttttttttttttaaagacagtttcgccctttcacccaggctggaatgcagtggtgcgatctaggctcactgcaacctctttctcctgggttcaagtgattctcatgcctcagcctcccaaatagctgggattacaggcgtgtgccaccacgcccagctaatttttgtatttttagtggagatggggttttgccatgttggccaggctggtctcgaactgctgacctcaggtgatctgcccacctcaatctcccaaagtgctgggattacaggtgtgagccaccacagccaggcctaatttcatgtctttgaacacgctgcacttactctttctccattcttcctctatttgtttttctgtaaatcttagttattgcttagacttaacttaaaattccttctctataatggcttatctgatcatttcagcccatatctcagctccactgaacttgctggtagttcatttaaccagactatatattgccttaactgatgtacttcttggtagactatgaatttcttggggcaagaattgtgtcttgctgtccttggaacaccaagtgcatacatagttgttgaattaatgaatacaaatctcacacctgccagttttgcagtcatatgtgattatcatttccagtcacttcactttttcactctgtatttcttgcatcaactgccctagacatgccctagtccagtcttcattgcattccgtcagtctttacctgtgaacatgcatacatgcatcaagaaatcaaagactgatgttatgtagtgtcaggagcctgcaatggcctacaaagccctacacagcctggcccttagtttttgacctcttctcttccctctcctcagccactcttgcctccttgctgttcctcaaacatggtcacaaggcctctgcctcagggcccttgtatttgctcttcccttgcccagaacactcctcacccaggtattcttttttaattatatatatgtatatataattatatattataattacatatattttatatgtaatatatattatgttatatattatatatatatatatatatatatatatatatatatatatatatatttctttttaagtaaaatagaaacagagtctcactgtgttgtccaggctggtctgaaactactgggctcaaggatcctcctgcctcagtctcccaaagtgctgggattacaggtgtgagccactgcatctggcccatccagatttttttttttttttgagatggagtttagctctattgcccaggctggagtgcagtggcacaatcttggctcgctgcagcctccacctcctgggttcaagcaattctcctgcctcagcctcccaagtagctggaactacagacgcatgccaccgcacctggctaattttgtgtttttggtagagacgggcttttgccatgtcggccaggctggtctcaaactcctgacctcagtaatctgcctgccttggcttcccaaaatgctgggattacagacgtgagccaccataccagccccacccagatattctaatggcttgttcctcacctcctttagaattttgctcacatttggccttgatgagaccttccctagcctccattatccaaaatcacaatattcccatccatgcttgtaattgccttttcttatttttccctttaacgcctgtcatattccagcccactgtatgtattacttctgtggttcattatctgtctcgtcccactgcactctatgttccatgagggcagtgatttttgtctgtctgatttcctgctgtgtttctagtgcctaagtaggtgctctttaaaaaagtaataagggaaatgaagagacttactagcaactgtctacatttattttcaaaggtggaaataggaaaattttccagcttttctcttgaattcaagaactacctggaatttcacctatttccaagaaaataacagtgagtgatatatgcaaatatgacaaagaactgcaagtttatgtataggcaaagggtggcttctcattctcacaggaactatggttgacttgataaccttatatgacttgaattgcttatgtacaattagaaaatctgtccagtggtcactttttgattaagtaattttcctttctatttataaaagataggattctctgcatcaaaactgaaaaccacaaaatcacatacatagactttttatcccagttctcacagatatttactgttaatattttggtgcctcataatttaatgttaaacttgagattcttttatcataattttaattctctgtaatgcagttaatacatttgagtgtggacaaaaatatgacttctgtaatatctttgcattacaggtgctataacaacttgaaacagctgacatgtaagattctttaaatcgttttaccaaaatgggatagtatttaaatagctggaataccatagctcttttgaaacttggttgaaatataaaatgagcattctagaagagattgcgtgttagtttaggatgtaatatacttagatgtaagtataataacacctgcaggcatttgttaaggattgttttgaattaagacatagttagggattacagtttgtataaacttcatgttatctcataaatcctccacagatccttgtttggcagggtttgggatgtgtgcacgtgtgtgtgtgtgtgtgtactacaagatttcgaactaaaaattgaatccttaaaaaattcttcagacttaaggaatgaacttttaatgaaattgcctaattgcataatctggaatgcttcaaatgatgctgacgtccataaataaaatactgtagccacacttatagattagctgaaggaaacattaaagagaataacatggaaaaatactagacttttcttctctggtcgttctcattagtgagcagagaattaactgaaacattgcgagatgagtattccttcccctgatagtccacatgtccttaaagtgtggatatgagtggaggatggtagagaagagtggtattagtgttcattaaagagaaattggtcacccgccgtatggttatatgctgttgttagagcaatgaaaatcattttcctacatataaatgcttttcccatatgaaacttcttacaggcctcttatgacctcggccttgaaagcattgacagttctttcctgaaagctgtcaatttttattctccatgttttaatcaaagctctaaatagtaactgtcatctgtttttgatgatactagggtattgacagatgtcccagatctgacttgattttgcatatgacatagggagctcttgtttcttccttgaaaccggcaactcttgttagccagagctactagtaaatggactaatttcactggttgctagcactccttgaaactcgtttcctagcatgtgtttcaaaaatttgttaagtgagaattggtgctgactgtttgatcccttcttgttatcacttataactaaattgttatgctggctggaggctgtgcaagcaatcctcactgtattcattgttatcctagatcattcttacagtttccagagccctgggatttagaatcaaatctatgtaattaaaatgattgattgatccggggcataatacttcattccttgcacattgcaatttcctaacaactttataaagcaacgattttcttttgctcctttcatttgactactaatggtacaatagtagacagaggggtggctttttgtattttttgttctgagatgtggatgagcaccattgacttagcaatggatatgcggggtgattaatgtagctggtatttgtgttaacccggaactggagcagaaattttcaatgcagtttaatagaattgcttatgaattgaagaaattatgaatcattagttattcagcattctcttatgcagggggcagggatgtggtttctctgaaggcgttcagctttaagttggagtttatgctagcttaatgcagatagataggtaggtaaaaagcaaagcaggaaaaagaaactaactttccaggacaagggcacagagctcaggagaggatagtggagaagaaaatctaatttctgcctttaaaaggaatatagttaaaactctagtacttttccagttgtgaacagacagcctacctctagagatttcagtttaactcctcaaactgatttttgccaccttatacatgtttactgagaccaaacccatcttccatcaaccttggagtgaaggaatcactctggggtgtgttctaatctaattgacacctctagaataggtgtgtaattttctgttctccttaaggacatggatccttaaattgatagagtagaactaggttaaagtttgaagtcattaaaagtaaaagcaaacaaacatcttctgcctcatgtatttattaagttggctatgtctgtttctctccatttgccgaacctgtgaatattgtattgatcctctttctgccatacctttataataccttctgtatttcttcctatgcattcacacataaggtaaaattacaaataaaattgaatctgaatttctaaagtatgaaagtcaaactctcggccaggagtggtggctcacgcctgtaatcctagcactttgggaggccgaggcgggtggatcgcaaagtcaggagattgagaccatcctggccaacatggcgaaaccccatctctgctaaagatacaaaaattagccgggcatggtggtgcacacctgtaatcccagctacttgggaggctgaggcaggggaattgcttgaacccaggtggcggaggtttcagtgagctgagatcatgccactgcactccagcctggcgacagagcgagactccgtctcatgaaaaaaaaaaaaaaaaaaaagaaagtcaaactttcctgtaagttcctggaaggcctacctcttgtggccctaatgaggaggagccctgtcactcttgtgttcctgcatgcccaggtccagcaccaagtgtgagtcacatctcaagtcagtcaatgactggatttctttacatatacaatgctattgaggatggcataaattgcatcttttaagggttatggttgacaaaaatatgaatagagggtgcctacttttatttctgtgttaatgtatagaaggtttacatgtagataaatggtaaatgattagttatcaatcttgctgctcaaaaggaacccacagaaaaaaagtcacccttctccatacacagtctaaacacccacctcaacacaagatttagctgttttatgaggaattagtgagaaaaagatttgagagaattttatgtttcggtataatgctaacactaacaatagacatcattcattggtgcctggcactgtattaagctcttaatatattgtcttatctaactttcaagactgccttgaggtatgtactttattttcattttacaaatgagaaaacctaggctcagagaggtttaagaaacctcagaatagaatcccaggaataaaccctaaagcctgctgtgtaatacaaagaaaattgctccaacacagttatctgctgaagaggtatgtgccctctggatacctaagtaactattctgctcatcctctccttcctcctctttcttttccttccccacctccatcatcaccattgtggctgtgattatgcagccctgaggtctttccgttggagcactgcctctcttaaataggtgacttgctatcttgaggcaacaatgagctgctttgacaagaagaaaagttggcccatctacccataagctctcattgggcaaggatctcatatatttcatagacaatgttagccaactagtgtcctgatcttctgcctgcatctcaaaaatagcatgctatctcttaggagtgaatttcaattatcaggaaatccagaagtttgacattgttccacattttctgaaactgcccatggaaatcaattccaggcttataagctgtctgtatgtacagtcatccctcagtatacataggggattgggtctagaaccacccaggatactaaaatttgcacagactcaagcctgcagtcagccctgaggaacctacatatatgaaaagtcagccctttgtattggtgggtttcacatcctaggaataccatgtttggttgaacaaaatttgagtacaagtgggcccgagtggttcaaacctatgttgttcaaaggccaactgtagttatattaagctgaatgcacgtttttatacactaccgtctccacacttgttcatgaagagaagacagagcttctatttcattattaattttgcctatttaagcattttatcctaaaataaatgtatgctcatcacttgaaatagctgtcggagtaacatttgctggaaagagaaagaaagtaaataacacaaagttaaaaagacatgggtagatctgatttttggaggaccaagaaatttgttgcaaaagatctagctcacttctagtccctacaatgaaacacgagtgcagtagtttcccttacccacgattttactttctgtggtttcagttaccggtggtaactgtaatggaaaattccagaaacaaacaatttatacagttttaagttgtgcaccattctgactagcatgatgaaatactgcatcacaccactccgtccctctcaggacatgaatccttcctttatcaagcagattcacacctgtgagtcacttagtagccctgttggtgatcagactgtctttgtgtcacagtgcttgtgttcaagtgactcttattttacttaatatgacctgcaagtgcaatagtgatgctggctacttggatatgccaaagagaagccagaaagtgctttaagagaaaaggtgaaaggtttcaacttagtaaggaaaaaaatactatatgttaaggttgccaagatctatggtgaaaacaaatcttctatacatgaaattttcgagaaggaaacagaaatccatgctagttttgctgttgcacctccagctgcaagacttacggccacagtgcttattaaaatggaaaagccattaaatctgtgggtggaagacatgaacagaaatgtgtcccaattggtgggtttcaggcatcctccaggggtcttggaatgtgtccccgttgggtaagaggagtgtactgtatgcccaaggaattcctcatgttttcacttggggttatctgcacccagccctttgatagaattagtgtttattctcattttcactcccggaaaatgtataagctacaatactctaattagcgctctgtgcttggctttggtgagaacacactctgtgtgtgcacagttcaccaaaacctttgggaatgactgaagggcctggaagtttccaaactgagggtcaaggtcaccttggctttgctatccattatttcttgtttcttttacaggaaaaatcctttgatgttctataaattctaaatacatttgcaatttaaaacactcttcaaaaatgtagtaaaaccacgtatttgtaaccttcacgaaggccggaatctgaaaaaagaaaagacagagccaaattgactctaattgttaaggacaaaatgaaccatcttttgactagacaaagctaccagaaatctctttgattggaagtattttgtgctgaaaaccaactagaaaataggaggttttttttttttttacaattttattttaggtaacaggagctatttaaaaaaaattactccttcattccaccagaagttttaaatgtttcttgatctaaaaatgtagatgtggtttaagtaattgtatgaacaaggtaagggccagtgtctctactgtgacattaatgacaggtgcaaactaaaaaactcattccagtatttttgcagaatgaggagtggtgtcagagacagctgggcttggaaaccttctggaagtcttttattgtttcctgtattggatcaagtccaaaagtgagaataattaccctttagagctgccaagttttcaggcaattcagatgactctagtcttgtagtaggaaaaaaatgtgagtcagggtacaagaatagtgattgaattttataaaaagtatttctaaagcagtaatttcctcagaagtgacttgttagctttgactaatcgaatgcaaagtagagaagcgtctgatcaaaattacagaaaatgagaaagaaaattagactcatctacttctagacggcctaataatacagagttgagggtttcaatcaggctcccttggtgacttttaggtaattcatcaaatccttgtgggggcggtgtctgaggaggctgtgaaaaagagagacaggaagaacctctcaatattgaataggaaatttatattgttctaaaaacttcatatctcccaaatttgtaagaacaccctggtttaaaataaacaggctccccctcttgagaatagagaaacagtgacaggtgtttccctaaatttccaaacctaacaacccatttagacagcctatatcaggtgctttactcatcctcacaacagacctgcaaaggaaatactattataggacggtcacattcaaggataagatccttgaatatttcaaaataatcaaataactcagaactttcctaattccggatcagttttcccataggaataaatgtcgcatagggaggtattttcagaacctataaatctatatctaatgttgtgttttaaaacaattttaaacacaatgaatggatacatactaactttttgtcgtgtctaacttttgtttcttctctcaaaagttcttggctctaacaattttttcatttttaccactaacactaccacttaatgaacccctgggaagcatggtcataattaaccaatagtggtcattaaaataacagcacaggagtcatcaaaatcacacttaggaacttctgagggagagtggtttagaagctaatgaccaaaaatatttctatttcctactaacacactactctcatgtggcaatattataaatgtacgaaacaagttggaacactagctttgaaactgtgatttctgagtataatttagatgtaagagattcacatgccttcaaatttaacatataaagtacatcctccttaatattgtatatagtggtatttccaaatgtcatgattcagatgcacataaaatgcaaccacatccctattttgggatgaaagaagtgatgcttgggtgattaagaaatttacctatgggcacatacctggttccagaatcaggattaattggtctgacttaaaatgccatgctgcttacataactgagacaggtcaaaaagttaaagaggactaaatccagaaagacttcattagtggcttcgattagataggaatatgattttatgagcatctgagggagggaaacactttgctgtagagtttctcaaactgtgacctgtgggtcatttgcatcaagacatctggaatgtttgttaaaaatctccatttctggtttcttccccaaagctataaaattagagccagtaatctcagcactcttgggattactttgggaggccaaggtgggtggatcgcaacatggcgaaaccccatctctacaaaaagtacaaaatatttagctgggcatggtggagcatgcctgtagtcccagctactcaggaggctgaggtgggagaattcacttgaaactggaaggttgaggctgcagtgagccaagatcacaccactgcactccagacaaagtgaggtcctgtttccaaaaaaagtagagcctctggtggtgaagtttggaaatctgcatttttaacaatctccatgttttactgtaattaaagtttcaatatagtattaggaggcttatatgcccctttagataccacccaatgccccctcaccagagtccagggactcttacagtaactgtccccattgaacaactaaaggcttttgggacgtgttcagtagatgagaagttcaatacatgctgtgtttctccagacaggtatcacactgtgattctggtcaactatggcacacttactctttactcatgcatttcttaattgtgcctctgacctttcaccagctattttttccagcactgtggactattaactggatgcttgcacctgagatagcagtgttctggtaacctctcacttgaggaagttgttatctcagttggcttcctgtttggcctcatgccatccatgcagagccatgagaggcaaagcagcccagaagcagcctctcatccctctcctgtgacttcctaggagaagaatattccagtggttatgatttcccctccccacatccctccaacgcatgcacatacattgcctaacctcttgctttcatatcagtttgcattttctttctttgatgtcccatcttaaactcaacatggtctgaaaggagttttataaaaatgttcttagccagccctgccaacactctaccacaacttaatcaatacacaaataagtgaataattaaatcaatttctttccttctcattgtctagtgtcattatccaccctgttgctcaggccaatagccttagtcttcttttcttccttgctattaatatatcacagcatacgccgggcacggtggctcacacctgtaatcccagcactttgggaagccaagatgggcagaacatgaggtcaagagttcgagaccagcgtgaccaacatggtgaaaccccatctctactaaacacacaaaaattagccaggtgtggtggcacgcacctgtagccccagctactcaggaggctgaggcaggagaattgcttgaactcgggaggtggaggttgcagtgagccgagatcacgccactgtactccagtctgggcgacagagcaagactccatctcaaaaaaaaaaaaaaaaaaaaaaaatatatatatatatatatatatatatctgtgtgtgtgtgtgtgtgtgtgtgtgtgtgtaagtgtatataatgtatacacatatatgatatatatgtgtatacattatagtgtatattgttatatatcatatatgatatatgcgatatatcatatatgatatatgtgatatatcatgtatgtcatatatcatatatcatatatgcgatatatatcatatatcatatatgcggtatatatcatatatcatatatgtgatatatatcaaatttatatatgttatatgttatatatcatatataagttatatatgttatatatcacatataagctatatgttatatatatcatatatgttatatatatcatataagttatatgttatatatatcatataagttatatgttatatatatcatatatatcacatatatgttatatatatcatatatatcattatcacatatatgttatatatatcatatatatcatatatatgttatatatcatatatagcatatatatgttatatatcatatatagcatgtgttatataccatatatggcatatgttatataccatatatggcatatgttatatatcgtatatggcatatgttatatatgatatataacatatatgatatataacatatatgatatataacatatgttatatatcatatataacatatgttatatatcatatatatgttatatataatatataacatatgctatatatcatatatatcatatataacatatgttatatatgatatatatgatatatagcatatgttatatcatatatatcatatataacatgttatatatatctctatatatattatctctctctctatgtgtatatatatattatctatatatatcacagcatccatcacagcatctcagggagtctaagcagctatactgccaaaatagatcctatgtttgtctgcttctcttatgcccattgttaccacatactaaccaccaccatcatcatctttggaaatgcgggacacaatatatttttaagtgcctgactacttttataataatatgaatattttaacatttatattaatgtagtaattactacagtcctttcaccacacagcagcctgtattattaaaaatacaaatcatgtcattacctgcttaaaacctaccaatgcttgtacagtgcagttagaataaaatgaattgtataattattactatctctgtgtcaggatcctcaaaggccctataagctgtagtccatgcccacctgttaaaccatgtctctctttagtccccatcaccgccagcctctgggctcgtaccaagcgtgcccagctgattagtgcttagtgatttatccctctacctggtatgttcttctctaggtcttggccagcctggccccttttcattgatcagttatcagatcacatgtccccgcttctgagaggacttctttcatgtcagaagacgaccttcttgccctcatccctagtccattatcactttacctggttttgttatcctgtggcacttactacctgaaattagtaagctatttttaatgtattcatcagtctccctcactagaatatgggttttgtgaaaattgatttgtctttttcttaatcacttgatatgaagaacctagtatgtagtcggcatagaaaaagtttgctttttttttaagtgaataaacccagagagaaacaacctaattaaatcagaattccctaaaaggatacctgtgttctcttgttttgctcatgttgggcactagattcttgtctccatcttcagttaacattcactagttctgatacttacaagtaataatgtcttaatttgagatttctatggagctgttaaaagcgtttgtggataattgttgagtccatattctctaatgaaaacacacatggcctatcatacacagtcatgcgtcccttgacagggatgcgctgtgagaaaagcaccctgagaagtatgttgctaggtgattttttatttatttttttattatactttgagttttagggtacatgtgcacaatgtgcaggtttgttacatatgtatacatgtgccatgttggtgtgctgcacccattaactcatcatttaacattaggtatatctcctaatgctacccctcctccctacccccaccccacaacaggccctggtgtgtgatgttccccttcctgtgtccatgtgttctcattgttcaattcccacctatgagtgagaacatgtggtgtttggttttttgtccttgcgatagtttgctgagaatgatggtttccagcttcatccatgtccctacaaaggacatgaactcatcattttttatggctgcatagtattccatggtgtatatgtgccacattttcttaatccagtctatcattgttggacatttgggttggttccaagtctttgctattgtgaatagtgccgcaataaacatatgtgtgcatgtgtctgtatagtagcatgatttataatcctttgggtatatacccagtaatgggatagctgggtcaaatggtatttctagttctagatccctgaggaatcgccacactgacttccacgatggttgaactagtttacagtcccaccaacagtgtaaaagtgttcctatttctccacatcctctccagcacctgttgcttcctgactttttaatgattgccattctaactggtgtgagacggtatctcattgtggttttgatttgcatttctctgatggccagtgatgatgagcattttttcatgtgtcttttggctgcataaatgtcttcttttcagaagtgtctgttcatatccttcacccactttttgatggggctgtttgtttttttcttgtaaatttgtttgagttctttgtagattctgggtattaaccctttgtcagatgagtagattgcaaaaattttctcccattttgtaggttgcctgttcactctgatggtagtttcttttgctgtgcagaagctctttagtttaattagatcccatttgtcaattttggcttttgttgcccttgcttttagtgtttcagacatgaagtccttgcccatgcctatgtcctgaatggtattgcctaggttttcttctatggtttttatggttttaggtctaacatttaagtctttaatccatcttgaattaatttttgtataaggtgtaaggaagggatccagtttcagctttatacatatgactagccagttttcccagcaccatttattaaatagggaatcctttccccatttcttgtttttgtcaggtttgtcaaatatcagatggttgtagatatgtggcattatttctgagggctccattctgttccattggtctatatctctgttttggtaccagtaccatgctgttttggtttctgtagccttgtagtatagtttgaagttaggtagtgtgatgcctccagctttgttcttttggcttaggattgacttggcaatgcaggctcttttttggttccatatgaactttaaagtggttttttccaattctgtgaagaaaatcattggtagcttgatggggatggcattgaatttataaattaccttgggcagtatggccattttcacgatattgattcttcctacccatgagcatggaatgttcttccatttgtctgtatcctcttttatttcattgagcagtggtttgtagttctccttgaagaggtccttcacatcccttgtaagttggattcctaggtattttatcctctttgaagcaattgtgaatgggagttcactcatgatttggctctctgttagtctgttgttggtgtataagaatgcctgtgatttttgcacattgattttgtatcctgagactttgctgaagttgcctatcagcttaaggagattttgggctgagatgatggggttttctagatatacaatcatgtcatctgcaaacagggacaatttgacttcctcttttcctaattgaataccctttatttccttctcctgcctgattaccctggccagaacttccaacactatgttgaataggagtggtgagagagggcatccctgtcttgtgccagttttcaaagggaatgcttacagtttttgcccattcagtatgatattggctgtgggtttgtcacggatagctgttattattctgagatacatcccatcaatacctaatctattgagagtttttagcatgaagcgctgttgaattttgtcaaaggccttttctgcatctattgagataatcatgtggtttttgtcattggttttgtttatagcctggattacgtttactgatttgcgtatgctgaaccagccttgcatcccagggatgaagcccacttgatcatggtgtttaagctttttgatgcgctgctggatttggtttgccagtattttattgaggatttttgcatcaatgttcatcagggatattggtctaaaattctctttttttgttttgtttctgccaggctttggtatcaggatgatgctggcctcataaaatgagttaggaaggattccctctctttctattgattgtaatagtttcagaagcaatggtaccagctcctccttgtacctctggtagaattcggctgtgaatccatctggtcctggactttttttggttggtaagctattaattattgcctcaatttcagagcctatttttggtctattcagagattcaacttcctcctggtttagtcttgggagggtgtatgtgtcgaggaatttatccatttcttctagattttctagtttatttgtgtggaggtgtttatagcattctctgatggtagtttgtatttctgtgggatcggtggtgatatcccctttatcattttttattgcatctatttgattcttctctcttttcttctttattagtcttgctagtggtcggtcaattttgttgatcttttcaaaaaaccagctcctggattcattgattttttttgaagggttttttgtgtctctgtttccttcagttctgctctgatcttagttatttcttgccttctgctagtttttgactgtgtttgctcttgcttctctagttcttttaattgtgatgttagggtgtcaattagatcttttctgctttctcttgtgggcatttagtgctgtaaatttccctctacacactgctttgaatatgtcccagagattctggtatgttctgtctttgttctcgttggtttcaaagaacatctttatttctgctttcatttcgttatgtacccagtagtcattcaggagcaggttgttcagttttcatgtagttgagcggttttgagtgagtttcttaatcctgagttctagtttgattgcaccgtggtctgagagacagtttgttataatttctgttcttttccatttgctgaggagagctttacttccaactatgcagtcaattttgtaatgggtgtggtgtggtgctgaaaagaatgtatattctgttgatttggggtggagaattctgtagatgtctattaggtccacttggtgcagagccgagttcaattcctggatatccttgttaactttctgtcttgttgatctgtctaatgttgacagtagggtgttaaagtctcccattattattgtgtgggagtctaagtctctttgtaggtctctaaggacttgctttatgaatctgggtgctcctgtattgagtgcatatatatttaggatagttatctcttcttgttgaattgatccctttaccattatgtaatggccttctttgtctcttttgatctttgttggcttaaagtctgttttatcagagactaggattgcaacctctgcctttttttgttttccatttgcttggtagatcttcctccatccctttattttgagcctatgtgtgtctctgcacatgagatgggtttcctgaatatagcacactgatgggtcttgactccttatccaatttgccagtctgtgtctttaatttggagcatttagcccatttacatttaaggttaatatggttatgtgtgaatttgatcttgtcattatgatgttagctggttattttgctcattagttgatgcagtttcttcctagcctcaatggtctttacaatttggcatgtttttgcagtggctggtactggttgttcctttccatgtttagtgcttccttcaggagctcttttagggcaggcctgatggtgacaaaatctctcagcatttgcttgtctgtaaagtattttatttctccttcacttatgaagcttagtttggctggatatgaaattctgggttgaaaattcttttctttaagaatgttgaatattggcccccactctcttctggcttgtagagtttctgccaagaggtcagctgttagtctcatgggcttcccttcgtggataacccaacctttctctctggctgcccttaacattttttccttcatgtcaactttggtgaatctgacaattatgtgtcttggagttgctcttcttgaggagtatctttgtggcgttctctgtatttcctgaatatgaatgttgtcctgccttgctagatttgggaagttctcctggataatatcctgcagagtgttttccaacttggttccattctccctgtcactttcaggtacaccaatcagatgtagatttggtcttttcacatagtcccgtatttcttggaggctttgttcatttctttttattcttttttctctaaagttctcttcttgctttatttcatccatttgatcttctatctctgataccgtttcttccagttgatcaaattggctactgaggcttgtgcattcatcacgtagttctcatgccttggttttcagctccatcaggtcctttaaggacttctctgcattagttattctagttagcctttcgtctaattttttttcaaggtttttaacttctttgccatgggttcgaacttcctcctttagctcggagtagtttgatcgtctgaagccttcttatctcaactcgtcaaagtcattgtccgtccagctttgttccattgctggtgaggagttgcgttcctttgggggaggagaggtgctctgatttttagagtttccagtttttctgctctgttttttccccgtctttgtggttttatctacctttggtctttgacgatggtgacatacagatggagttttggtgtggatgtcctttctgtttgttagttttccttctaacagtcaggacccacagctgcaggtctgttggagtttgctggaggtccactccagaccctgtttgcctgggtatcagcagtggaggctgcagaacagcggatattggtgaccagcaaatattgctgcctgatcattcctctggaagttttatctcagaggagcacccggctgtgtgaggtgtcagtctgtccctactggggggtgcctcctagttaggctactcgggggtcagggacccacttgaggagacagtctgtccattctcagatctccagctgcgtgctgggagaaccactactctcttcaaagctgtcagacagggacatttaagtctgcagaggattctgctgccttttgtttggctatgccctgcccccagaggtggagtctacagaggcaggcaggcctccttgagctgcggttggctccacccagttcgagcttcctggctggctgctttgtttacctactcaagcctcagcaatggcaggcgcccctctcccagcctcgctgcggccttgcagtttgatctcagactgctgtgctagcaatgagcgaggctctgtgggcgtaggaccctccgagccagtcacgggatataatctcctagtgtgccgtttgctaagaccattggaaaagcacagtattagggtgggagtgacccgattttccaggtgctgtctgtcacccctttctttgactaggaaagggagttccctgaccccttgagcttcctgggtgaggttatgcctcgccctgcttcggctcacactcggtgcgctgcacccactgtcttgcacccactttccaacactccccagtgagatgaacccggttcctcagttggaaatgcagaaatcacccatcttctgcattgctcacactgggagctgtagactggagctgttcttatttgaccttcttggctccacctcgctaggtgactttatccttgtgtacttccacaaacctagagggtatatatttttatttacatatttttttcatatggaaaagcaagtgtcctaggaccattactgaatatgaatcatttctcctacttgatctgcactgccaaaagcaagtgccacaaagcagttttctctgtgtgttctattattatataggaccaccattgtatatgtgatttgtgcttgactaaaacatcaccatggaatgtataactgtacagttatatacagtaaattgtagagaatagttctggtttcagctgcaccgtctcatgcttcatataattttgtctgaagaacacttgcactaatgtttatctcttttcttcagcacttatcactaatacttttatttttacctataaaaagattcaatttatagattcaagtactgagtcattatcaagcaatttcttcacatctgtctgtcaggatgctagctgtgactgtgtgaaaatggagttcggtttttctcatcagcttgctattacccactgtgtgccataatactacaatgcaacatcactatgcctattcaagttttggtcaaattgtttcagggtatcaactcttcattgttggaaactttgatgtgtttcaggaagttattttagcattttcatcaaaagcacatgtcacctacatttggacttttttttgtcccaacattttacaagtcattaacttgaaaatccatttaattggtatatggaagtgattctttaaggaataggagtttagagttagagacatttaaggccatcttccagggatctttttgtgctgctgtggtggtggtggtgaaaaatggataacaagatttatcctcttaaccattttatgtgtatagttcagtagtgttacatatattcattgttgtgcaaccaatttttagaactttttcatcttataaaactgaaactgtacccattaagtgaaaactcctcatttctgcctccccctaacccaacaaccaccattctagtttctgtatctatgaatttgactgctttagatacctcataagcagaatcatacagtatttgtctttttgtgactggcttatgtcacttagcataatgtcctccaggttcttccactttgtagtatatgtcataatcttcttttcaaggcttagtaatatttcattgtatatataccacattttttttatccattcatccattgatacatttaggttgctttcatctgttgccaattgtgaataatgctgctgttttgagcatgtgtgtacaaggaactcctctaaatcctttttctaattcttttgaatacacacccagaagtgaaattgctgaatcatgtggcaattctatttctttttaagaaactgccatactgttttcaatagccatagagccattttatattccctccaacagtgcacatgggttccaatttttccacatcctaacagtaattatttttcatttttttgatagtagccatcctaatgactgtgacgtgatacctcattattttcattttctaatgatcagtgaggttgagcatcttttcatatgcttttgattcattatttgtgtattatctctggagtaacatctatttacctttgttgctcattttttaatagagttatttgttattaagttgtaattgttctttacatattctggatcacagttccagctccaggagatgaaggaacagggcacacttgaggatgcaatggagtgccaaggccagttacgggaaggagagccagcgcagggcttacccacttccttgatgcctctgctcaagtgtcgtcatattattgagttcttcctgcctataagttttaaaaaatgtttattatgtaataaaacagcacactgtactcccacccagcactccacacactccttatcaccatctggcgtactataatatatatttcctgacatactatctattgccctcatttaagatataagctccaacaaatgtgattcctatcagagtttactgctatgtccccagtacctaatgtcttatccacatcatttctaaagttctccaggtcttaaaatttcaggtccctccttccttacctgaaataatgcctggcacatataaaatgttcaggaaatattgcttgaataaataattaaaatctcatgaccctcccctggctgaaattacagtcagccctccatatctataggttctgcatctgcagattcaaccaagcttggtttggaggaaaaaaaataaagacaacaatacaaattactttaaaatactgtataacaactatttacattgcatgtacattgtgttattataagtaatcctggagatgttttaaagtatatgggaagatggacacaggttatgtgcaaataccaagccatttcatatcagagacttgagcatcctcagattttggtatcctggggagttcctgggacaagtctccctgatattgaggaattactatatttagaacctgggctgtctgcaattctgttggttgaaaatttatgtaataccccaggaaggacaaaggagtttcagccattccctgctcccattgcatttgtcttctcctaatatctaattgaggaattatgggattttgttttgcagagaaggaggagacaaatctgtattttgtaacctaaagtttggaagggccatggactatgggaaaagaatagaacaagaataaggaataagccagaaagtgagagagataaaccaattatcttccagcggtggtctttttatttcccctctcacacttcagatggaaaccggcttttccttcagaagacaggaaagccctaaagcatcaagggctccatcctctctgctggactggctgtgaggtcaggggcagcggtggaaggaattttccttgttcctcaatgcttacatttcatagtgaagggagaaaaatacgttctccttggaggaaatgtagagacttcctggggagttcagctatgaggccattaggaaaattcagtagtctgggaatctgtgaagcaagaaataccacagactttttgaaacctttattatgaaaccctgcttaataatcataaatgtcatagctcacaaatacccactgagtttgcgttattcattggtgcttaagggcccaaggttattccacaggcacaacccactttcagactttttccccaaagacacttaagataatttgtgagaacacacttaatgatattttatgtttttcctaccctgaggttaaaaaaaaaaatgcctctgtgaaaagagtgagctctgctcctgggacagtactggtagaatgccaagccaggcagcagtccagtgtgtgcccgctatcagccctatgagcttggcggcacgtgtggtatggagatgataaaggtatacatagatttctcattttgaaaattaccagaattgtatcattacattctagcagattgaccttaaaaaaattgtaaggatgaaatgcacggaaatcagtagaataggtacgagagtttaagcatgttcctaactcttccagattcacaaaccacagagttaatttttcttcttaaatcagttgtatacacatatataaaaattagcttatctgtgtatgattctcattttcaaaatcatttcgtgattaaattggggccaggacttcttgttgccttatttcacaggactctggaaggctttgattagggctttgaagtacaatagggtgacaactttcaggctgcctttgaggaacaggaagttcctgaaatggagatgagaggaccccagagaaggccatttggagattctcaaatgtctgagcaaccatgccagcatcttggagacttcaagagctgctgaactggccacaggtcagagataaaagtgctcccagggtttttcactgggatttctcttgaagaagcagatgaactcggcaacatagtcactgccaactgttgccagtgtggcacatttggagggtggcccatctgggcaccatgtataagaccttgcaactaaagagcctactagtgagtttcacctggcagataaattcccatgatttctagaaatactagtacaaaggattttttttgagacggagtctctctctgtcaccaggctggagtacattggtgcgatcttggctcactgcaacctctgactccctagttcaagctattctcctgcctcagcctcccaagtacctgggattacaggcatgtgccaccatacccagctaatttttgtatttttagtagagacagcgtttcgccgtgttggccaggatggtctcgatctcttgacctcatgatccacacgcctcggcctcccaaagtgctgggattacaggtgtgagccactgcgcctggccaaaggatttttacaggtgccacttaatttttttatttaaagctggcagactcaatgttctgagagtgtgctggtcagctgctaggagttaggtgctccagcaagttgacggctgtcagtcaacaggcttcagctgatatctgtctcactgatctcacgctggtggattgatttcatttgtgaactactgtatttctcatacaaaggatccaggtgaggaggaggctggctccgcccttctcacgttatgaagttatcagccaaagagttcaccagatattgcaggccctgaaatcttttggaaaatcctcctgaaacttccctggaggtctgtatatccctgtatttaaaatatatttatcaacgaaagatgtgatttagaaaggagtatcttttcataccatctcttttcagtggtggtatttgagcaatcttttaaaacacaaaaccccttgctccagtgctctggagtggtgcttagacgcctggcatccttctgagcaggcagtggatcttggccaagttccgggagggagcggtggaggaaactgtggagggaaggctgggcgggagagggggagccagccatggaggaatcccccctgctggttctgaaactgaagctttgtccccctgcctgaaaagaaggtgatttgccctcactgtagtggcatatcgtgaccagacacttcacagttcacactttcaaatgacctaagttccagagcatacacatacttgctccagtaaaaataactaaacatggaaagaaaaaaacaaagctcttttcagtgaggagtaaggtatagcacagggcctatcacctgagtgcttacaagtatgtgtgaaatgacttcattacatttaccttctttggtatgctttgtgctaataataattcagttactgtggacaactatgaacatctttggaaaaaagaacaatgtgatctttaaaagattgtaaagatggaatggatctttaggttaatgaacccaaaggaaggaactgggcatatggaagagccggagcttatgactctgctacctcccttccttgcagttcacagtttagagctggaatcataaggagtatttccagtcccctcattttaaggatgtggaatactgagggtcaaaatgacttttttccctccctggtttttagttagttgggttgggggaagactctatacagataatgttatatatcatggttcaagtgctctcccaatgaaatttgcattaattatctttattcgtcccttcttacattgctacaaagagctacctgaggctgattaatttataaaaaaaaagaggtttaattgactcaacagttccgcaggctgtacaggaagcatggctggggaggcctcaggaaacttacaatcatggtggaggcgactggggaagcaggcatatcttactggccgaagaaagaggaagagagccaagggtgaggtgctacacactttaaacaaccagatctcgtgaggactcactcactatcacaagaacggcaagggggaagtccacccctccaatcacctcccagcaggcccctcctccaacactggggattacagttcaacgtgagattttttcccccaggaaaaatgtttggtttcctcatgagaacgtgaaacctacctaggactgtgagatggagttaatggagcactgctattatcgttgcactggaattgtcactgtcctaataatttgataatgccctgaaagagattaatagttttctcaaaggaacaaagttttctgtagaaacaagatgactaaccacttttgtgatcctggtgagttttttggcttcaacattaatctttactgtgaatacatgtattccagtttctttttggttcatataagcatcattttaattttctgctctgcttaattgaggtcactattggtagaactttgttctttgttcctattagaaaagtccagaaaccagcacactgttctttccatttgtagttgaaatcagtattcatttggcatggctgagcctccacaggaatgcgttgtggcatctcttccatagttgagtgaagaagaaaaggcaagggaagaaagcatacccaccagtaattaattttgtagaatttagtacacctctttaggtttaaaattccaggagaagggttctcatctaggacaccagggatgtacagaaaggcaccgttctttatcagctgcctaagcagtgtcatccccaggctcatggagtggggttgtagagggagaacaggccagaaggcatcttgcacggtggggtctccaaaggtgtccctaatccacagctggggagctaggacccacaggggctcccaagtcaagattctgagccagttgttatgagatgactcctaggtgttagaattgccttagtgcttccaggtgattgtcatttccagccaggcagagaaacactatcctaaatgaaagcccagtgagttttcaggatcagctatcaggtaaaaggcactgagctgtagacagaagattctgctacttagtaactgtgagaccttgggccagtcctctgccctctctgtgcctgtttctttgtctataaaacagggataatggtgccccatgaggtgtagggagaatcaaattccataatctaggggctcaatcaagttctgtaaatgtgaaataccatggcagcatccagtgcagtgctcgcacagagtcaagtactggtcagccagcattgaagccttgcattgtttagtctgggagatgggctggagcaagcagtaactgcctttctctctggccttgatggggtcgaggctattagtagtgccaaggagatgaagtctttatatctcaaagaaaaaaaaaaaggtagcttaagtgacataaatcctgcttgtttttacaaaatagtgtgtgatatcttcatcagaatctcaaaatgttataaattctataaccaggtgttctgtttcttttgggaaatgctagttgacatccattatggtaccaagtgtccctattattattattattattattattattattattattatttggagacagagtcttgctctgtcacccaggctggagtgcagtggcgcaatcttggctctctgcaacctctgcctcccaggttccagcctcagcctcctgagtagctgggactacaggcgctgccaccacgcccagctaatttttgtgtttttagtagagacaggtttcgccatgttagccaagccagtctcaaactcctgagcttaggcaatcctcctgcctgggtcttccaaagtgttgggattacaggcgtgagccatggaccccagcctattacttataatctctccacccctcctcacgcctcactctgccaggtggtttttatcaggttagtttctaaaacttggccccccacatttctttgctgtgccaggtaactggagcaagtgtgctcttttccagttgcacactccagatgcaaggatagtgctgagcagtatccaacatgtcagacctctgaaaagcaagggagttattatctaagaaacgttcagacccttaaagccatcttttttatgtttaaaaagcttaggtttacaagttaagacaataagcgggtacttctgaaagtgaatcgaagccaactgatcctatcaaacatttaatcagaacatctgtttgcgatgaagttttctgacttatcagggggattggtggtgagttgagacagcagccgtagagtgcactctcatctcatgtttatcgggggatcatattgtccacgaagatagcttctctgtgctccaagactttcctcacttactgtttcttccatgaagtcttcagcacagacaggcttcgcactgcaacatgtagcattttctcagtctaggagttcaagattatcatcatatgatactattagtcatttttaggtaccattttagatacagaatgctgtggaagttacttcgtgcctgaaggcctaaatgttatttctccaaaaaggccttatctctgtcctctgtcttccttatcctagtctaaattaagtttagcttttatgtctaatacttttctttcttatgtattttagttttaatttatttattactgtccttttttcagttattgattgtctgattccccactagactaaaagctccagctagcatgtcagatctcagaggagagctctgtgaaaggcgttaatgtctaagtaacattcagacttttaaggtatcatttttttaaattaaaaaaacacaaggattatttgacaccagatatcaacttaaaatatgtgaaagacataaatattagaaatgaggatttaaagttggttttctaatagcttctgaaagaaagtggtatgttgattaatgaaattctaacatggtaataatcacatagacgcataacctttaaaaaaatgtacacaaattggatcataccatagatattgtcctgctccttatgtttttcacttaatcgtgcatcttgatgttcttttatgtcagcacctgatgcagagatcgttggtacatttcatggctgtattgtgttcattgtaatttatttaccgattttcatgtcagaggacatttcttggcacttctcctttctgctaccgtgtgaagaaggacatgtttgcttcttcttccaccgtgattgtaagtctcctgaggcttccccagccctgtggaactgcaagtcaataaaaactctttcctttacaaattacccagtctcaggcagttttttatggcagtgtgagaacggactaatgcatgttccaacagtggaattactaggtcaaaatatgtgtattttttattatgataatgtgatatgtaatttttgcctcaggtttcttgatccacaaggtgttggggagattttcagattttctaatggaggtatctgatttaagatttcaagcaagataaatgactcaaacctagaaatgatcacagagtaatcaaaggaaaagtgaagttatacactctgaagtgttaagtagtagaggaagaaaactatcagaaaaattacaacctatgccccgatttaactgcttagacatttattagacaaaaaaagaaaatctacactttggcttattatattattgaaaaatacatttttagctaaggctaaccactagaccaattaaagtagacattgtctattaaagatgcctgttctcaatgagaacacatggacgcagggagggaaacatcacacactgtggcctggcagggggtggggggcaatggggagggagagcattaggacaaatacctaatgtgtgcagggcttaaaacctagatgatgcgttgatgggtgcagcaaaccaccatggcacatgtatacctatgtagcaaacctgcacgttctgcacatgtatcccagaacttaaataaaataaaaataaagatgcttgttctcaagtgtggaaagggtttagagtttgaggtgcatgttgtttgtagagacatgatattgacatggagatgccataattcttttttttttttttttttttttttttgttgagacagagtctctgtcgcccaggctggagtgcagtggtgcaatctcggcttactgcaggctccccctcctgcgttcacgtgattctcctgtctcagcctcccgagtagctgggaccacaggcgcctgtcaccacgcccggctaatttttttttgtatttttagtagagacggggtttcaccgtgttagccaggatgatctcgatctcctgacctcgtgatccgcccatctcggcctcccaaagtgctgggattacaggcatgagccaccgtgcctggcctgagatgccataattctgcatcacaggcactgtaatcctatatcatcccccaaatctagaggcattacagtgggtttgagattaatttgttttaacctgttctggcatcactggatattcttcctactctggaaactgtcagagtctaagaccaacagcagttcaggttttgttatcaggaaaatcagtgacctctcctatgttaataaagagttgctgctgttggatcacctgttgctgttttttgacaactcctttcccactcccacccccctttgattgtaggatagaagtatgataaaacattttaattgcctaatactgggaaagtaattgtacctttggttattgagttagtagggtggagattggttggtggttagcatttcagaattaaaagatccttgagaaactatggtttgattccaaaaaaacttacatttaagacgaagatcaataagggaacaatgtaaaaatttttttttaaatcaactattgatgttcatgtgaaaataaagtattgatgatttatacccaaggctctttttccccccagggcagaattctggaattcttaacattactgagctattccattttgacttacagatggaaataaaagtggaaggttaaaatatagagttattcagtctttttccaagtaggtaaatggtcagacgtcatggtcaaagcctaggaagttttgttgttgttgctgttgttgtcgttttgagaaagggtctcactctgtcacccaggctggagtgcagtggcacaattatggcttattgcaggctcgacatcctgcactcaagcgatcctttcacctcagcctcccaaatagctgggactacaggtgtgcaccactttgcccagctaattttcgcatttgtagaaatggggttttaccatattgcccaggctggcttcaaactgttgggcttaagtgagccacccacttcagccttccaaagtgctaggattacagccatgagccattgtgcccagcccagcccaaagcctggttttaaagaagattagctatatctcttatacatctttaaaaaggaccccaatacatacacctacacaagaaaaaataaaacctgaaaacaagaacttgctttctaaacttttattctaaaaattccaacatctgtttatgtaaatatccaaaggaaactcccaaccatatacacatacatacccttcagctcttcagtgccactgtttctattgtttttgttatacatatatatttattttcatgtttgttgtctcctgcaataggctgtagaaactgccccctccccaacctccctcatgagtactgtaatatctgacacttggtgtgtgttaagtacgtgttgatttaatacatgaaacagtcttttctccccgagtgctaatgccagtttgtcatccaagggctgattagagattagtgttatatgtcaacgtcatgctagaaattcactaggaaagcctcacaagctagtaccattgtgattgcatcaattgtggccaggcacctattgaaagtagatttttaaacattatcaatcgaggccaggtgcagtagctcacgtctataatcccagcactttgggaggctgtggcaggagggttgcttgagcccaggagttcaagaccagcctgggcaagatgatgagaccccattttcattaaaaaaaaaatttctaatatgtgcttgattaaaaatagttaaataggcacagtggctctgcctataatcctagctacttgggaagctgaggcaggaggatcacttgagtccaggagttcaaggctgttgtgagctgtgattgcgccactgcactccagcctgtgcaacagaacaagatcttatcacttaaaaaaaataaaaaagagtcaaatagtgcagaaatgtacacagtacaaaatagaagttaccctcccccacccacaaagtattacagttaattgtataatggatattcttggccccctcctgacatcccatggcaaatagctagtgatcaggaaacaggctccttgtggattaggaatccagtgcaggagtttgagaagaaagcaccttagctaatcaggatggtgatccccacctcctcatcgccttgctgcattgtgtctgatgttgcagagggagcagaaacgtatactgctccctccacagagctctctgctattccactgatttcatttggctttgacaaaaatgatatgtatggtatatttctttttctttctttctttcttttttttttttttttgagacagagtttcactcttgttgcccaggctggagtgcaatggcgcgatctcagctcactacaacctccacttcccaggttcaagcaattctcctgcctcaccctcccaagtagctaggattacaggcgtgtaccaccgtacctggctaatttttgtatttttagtagagatggggtttcaccgtgttggccaggctggtctcgaaatcctgacctcaggtgatccaccctcctcggcatcccaaagtgctgggattacaggcatgagccaccgtgcccagcctgtatggtatatttctttttttcttttattttcttttttttttttaaagtatgaccatagagctgggaaaaggcatgtgacgtagtaatcatctgccttcattcaacacagtggtccagaccctcagcctctttgaggctctagatttagaataatctatatcatctgaaggaaagatacatttcacttgaaacagaagcttttctataccaacagcctctccttcaagcccttctatggaaagtgctcatttcacatcctgtcgtaaacttgctagttgtcacttgtggaaagttggtgcatggttaccttttgtggagatgagagtcaggatcaggaactgggggactgagcccaccaggtgtggactgcctaggctgtccctccttgaccccacgctctggccaacttcgactgctccaaaagagcaaccccactgcaggagatgtccctccttggggtcgccacaccaggagcaggcctccggaaacctgagaagtacttcgagaatgacagccatcctcggctcctagagactcacttgtccaagaaaaatatctatataaataaaaattctcatagcaataggaataatgtgaacaatcaatgtggcaaattgaactagctgtaaatcagtttccttaactttgaattagggttaattaaccttaacctctcttacctgacaaaataagatcagcgaggaaggtgattttcaacattgagggttagccgaagtaaatcagcaataatagtaatacaaatagtgatagagtaagaagagtaatataatgaaaactgtttcgttgagcacctgtgtatcagaggcttgatgctagctaaataccttacttatattgcttcaaaaaattcatacgatgaatttgcatgttagatattattctcatttcagaggaaaaaatacttcagtaacttggctaattataaaactgttagtaataagtgattggactgtgattggagcctattgtacaaagggttcgatttgcaactctaatctattgacagtggcatagagtggccgagaacttaaatgtgtggtccagggatggccagaaagactgctgagattgattagcagcatctgctgtgagcctaagtaaggactaggggtagcagaacagcagcatatttgcctgctgcatcacgctgcctctcaagctaatgtaacttggggaggaaggaaagcctcttcaccttaaagtgtattttgttaaagtgtcacgatgtgacactgttgtgataaaaaccacctggttccaaagcgtgcagaggatgaaatgtgcgaggggcagagctagtggctccccacaaataacaattatcccattggcccccacagtgctccccagcagtagcactgtcacatcccaacaatgcgcctttgcccacagacacatgggcccaatggctggcactgacggtttccctgaaaagtgctactgtcctctgttctgagttagccttattgttcagagcttagggaatgaggcacatgtccagatatgggacaataatatgtgctatacacttgctgtcagcaatattataggtcaccatgatatcaaaaccttcaactctacagtgctctgaactgacctccccataccctagccctcaaacttgtgaatacctatttgcccctaattcaaataccacttcctctgaagtcttctaggactaccactcactagccagagttagcttaatgattttttttcactccatcatctaaaaccatgccaataaatatttgaccactgaaagaataaatgaacttgtgtgaataccttagaaattgggaataaattacaatgattttttgagacccaaaaggatgaaaggatagcaaccatttcaagcatacattctttggatctactctgatcatgtgggaattacatagtctaacagcaagtagagtaagaggaagggttttgggctataccccagcactttgggaggccgaggcaggtggatcacgaggtcaggagtttgagaccggcctggccaacatagtgaaaccccatctctactaaaaacacaaaaaattagcctggcatggtggtgcatgcctgtagtcccagctacttgggaggctgaggaaggagagtcacttgaacccaggaggcggaggttgcagtgagctgagatcatgccactgtactccagcctggctgagagagcgagattctgtctcaaaaaaaaaaaaaaaaaaaaaaaaagccatcatttggtgagggaaagacagtacacaaaaaaaattcagataagacagaaaaatctctattacttgatgctactaatgaaatcaacccttcatccccaaattaggacagataatggactataaagacttaggtcattccacggggaggagacatttccttaagataagaaagtaaaaagccagttttgttatgaacaggggagaaatgcaaaggtcctgaggcagaaaactgaaagtgtctgaaagttctggagtgattggctcacagtgaacaagaagagaatggcaggaggtgagagtggagaatggggagagagaggcagtgcagagaggccttgtcggtcctgataaaggagttgaggtttttattccaagtgcagagaaaaaccactgaaggattaaacaggatctatatctgtaaaatgacagtaatcctctgcaggacaatttcatacagtggaaagagtaacaccatttgatggagtctttatacctttagagaagctacttacaaagacccaacttaatagacaattgccaggaattaaacttcattattttgatactgtagaaagttgacctttagttctagttggcagatgcgtgctttctggacaggttagcctagtggaatgatttattctagagcaactctaagatattttaagtaaaaaacagtgcctctgaggagaaaagaaggctccatttcccaattcaacagttgttcattcattgatctctcagctgacttctagagtaagatgctgcccttttgggcagaaaaggctaggcaggtccatcttccccacatggtcagccagctctcctttcagtcccgggcatggttcacacactctgggacatacacttaaggggctcacttcgtaatagtggctgcttgttcctattgccaagtgctttcccatggcaggttgtgtttcttgagcctaatgtgttccagaacttcctatttccttaccagttctctgatttaaagaaattgtttattttttcttcactttttcaacaatctcactttttcaacagtctttattgagcacctgtgcctatgtggagattaaacacattgcggggcattgaagaacagtgttggggtggtattagcacaacactggttctagggagctcagggagtgagcacttatctctgcctgagtgggcttcctggaggaggtgacagagctaagcttttgaaggagtctcattctgacatctctgagaaagatggatcagacagtagaaagtgatttggagactgctggagaaatccaaggagggcacaaaaagcctgggctggcaaggcgagtccagaggtagaggaaaagtttgcctaaagaggtaaacaggttttcaggaaatagagccagtagaacttggagaatgattgggcacagggcaaatttgagataattccaagagtttgcagccacacccatctgctctccaaggaatagttcccaagctgaaactcaaaggtcaccagcattcttcatgagatcctgctctgaatctgttaccctttttcatgacctctttttggaacagtgatgaagaggaagtggtatcatatatggtttcagaataaagcccttgagtcattgtattagctcttgtttacagaacattttaagatgctttcaaggaaatacaaataatatgattcttatgcctatttcctgccagtggccaaccagtcttctaagtatggttgatgtgagaagtgaaactattttcctaaatgctgtttcttttctcttttcattatgaagtatattcggtgctcttcgaactggtgcttatatggtgtacattttgatgaccaaaggcctgaagcagtcagtttgtgaccagggtttttacaatggacctgtcagcaaattctgggcttatgcatttgtgctaagcaaagcacccgaactaggtgagtatcttcttccatttcctctccctctctttgtagcaacatatccacagtatttatttagtgagcaaagaaacattttgaaggtcctattttgttggttgcaagaaagttacaatgaatgaatttgagttcttgcctgacttctactttttattgttcgctccctctttccttttaaataattttacattgtgcatattaagagtagatagtttatactgaacatgctgattttcgagctctactaaaaatatacctccacggacttataaaatgtacagagacccctttaaaaggcccactgagctgagctaatattaaaacatgggggaagaaaagagcaacacagctatttccaagtcccatatctgagcatactttcatctgtagagttaggattcagattaggaattaagcttttcatttggggaccctcctgttctcattaacaaatgctgagggttggtctctggtggtgtttgattttaatcatcaagactggccttagggaaggggaatgtaatttaccttccagaaagtaatagaaaatacaggctgtatttgtagatttctataatttttccctcaacccttgaatggtcttgaatgtaagtgtggcacaggttaccagaaatagtaaagtcaaggagttaatgtgggcacagttttccaggaagatgtctttatttacacagaaagagatctagtggtgacaataagctctgagtacatccatgagtaatgctagcaaactggtacagattgtacaggtacaaactggtaaggcaaacctggtcacctctggggttctgggttttttttcacctgcaattaagaattatacatatttagttcaaaagatatcaattgcaatttttgccattgttttcaatggcaaaaccgcagttaacttttgcaccaacctaatatgtattgtcccctctcctgtttctcctaaaaagggagtttggtgttgtactttccttacaaaccacctgcaatataagctatgagcagtcttctgtaaggtgccccttgttcacgccccgtgtccattcagatagaatgggaactgtctgatttgtgtgggccggcaacccagccaccttccactggaagccagaaacctgctgtttataagtagatgacaattggtttgagctactgtcttcccaggtcaaaaacaagggaagaacaacagaagaaaatttttcctgaaaacctttcctaagaggggcagaggtacaaagatagtccaaaataactagataactaccgcgtgcatgtgcatgcctgcaccgctccccccctccaacagacacacaaacgcctacacacacggatcatatgaaaacggtctcagggtaaaatgcattagtgtggattcattcattcattcattcagtgcatttatgttaagcactggctgaaatagaatggcaactttatctaaaaggaattttacaatacagattttatgaaccaggccccaggaggtattggtaccactaggtatgaagtcataggctagagaagtggttttcaccctggatttacagacaatgcctgcaaaatctgaagaggtatttctgggaattttaaaattatatgagaatattttaatttgctttgattcatagagtttctgaatcagagcacttgttctcaaactggggttgatctgagagtgtgagcatgtattctttactcttggggttttgtgatttttttttttttttttttttccctgagacagagtcttactctgttgccgaggctggagtgcagtggcgcgatctcggctcactgcaacctccgtgtcccgggttcaaacaattctcgtgcctcagccttccgagtagctgggattacaggtgtgtgccactacacccggctaatttttgtatttttagtagagacggggtttcaccatgttggccaggctggacttgaactcctgacctcaggtaatcagcccgcctcggcctcccaaagtgctagtattataggcatgagccactgtgcccggctgtggctttttttctttaaaataaaattacacgttattaaagtctgaattattttagttgagaaatatatccctcttttatgctatttaataaccttattaatcccctatcttttttgacaaaggcctgactacaactacataaatgtagtaaatgcatgaaacgtgatttcccctgaatgctacccctgaacacttcaacagtttctaccttttactacttccccctcaattttttttttaataagaaataatcatgccagtaggatgcaagtaggagactagactatggctggagactggacttccgacctttaagcctcagatcacaaaaaagcagcctcagtgttttcttctagaaacgccttttccctgcaaggactaattgtgttgtgttctgagttatatacagctgtatttgaggtacttgagaacaaacatagtcctttctaccttttggaggaataatttattgaaatgccacctcaagctatctgtagtgattaatttcctttaaagacataatcagacctatgctctctgtcctcctgacttttaggattcctagagaagacctattagtgtagcacccagaggtattcatattttcatcttctatcttggttgtgttgatgctgatgatgttaatatcacctgtcttaatttaatccaggcccaaatgtccattcccctcagcctcatagcggacattgtaattgaatacagtgttccctcttgagccccaaaggagccataatccagtctcctatttgcagtcaacaggagtggtgtgctgctggcatgataatccctttccctggaaagggctcattcatcacaataatttgtagtagtcctttgtggattatccaataatcgatgcagttaaaatatgagattgaagtgttggaaaaaataatattctaatcttgacatagttctttaatgaggctaattagtaacacaaattcttcatacagtttcaaaccctttatagagataattttcatgttctgaatactttttttttttaacattttaaaatatgggatattgttcttcaaatactctggagctcctctgacaatggccattcagaggtaaaccgctgactcaaaacaggtccaaaatcagtgcaagtgtctccaagacaagcagatctaggtctttatgtagtcaacatgtttgcctggatgacttttttttcccatgcattttggaggttaaatttctttccagtttttgcagttggaaaatcttgtcgctactatttaattaagagagatttacccgtttggattatttagaacttttcttatttttaggtctcaaattttacctttcaatattctaagattctggactctttatgagcaccaaaaggaaaagatctagtgagaaaaaaacagttcttccatgtatagtactgaaactgtatccccccccccagctcccacaaactcaaactcttgttttaaattgcagtaaaatatacatattattcagattgttgagcaaccattactccatcaacttccagaacttttgcatcttctccaactgaaatgctactcattccacactaactcccccttcactaaactcttaataaatagcaagaagacctttctgtttcagcagaaaaccgtgagctcatttcagtgaattatggggttgtaggccactagaacaagtgagaggaaaagagccactaacctgctttgtgtgccaaatctctgagcacctactatttggattatattaaaacccgctgagattttgttttgttaaaacttggaaatatctgctctgagcccaggtccttgctcagttgagcatgtcattgtttttgaagctctgactcagcagcactctagctagctctgggaagagggactcagctgtatgtgacaaaccacacacacagagtagcctctctgtgtctcttggtggccaagaacaccctggggatttccaaatgcttgttgcttttcctgcagctgcaaaggtgtagttaagaagggacacttgggtataaggaacaacatgccctgcctgaaagctgtctcttgaatgaaaatagttggaccaaaggttagagaaatcatgatacagagaacatgagccaggaggtagctaaaatgacaggactgaaacgttcgagagtctaaagtcccattgcttgtacttggccaatgtccttcccgttatgccaacaggacatttgaacaagaaagattgactgaccaactcaaatacacagtccctctgatagttaacatttctgggtcactctatagcttctggaaagcctgaaattaccatgacttggcatgactctggctcatgacaaattaaatgtgacattatgtggtttccccagaggaaaaataatttgtacctgccagagtggcctgactgatgcatctcagctgccatatccaagaccgtgagaggacttggttagctcttctagagccccaccagtttccccctgcctgagggaaactaccactctttgggtcagcagtctgggggatagtaaccctgatagggtgttgaatggtgctactgatcagctccagagccattgctgggagatgatcaatttcattcccgcacccaccatcgtgcatatgtgttctggaaaaaactcctaagcaaatttaaattaattttgttcttgagatttcgggacatgttttcccctcctcctaccctccactccactcccctccctaaagtaactagaaacacccagtgtatctcagttaaacctgagatataccctcacctccagacaggagaaacacaaagccattcttaactccagaattgtaccttccactttccatcccacactagcccattctaatatggtttttcttaatcattctttagacaataaaattttaatataaaagtgatgatagggttaaactaaagagttaggatgaaatgcatattactttgacaaatttattataatgtgtttggaattgtataggggtttatattttagttaatgctaagagactcatgaaagcatctattcaattatgaatgactaaacttgttttaaacatacagtatcttggacatctaccttctttacactatgaaccaaggtagctggaattgattgtgtctgcgttattgtccacagagggattggaggaacagagtagtacttatacagaaacggtggatctctgacagatacaaaaatagcacagtttaacactgaaaagtagatcccgggtctcctgacaccagttttgtcccttaagtatatgtatgagggttaccatcatcatccatcattatcagtctgcctgacacttatagacaccataaaaatctggcatcttgcaagagagaagatgacttcaacaaaaatttgacagtaggttcagaaatataacaactgacaactttcctatttatttaattaatttatttattttttgagatggagtcttgccctgttgcccaggcctagagtgcaatggcatgatcttggctcactgcaacctccgcctccccaggttcaagtgattctcctgcctcagcctcctgagtagctgggattacaggtgcctgccacaatgcccagctaattttttttttttgagatggagtctcactctgtcgcccaggctggagtatagtggcacaatctcggctcactgcaaactccacctcccgggttcatgccattctcctgcctcagcctccagagtagctgggaccacaggcacccaccaccacacctggatatttttttaattttatagtagagatggggtttcaccgtgttagccaggatggtcttgatctcctgaccttgtgatctgcccacctcgggctcccaaagtgctggaattacaggtgtgagccaccgtgccagcctaatttttgtatttttagtagagatggggtttcgccatgttggccaggctggtctcgaactcctgacctcaggtgatccccccgccttggcctcccaaagtgctgggatgacaggtgtgagtcaccacacccggccaactttctttttctattgtaaacaaatatgaaataatagtgtttaacagtttagtaggaaaataaaccaatagctctcctaatgcatggaatggggcaccacctgtatctttccagccactgccattagaaccttagaagtctttccccatagtccagcattctttgaccttgctgagtgcaagcgttttaggccatctgtgaagtacatgagggataaggtaggaataagtactagtttttctttgttttgttttgttttgttgcgcttaattaaatttcagaagaagaagaagaaccagggccgggttctcagggcggtggctcacgcctatagtcccagcactttaggaggccgaggctggtggatagcttgagctcaggagttcaagacctcatctctactaaaaaagtttttttaaattagctgggcatggtggcacatgcctgcagtctcagctattccttaggctgcagtgggaggatcacttgagcccaggagatcaagttttcagtgagctgcgatggcacgtaggtgacagggcaagaccctgtctcaaaaacaaacaaaaaattaaaagaaccttctagcttttgttttttacacaaaaagaagccaggtttgagttcaccaaaggtcatgaaggatgtcgatttttcccatgtctcataaccatagagataggaaggagaaagacgcattcacctgcattagcctgtttctgtcacacatcctagcgtaacttcccttattttcttactcgctaatgtaattgggtatatttttcactgggcttgctcttcatccaattttacataaatgttctacagtctattttcagagccctgaaacttttcagtgaagcattgcagatacatagcatctacccacctcagcataattctagctttcataatataaattccctgcctcagaagctatggtcttttccttcaaagggatattgttagacaaaattttgatagatcctggaaatcttttcagttaattctgtaaaatgaaaactgttattttcaattgctcctcacttgattcactggtataaaatattcctattacccttgtcagcaaatgtgtatagaagaggatttttgtccccctttttctgtcttttgtttaggttttacttttctcactgccatttggcaaggctgtgtaatttagggagctcacaaagatatatgtttgaggggtaccttttatcatgtaccaaagaaaaattatggttttactactctagagaagccttagaacattttgctgggcacttgacttccagtctgtttcctttgattgataaatgatctaagacaagtcaccagtcccctccaggtggtatttcctaaaatgtatagttgagttgggagttggcaacatagttgttaatgtcccttccagatcaatgatggataagattttgtgtgaaataccttgaaagaaacatttgctgcttgcctcctgtgtgtgaagagagccatgctgattatcctacttaatcctcaggtgattccatgctactcttttaaattatcaccatttatatagatgaggaaactagaaatagtgaggataactaacttgtccagggtcacagagctagtaagtaccagttcagggttctaatccagtctatgtaactctccagtcctagctcaggatgtctaccctcttacaaaactgtaagtcatcgttactggtggtcaaggatctcacgtaccttcttcctctttgtcttccaggagatacaatattcattattctgaggaagcagaagctgatcttcctgcactggtatcaccacatcactgtgctcctgtactcttggtactcctacaaagacatggttgccgggggaggttggttcatgactatgaactatggcgtgcacgccgtgatgtactcttactatgccttgcgggcggcaggtttccgagtctcccggaagtttgccatgttcatcaccttgtcccagatcactcagatgctgatgggctgtgtggttaactacctggtcttctgctggatgcagcatgaccagtgtcactctcactttcagaacatcttctggtcctcactcatgtacctcagctaccttgtgctcttctgccatttcttctttgaggcctacatcggcaaaatgaggaaaacaacgaaagctgaatagtgttggaactgaggaggaagccatagctcagggtcatcaagaaaaataatagacaaaagaaaatggcacaaggaatcacacgtggtgcagctaaaacaaaacaaaacatgagcaaacacaaaacccaaggcagcttagggataattaggttgatttaacccagtaagtttatgatccttttagggtgaggactcactgagtgcacctccatctccaagcactgctgctggaagaccccattccctctttatctatcaactctaggacaagggagaacaaaagcaagccagaagcagaggagactaatcaaaggcaaacaaaggctattaacacataggaaaaaatgtatttactaagtgtcacatttctctaagatgaaagatttttactctagaaactgtgcgagcacaacacacacaatcctttctaactttatggacactaaactggagccaatagaaaagacaaaaatgaaagagacacagggtgtatatctagaacgataatgcttttgcagaaactaaagcctttttaagaaatgccagctgctgtagaccccatgagaaaagatgtcttaatcatccttatgaaaacagatgtaaacaactatatttcaactaacttcatcttcactgcatagcctcaggctagtgagtttgccaaaaccaaagggggtgaatacttccccaagattcttcctgggaggatggaaacagtgcagcccaggtcccatgggggcagctccatcccagagcatttctgatagttgaactgtaatttctactcttaagtgagatatgaagcattatccttttgttcagttgccccgggcttttgaacagaagagtaaatacagaattgaaaaagataaacactcaaccaaacaatgtgaaaacgggttctgtagtatttgtaaaaaggcccggcccaggaccactgtgagctggaaaagggagaaaggcagtgggaaaagaggtgagccgaagatcaattcgacagacagatggtgtgtatgcccctccctgtttgacttcacacacactcataactttccaaatgaaaccccacagtatagcgcatattttcgatatttttgtgaattccaaaaggaaatcacagggctgttcgaaatattgggggaacactgtgtttctgcatcatctgcatttgctccccaagcaatgtagaggtgtttaaagggccctctgctggctgagtggcaatactacaacaaacttcaaggcaagtttggctgaaaacagttgacaacaaagggcccccatacacttatccctcaaattttaagtgatatgaaatacttgtcatgtctttggccaaatcagaagatattcatcctgcttcaagtcagcttcagaaatgttttaaaagggactttagctctggaactcaaaatcaatttattaagagccatattctttaaaaaaaaaaagctggataatattctctgtaatatttcagtcctttacaagccaaatacatgtgtcaatgtttctagtatttcaaagaagcaattatgtaaagttgttcaatgtgacataatagtattataattggttaagtagcttaatgattaggcaaactagatgaaaagattaggggcttccacactgcatagattacacgcacatagccacgcatacacacacagacacacagatgtggggtacactgaacttcaaagcccaaatgaatagaaacacattttctggctagcagaaaaaaacaaaacaaaactgttgtttctctttcttgctttgagagtgtacagtaaaagggattttttcgaattatttttatattattttagctttaattgtgctgtcgttcatgaaacagagctgctctgcttttctgtcagagatggcaagggctttttcagcatctcgtttatgtgtggaatttaaaaagaataaagttttattccattctgtgtgaatggtttgagcagtgaacaaagaatccatgcaaaccaagtcatgactggaagaaatggggagtgggggacagtgcaggggaggaaagctgttacatctatgttaaatgattgtgagcagtctataatgtcttgatgttggttcataggtgagacacaactgatggaggaatgtattataaattatgcaaaatctgacatgagctgaaaagacaggtccttttataagagctaatagatgcttaggatgcaaatgttattttgagcttcgcaaatacatgataccgtgcaataagccttttttccttataacagaaaatgagaataattaaaatgaggagaaggccacataacagttgacttgaatttaattgaaggacccattggaggctcatctggttgatttaattatttaattgagtgatttattgcagatctcttaatgcaggttagaaacggaagtgagcataaaccttaaaaagactctaaatgatgcttccaaagcactttcattttggtattaggttcatgtttgtttgtctttacttgtaaaataatttggaatttttgtttacagggtgaatgtcttaatagttttaaaattagctaaatatatctaaaggcatttccaatgtttatcatgggaggaaaaaagccacatttttttaaaacaaaacaaaacaaaacaaaattttggtaatataggttcaatacactgtttttaacatctcagcttagccgctttaatcatatcaagatatgaggctggatcactggcccatgacaaatctgaaacctaccagagaattgactgctgcatagataatcctgctgccagttaacattccagaaaaacttgggcaggcaagtttttatagctgccccactatgctgcaatagagtatctttctattgaagattttccactgcatcccgatcctactatggtgaaaacattgttcttgggctaaaaaaaaatcctttatttcatacacacatgatttcatacactaggtctgagcatcaagccaagtccatgagtttgcaatgaagttctagtgagaaatgctctattcataaagcagggggtttacgtggaccttctagtgttgcttatgggaaaagagtaactaccatattacatctaacgcaaggccaaagtaccaaattaaaaccatggattgaggtggttattcgaagtcacttactcccatccttctaattatgctccactacaaaagtaaggggagaagagggaatactttacatgtacattgctagagggaaaagaaaggcttgattatatcccctcgcttctccacctctctgctcatgtaaagaaactgatgagaaaagagactaatatgtctagactgagttagaaacttcatatgagtgggttttgtagaattgatgggaaagacagtgggaacctagaagaacagaaagagacccacagaatgtctttctttttttttttttttttttttttgaggtggattcttgctgttgttgcccaggctggagtgcagtggcgcgatctagactcactgcaacctccgcctcccaggttccagcaattctcctgcctcagcctcccaaatagctgaggttacaggcgcccgccaccacacccagctaatttttgtatttttagtagagacagggtttcaccatgttggccaggctggtctcgagctcctgacctcaggggatccacccgccttggtctcccaaagtgctgggattataggcgtgagccaccgtgcctggcccagaatgtttttttaaatcagatgtagcatcttcataaggtaaagcctgtcacatcagagtaacaaagctcctggagtacagtgatgctagagtagaatgttccagaagtctggccatagccccagcttctgaattacctgggagagacaagatgctcaggttactattttttctttattctgatagtacagcctctactcagagaccacggtgtgtgtcacacaaccgaggcagctagggcatattctgagggcttttttttttttttggtttccttaatgattctttaacagagtaactggattggccaaggtctgattcaagaggctgtgaggagagtagagaacaaatagactttgcctctcagagttcagagctttaagttgtataagcatggtccatgtccacctcttgtagacacttattccttaaaagtttccatcatgaaaaataatatcatgtcaaaattttataagcacccagaatgtcccagtagtcaaatgtagtgtctttctccagtctctgttttcgataataaataccttgctctcaatttaggatgatcgtaaagcctatgttcatgctgtgagtcattgtctcccacagcttttgaaacatcgttctttgtcttttctatacaacacctgattctttgtgcctcagactcattgctatcaggaagagactttgccaagatccaccaccacatttggccagtagtgtatacacattaaagtgagagctgatgaaatcacaatgctctattttgttccgacaatcagtatgaaggggtaggtcccagtttgccaatgagcaacagcctctgtatgctggtgtccaagacttacacaaaacaagtgtcagtgcagtcacagcattttcttgaatgctgttgtgacagactccagttataaacatctgcgagccatatggcacaactcatagctaaagaggccggtacagggcacatgcacagagctttgaagaacatacacaaacctgttgaatcaagttactttcctcatcctcagagactttgacaattcagagctcacagatggcagggggaattctcaggcttcccttcctcctgattgacactttttaaaggaagtgatgtggaagttgttctagaagttagatggacagtgggagcacattcgtgagtggggcttgggagagctcaaaagtggcactttgattttaggctgggcaggcagaagtctcacagtaaaatatatttcactagacgtccaaaccaacactgcattgtagtaacctcttctgaagtaactggttaaattaataactggtcccataagtcagggtcaagccacatttataacccattcgggccggccatgaagggttctgactcgacattggtatttaaatgctgttactttcccaatgcttagtagcacttgagactttatttccatcgacaaaaactaagaaggccacagaagtagcctaacagtcctccctggtcatactcgtttcaaacaggtctgcctgtctagacatattcaggcaggaggttgcttgctgctatcttgaaaaccactggaagattcagcttcttggggacctcagagcccatattcatatggaagcccacccatataagcctcacagagcaaatcacagcaatgttgaagttgttattttcaagtgcttatttcacgacattaaaaaaaatattttttcctggtgtattaaaattaaaaataaaatcataacttttgatttaaaatcaaactgtgtttctgttttctcttactctgggcaatttaaatgggacatctaggacactgagggttcctcaaatactcagaaatgccatttccacacttgacacccataggcttggggcacagagatgagtcactaaaactcctcgctttctagtagagcccaaagatgctgtagccctcaactactactgactaaatgtccataagatgtccagcccttcagtaatgcctttcattgatagattgatagagcatcttacaattcatatgctttctacctctgttggttcaccagagcaatttttttggggggtgggggggatagagtcttgctctgtcccccaggctggagtgcagcagcaagatcttggcttactgcaacttctgcctcctgtgttcaagcaattcttctgcctcagcctcctgagtagctgggattacaggggcgcaccaccacgcctggctttttgtatttttagtagagactgggtttcaccatgttggtcaggctggtctcgaacccctgacctcatgatccgcctgcctcggcctcccaaaatgctgaattacaggcatgagccactgcgcccggccgccagagcagtcttaatggggcagatggtctaaattgaaactccatttttatagatgagaaaaatgtgcttgttagatccagtgttacagaagtgagatttggacataatcttagcttggattttgctgcagccattcaatattttgaaaagaatgagaatataaatgaataaaattctaatacttggcactattggacagagcgtctcaggacaaaatatattttagggaaaacaacgggtacagcacctccttcttagttaatggtgcaataggttactcacgcctgccagatactagtaggagtaatccaagtcatccactccctgatccctaaataatttagccttcaaattccagtgttctggaaagttctttggcacactttataggtgaaatagtttgtcattcttcatcaccttttggcacattgttacaatgtgtacaaaagcaatgtccctacagcatttatatttaaaacccaagaaaccgttatttgtgcaggtttctcatggccaaattattgcctcttttcacatctcagaattgttaagatggaactttgcaatctatttaatgtattttcttaacttagggtcaaatggggaaaaatccatcctgcacacaaagtgtttttattaacttcaaaaagggatggggagggggaggaaaatcagacttcagggagcgtttctgttttgttatcaaagtcccagaaacctaatacagatgatagtgccatcatgtagcttctgttacatgtctcaaaaagtggatgtttcagaaattaataaagcaagcattaaaacatacaagcatatcactgtctagccaacaaaaatgctgtacttatggaactccaagaccaagatataatagagcaggtttcctatgaaagaacaaaaacgggttcacaacaccaatattttgggaatgtaaccactcctggctggttgtttttttttttttttttttttttttttttagaataaatgaatttaggtgggtgttctaaatcaatgggcaagacagttaaaataactgaaacagctcctcactggttggtctgcagctgattaatctccagcctcggtaggtctgggacagggtctcagttattaccagacactgctacctgagaccaaacagggagacccagctgagtgcagggacttacacagcgtgtgtgtggaggaggaggggctacattgtgtccccccagcctcacaaaactagatacacacgtccagaattcacatgtgccctctgcccgtagcaccatctcactaagcaaaggactccaggcaagacgaggagccctaggtcaggaaagattggacgctactgatctaaaagagactgttatctaattaattatcccattttatcccttttatatttttatatctgttttatttgtttattatttcttttttgagaccatgtcttgctctgtcgcctaggctggagtgcagtggcgcgatcacctttccctgcaacctcaacctgtcgagtagctgggaacacaggcacatgccactgtgcctagctaatttttcattatctgtagagacggggtctccttatattgcctaggctggtctcaaactcctaggctcaagttatcctcctgccttggccttctaaagtgttgagatttacaggcatcagccaccacgcctaacctatatccattttaagtttaactgcttttcattgttttcatctatataatagttgaaggaaggaacctttaggattttgccttattatgcatcacagaatatgtatttatttggggaaaatcatacatgcacactatgaaagcaccgtggcagcctaagggttaaacacataccacagccccctcctgacatgccacccgtctcaccactggattctgtcatcttcggtattttcagccccccacccagggtgaaaaccctgtgctacactctggggtttcacacacagcttgcttttctattgactacactaattcctttcatactagagggaaaacttatccctctgggtatttctctgctatgttttatttgtgaaaactccagtgagtatttgctaaggctgttaatatctctctacgaagaaaagaaaaacagggttcactattcctgcgtccactactgctcacagttatatatgagttactacaaaacaccagagcttttttgcaaaacaagcactttttctgaattagaagcagttctaatttcaacttagttttagaataatgaaatcgatagaatataaataaacctgcttagctttcaaatagacttaggctgccatgccaactcatttgttcatttacatctaacctaagtttccctaggaccccttagcctacagaggcaatttaaatttttttttttttttttttgtgccggtttgtagctcccactgatgcaggacctctgacttcctgccaagtccctcgcatctaattctggaaattgccagagtgagtctcgcagcctctaccaggcatttcttttatgtggtcaccccatctcccaccctcccacccacccatccctgccaggcgcagctgctgttgcatctctccaccgggccctgaaatcgctgtgcacagtcaggttcagcaagtctcagcaggcatcccccttctcccagaaaggcaacggttcctctgctctgcagtggggccagatgccccttttcccttaattagactttctgtgggagaaagctggccccctcaactcaagagccagacacgcattagggggccagggaatagattcggggaatggccactgcgctgcggcagaatctctacttcctcccctgcatgggtcaaagctttcctcaggttgaactcattagacctattaccttcttccccatggatgaatgccctttctggaacatcctcacctccattgcaaatagacctgtggccaccacaccagcttcccggacctgctcagacatatctgggcccagcagaagtgagttccttttctagaagccctagatctcctgaaggctccctataacctgccccaccacgggcgcggacgtccctgagacccacttaaattccacccagccaccatgctacatatgtaaagaagtaacaaagtacaaaaatgcttaaaacaacacaagtccttgcctttccagtgaaaatcagttttttgaattgaaagatcaaactgcagaaaatcacagtaattatgtggattttctccacttctgattcatggctatcacacgtgcccacttcctcttcctgggaagtgcaggctggggctccctggtatgttatcagagcactgtgcttttctactttatgggactttgaccccagtaaatatatacttagttatttgtgtgctgtctattcaacatctgtcttctttaatagattacaagctctgtaggacaggaatcaagcttgcctgttctctcctgaaattccaggcccctgtagaaggctaaatatttgttgaaagaataaatgcattttagcctatggttgtaggtaccataatagatctctatcttcgccacatgtctgtatgtttagtgtgtgtgtctgcatgagtgtctgtgtgtgtgtgtgttgagaaattccttgtgatttttcgttttatacttttaaacaggcagaactgtgttttgagccattggattatgactatttgcttattccactggaaattttacaatcttctgtaatattgtgactgtgattagcaaaagttcttgcctaagacttcagaacaaaggctttggagtttaactgccatctgcttggggatggttatttgcccactctgtgtctcagtttcctcatgcacacaataataatgatacctactgcaggccgggtgtggtggctcatgcctgtaatcccaggactttgggaggccgagccgggtggatcacctgaagtcaggagttcgagaccagcctggccaacatggtgaaaccccatctctactaaaaatacaaaaagtatctgggtgtggtggtggggacctgtaatcccagctactcaggaggctgaggcaggagaatcgcttgaacccaggaggcagaggttgcagtgagctgagatcgcaccattgcactccagcctgggtgacaagaacaagactctgtctcaaataaataaataaataaataaatggtacccactgcatagagttgttatgaggattaaattagataatacttgtaaagcccttagcatgtctcttaatacattttgtgctgctataacagaacatctaatactggatcatttatgaaaaatggagatttacttcctatagttctgtaggctgggaagtccaaagtcaagagacctgcatctggcaagggcttcttgctgcatcatcccatggtggaaggtggaaaggtaagagagagagagagagagggagacagaggtgagggctacagaggggagagagagagaagtgggcagaactcgtccttctatcagaaacccactctctggataactaacccactcccacaataataacactaatccatttataagggcaaaaccctcatggcctaatcacctattccaggttccatctttcgatgctgttgcattagggttaagtttccaacacatgaactttatgggacacattcaaaccataacagcatagttacttggtacatagtaattgcttaatgttagctaatagtattactactactactattgtgttacttcttaacttcttttttctgggtggtctacacataagcctctatttattcttcactgtgatactacagaaatttacctatggaacttctctgtcttgttattataacacaaactgtaaatgaaactataaacaaacatcttttccagactaacagagaatgaggtgctaggtaaaaaactatacctctattagggaaaatgtaaagtatattttgacatattcattgtagcttgtattttgtttgctgtttctaatacttatgtatgattaattagccaaggcttttgaaagaaagaaaacaatttcacctgagtgtctgctatttgagcaatatatttttaatctgtcctaaagatcattcttcatgataaaactacttctagcacaaatgatgcaataaaaaatttcctcgggagacagaaatgaatatctatattgtatagcttaaatatcagtttctgcataaagcaatttggaattgctaagggtattactacaaacacaaacatctgagtttaaaatagaatggcctttatcatggtcctgatggacaagtctgtcaagatcatgtgtgtctttctatgaggtttttcagtaaaataaacttgactctcgaaacagacaattcccaaatgattagtatattcaaaccctaaaactgtggagtttacatataaaattctaagctaattaaatagtcacttgtcactcaaaagtagtgagtgaaatattactcactagaagcatcaaatgtacacctattcacttgctgtttgattatgtttaggctttgtgctccacccaaatctcatcttgaattgtaattcccaggtgttgagggacggaccaggtagaaggtgattggatcatgggagcaattttccccatgctgttctcatgatagtgagggagttctcataagatctgatggctttataagtgtttggcaagttcttccttcactagctctctctttcctgctgccctgtgaagaaggtctttgcttcccctccatcttccaccatgattgtaagtttccggagacctccccagccatgcggaactgtgagtcaattaagcctcttttctttgtatattacccagtcttgggcagttctttgcagcggtgtgaaaacgactaatacaccgataaactcacaaataaacctttaaaaatgagccgggcacggtggctcacacttgtaaccccagcactttgggaggccgaggcaggcaaatcacttgaggtcaggggttcgagaccagcctggctaacatggcaaaaccccatctttactaaaaatatgaaaattagccgcacatggtgaaacacgcctgtaatcccagctacttgggaggccgaagtaggagaattgcttgaactcgggaggtggaggttgcagtgagccaagatcttgccactgcactccagcctgggcgacaggtgagactctgtctcaaaaacaaaacaaaacaaaacaaaaaaaacctttaaaaatgtctgtaaggagatcatgggaagaaaactgtataaattgtcagaagctgcgcccggactgaggaagcacaactgctgtttgttcattcaaattagattaattgcattttgaggttttaggttatgcattttgctttaacaatgggaattatataaacctcatttgatttcagcataatgccactaaaaagcactctctttgtctgggattttggtatactttatacttccatattactttccaattatattacagtaactacattttaattataacagcatatttctctcagacttgtagttctagttgatggatttcagccttcatccaggtcccagctctgaaactagaataaagccaggtatccctaacaaataaaatattatagcctgtttacctctcctttcttctttttattacgtagacattgtttatcaagaaaagcctttaacacatgcaaaaaatgattttagtccctatcaaaatgtctcatatttacatatatgcatattttttaaaagcaatgtgaaggtttgtctatattgtgaactgctcttgagagcttaatttataagtaattttattgtgcctaactgctggttaaacttcttattatgaaaactcttaaacatatataaaagtaaagaggccaggtgtggtggctcacgcctgtaatcccaggactttg

SEQ ID NO: 57 - DNA, 4412 bp, Homo sapiens
tctgcagagtccttaggggctcttccctaggaaactaataatcagggaaaacacctttcttgtttactgtagtccccccgccagaccttttgaaaatccctgtgtgggaggcgatccagtgtcaccttgcaatatttaacagaggagggtgtgctcatctcgcttcttgtagacagggttgtggcagaggcattcctctcctccccttaacttcgggtctggcgatctgtaaagttcaagcccaacgcaccccggagctaggcaaggggccggcagcccgggggatggcttgaccggggagggtcgggccgcagggtctcccgggagccgggggattccgcccgccgcgtgcgcgagcgcgcgtgccccgcgccctcccgcctgccctcttcaactggaaaccagaaacgccggcgcgcctgtggcctgggcgggttggtgcagtaggagctggtgccacggggccgcagctgcgaaaagggggtttcaacttcctgtcctccagccccctggagtcgccggccagtgtcgggaggcccggccgccgcttccttctcctcccgcccggccggagcgcgcccactcccagcttcccgcgggctggtccgggccccaatggccatttgcggcggctgccgggcggagcccgcctcctgggccgcgcgcaccggcggggcaggcctgcttggggaagaaatctttcctgttttctgctctgtatgctgcctttatattcggtggtcggcacctaatgaataaacgagcaaagtttgaactgaggaagccattagtgctctggtctctgacccttgcagtcttcagtatattcggtgctcttcgaactggtgcttatatggtgtacattttgatgaccaaaggcctgaagcagtcagtttgtgaccagggtttttacaatggacctgtcagcaaattctgggcttatgcatttgtgctaagcaaagcacccgaactaggagatacaatattcattattctgaggaagcagaagctgatcttcctgcactggtatcaccacatcactgtgctcctgtactcttggtactcctacaaagacatggttgccgggggaggttggttcatgactatgaactatggcgtgcacgccgtgatgtactcttactatgccttgcgggcggcaggtttccgagtctcccggaagtttgccatgttcatcaccttgtcccagatcactcagatgctgatgggctgtgtggttaactacctggtcttctgctggatgcagcatgaccagtgtcactctcactttcagaacatcttctggtcctcactcatgtacctcagctaccttgtgctcttctgccatttcttctttgaggcctacatcggcaaaatgaggaaaacaacgaaagctgaatagtgttggaactgaggaggaagccatagctcagggtcatcaagaaaaataatagacaaaagaaaatggcacaaggaatcacacgtggtgcagctaaaacaaaacaaaacatgagcaaacacaaaacccaaggcagcttagggataattaggttgatttaacccagtaagtttatgatccttttagggtgaggactcactgagtgcacctccatctccaagcactgctgctggaagaccccattccctctttatctatcaactctaggacaagggagaacaaaagcaagccagaagcagaggagactaatcaaaggcaaacaaaggctattaacacataggaaaaaatgtatttactaagtgtcacatttctctaagatgaaagatttttactctagaaactgtgcgagcacaacacacacaatcctttctaactttatggacactaaactggagccaatagaaaagacaaaaatgaaagagacacagggtgtatatctagaacgataatgcttttgcagaaactaaagcctttttaagaaatgccagctgctgtagaccccatgagaaaagatgtcttaatcatccttatgaaaacagatgtaaacaactatatttcaactaacttcatcttcactgcatagcctcaggctagtgagtttgccaaaaccaaagggggtgaatacttccccaagattcttcctgggaggatggaaacagtgcagcccaggtcccatgggggcagctccatcccagagcatttctgatagttgaactgtaatttctactcttaagtgagatatgaagcattatccttttgttcagttgccccgggcttttgaacagaagagtaaatacagaattgaaaaagataaacactcaaccaaacaatgtgaaaacgggttctgtagtatttgtaaaaaggcccggcccaggaccactgtgagctggaaaagggagaaaggcagtgggaaaagaggtgagccgaagatcaattcgacagacagatggtgtgtatgcccctccctgtttgacttcacacacactcataactttccaaatgaaaccccacagtatagcgcatattttcgatatttttgtgaattccaaaaggaaatcacagggctgttcgaaatattgggggaacactgtgtttctgcatcatctgcatttgctccccaagcaatgtagaggtgtttaaagggccctctgctggctgagtggcaatactacaacaaacttcaaggcaagtttggctgaaaacagttgacaacaaagggcccccatacacttatccctcaaattttaagtgatatgaaatacttgtcatgtctttggccaaatcagaagatattcatcctgcttcaagtcagcttcagaaatgttttaaaagggactttagctctggaactcaaaatcaatttattaagagccatattctttaaaaaaaaaaagctggataatattctctgtaatatttcagtcctttacaagccaaatacatgtgtcaatgtttctagtatttcaaagaagcaattatgtaaagttgttcaatgtgacataatagtattataattggttaagtagcttaatgattaggcaaactagatgaaaagattaggggcttccacactgcatagattacacgcacatagccacgcatacacacacagacacacagatgtggggtacactgaacttcaaagcccaaatgaatagaaacacattttctggctagcagaaaaaaacaaaacaaaactgttgtttctctttcttgctttgagagtgtacagtaaaagggattttttcgaattatttttatattattttagctttaattgtgctgtcgttcatgaaacagagctgctctgcttttctgtcagagatggcaagggctttttcagcatctcgtttatgtgtggaatttaaaaagaataaagttttattccattctgtgtgaatggtttgagcagtgaacaaagaatccatgcaaaccaagtcatgactggaagaaatggggagtgggggacagtgcaggggaggaaagctgttacatctatgttaaatgattgtgagcagtctataatgtcttgatgttggttcataggtgagacacaactgatggaggaatgtattataaattatgcaaaatctgacatgagctgaaaagacaggtccttttataagagctaatagatgcttaggatgcaaatgttattttgagcttcgcaaatacatgataccgtgcaataagccttttttccttataacagaaaatgagaataattaaaatgaggagaaggccacataacagttgacttgaatttaattgaaggacccattggaggctcatctggttgatttaattatttaattgagtgatttattgcagatctcttaatgcaggttagaaacggaagtgagcataaaccttaaaaagactctaaatgatgcttccaaagcactttcattttggtattaggttcatgtttgtttgtctttacttgtaaaataatttggaatttttgtttacagggtgaatgtcttaatagttttaaaattagctaaatatatctaaaggcatttccaatgtttatcatgggaggaaaaaagccacatttttttaaaacaaaacaaaacaaaacaaaattttggtaatataggttcaatacactgtttttaacatctcagcttagccgctttaatcatatcaagatatgaggctggatcactggcccatgacaaatctgaaacctaccagagaattgactgctgcatagataatcctgctgccagttaacattccagaaaaacttgggcaggcaagtttttatagctgccccactatgctgcaatagagtatctttctattgaagattttccactgcatcccgatcctactatggtgaaaacattgttcttgggctaaaaaaaaatcctttatttcatacacacatgatttcatacactaggtctgagcatcaagccaagtccatgagtttgcaatgaagttctag

SEQ ID NO: 58 - protein, 213 aa, Homo sapiens
MNKRAKFELRKPLVLWSLTLAVFSIFGALRTGAYMVYILMTKGLKQSVCDQGFYNGPVSKFWAYAFVLSKAPELGDTIFIILRKQKLIFLHWYHHITVLKWYSYKDMVAGGGWFMTMNYGVHAVMYSYYALRAAGFRVSRKFAMFITLSQITQMLMGCVVNYLVFCWMQHDQCHSHFQNIFWSSLMYLSYLVLFCHFFFEAYIGKMRKTTKAE

SEQ ID NO: 59 - DNA, 4107 bp, Homo sapiens
ggacaaacgtgcgggcactaagaccgcaaggcattcatttcctcctacggtggatgcggacgccgggaggaggagagccccagagagaggagctgggagcggaggcgcaggcaatgctcagccctggatgtagctgagaggctgggagaagagacgaccgctggagaccgagcggcgtggggaagacctaggggggtgggtgggggaagcagacaggagaacactcgaaatcaagcgctttacagattattttattttgtatagagaacacgtagcgactccgaagatcagccccaatgaacatgtcagtgttgactttacaagaatatgaattcgaaaagcagttcaacgagaatgaagccatccaatggatgcaggaaaactggaagaaatctttcctgttttctgctctgtatgctgcctttatattcggtggtcggcacctaatgaataaacgagcaaagtttgaactgaggaagccattagtgctctggtctctgacccttgcagtcttcagtatattcggtgctcttcgaactggtgcttatatggtgtacattttgatgaccaaaggcctgaagcagtcagtttgtgaccagggtttttacaatggacctgtcagcaaattctgggcttatgcatttgtgctaagcaaagcacccgaactaggagatacaatattcattattctgaggaagcagaagctgatcttcctgcactggtatcaccacatcactgtgctcctgtactcttggtactcctacaaagacatggttgccgggggaggttggttcatgactatgaactatggcgtgcacgccgtgatgtactcttactatgccttgcgggcggcaggtttccgagtctcccggaagtttgccatgttcatcaccttgtcccagatcactcagatgctgatgggctgtgtggttaactacctggtcttctgctggatgcagcatgaccagtgtcactctcactttcagaacatcttctggtcctcactcatgtacctcagctaccttgtgctcttctgccatttcttctttgaggcctacatcggcaaaatgaggaaaacaacgaaagctgaatagtgttggaactgaggaggaagccatagctcagggtcatcaagaaaaataatagacaaaagaaaatggcacaaggaatcacacgtggtgcagctaaaacaaaacaaaacatgagcaaacacaaaacccaaggcagcttagggataattaggttgatttaacccagtaagtttatgatccttttagggtgaggactcactgagtgcacctccatctccaagcactgctgctggaagaccccattccctctttatctatcaactctaggacaagggagaacaaaagcaagccagaagcagaggagactaatcaaaggcaaacaaaggctattaacacataggaaaaaatgtatttactaagtgtcacatttctctaagatgaaagatttttactctagaaactgtgcgagcacaacacacacaatcctttctaactttatggacactaaactggagccaatagaaaagacaaaaatgaaagagacacagggtgtatatctagaacgataatgcttttgcagaaactaaagcctttttaagaaatgccagctgctgtagaccccatgagaaaagatgtcttaatcatccttatgaaaacagatgtaaacaactatatttcaactaacttcatcttcactgcatagcctcaggctagtgagtttgccaaaaccaaagggggtgaatacttccccaagattcttcctgggaggatggaaacagtgcagcccaggtcccatgggggcagctccatcccagagcatttctgatagttgaactgtaatttctactcttaagtgagatatgaagcattatccttttgttcagttgccccgggcttttgaacagaagagtaaatacagaattgaaaaagataaacactcaaccaaacaatgtgaaaacgggttctgtagtatttgtaaaaaggcccggcccaggaccactgtgagctggaaaagggagaaaggcagtgggaaaagaggtgagccgaagatcaattcgacagacagatggtgtgtatgcccctccctgtttgacttcacacacactcataactttccaaatgaaaccccacagtatagcgcatattttcgatatttttgtgaattccaaaaggaaatcacagggctgttcgaaatattgggggaacactgtgtttctgcatcatctgcatttgctccccaagcaatgtagaggtgtttaaagggccctctgctggctgagtggcaatactacaacaaacttcaaggcaagtttggctgaaaacagttgacaacaaagggcccccatacacttatccctcaaattttaagtgatatgaaatacttgtcatgtctttggccaaatcagaagatattcatcctgcttcaagtcagcttcagaaatgttttaaaagggactttagctctggaactcaaaatcaatttattaagagccatattctttaaaaaaaaaaagctggataatattctctgtaatatttcagtcctttacaagccaaatacatgtgtcaatgtttctagtatttcaaagaagcaattatgtaaagttgttcaatgtgacataatagtattataattggttaagtagcttaatgattaggcaaactagatgaaaagattaggggcttccacactgcatagattacacgcacatagccacgcatacacacacagacacacagatgtggggtacactgaacttcaaagcccaaatgaatagaaacacattttctggctagcagaaaaaaacaaaacaaaactgttgtttctctttcttgctttgagagtgtacagtaaaagggattttttcgaattatttttatattattttagctttaattgtgctgtcgttcatgaaacagagctgctctgcttttctgtcagagatggcaagggctttttcagcatctcgtttatgtgtggaatttaaaaagaataaagttttattccattctgtgtgaatggtttgagcagtgaacaaagaatccatgcaaaccaagtcatgactggaagaaatggggagtgggggacagtgcaggggaggaaagctgttacatctatgttaaatgattgtgagcagtctataatgtcttgatgttggttcataggtgagacacaactgatggaggaatgtattataaattatgcaaaatctgacatgagctgaaaagacaggtccttttataagagctaatagatgcttaggatgcaaatgttattttgagcttcgcaaatacatgataccgtgcaataagccttttttccttataacagaaaatgagaataattaaaatgaggagaaggccacataacagttgacttgaatttaattgaaggacccattggaggctcatctggttgatttaattatttaattgagtgatttattgcagatctcttaatgcaggttagaaacggaagtgagcataaaccttaaaaagactctaaatgatgcttccaaagcactttcattttggtattaggttcatgtttgtttgtctttacttgtaaaataatttggaatttttgtttacagggtgaatgtcttaatagttttaaaattagctaaatatatctaaaggcatttccaatgtttatcatgggaggaaaaaagccacatttttttaaaacaaaacaaaacaaaacaaaattttggtaatataggttcaatacactgtttttaacatctcagcttagccgctttaatcatatcaagatatgaggctggatcactggcccatgacaaatctgaaacctaccagagaattgactgctgcatagataatcctgctgccagttaacattccagaaaaacttgggcaggcaagtttttatagctgccccactatgctgcaatagagtatctttctattgaagattttccactgcatcccgatcctactatggtgaaaacattgttcttgggctaaaaaaaaatcctttatttcatacacacatgatttcatacactaggtctgagcatcaagccaagtccatgagtttgcaatgaagttctag

SEQ ID NO: 60 - protein, 263 aa, Homo sapiens
MNMSVLTLQEYEFEKQFNENEAIQWMQENWKKSFLFSALYAAFIFGGRHLMNKRAKFELRKPLVLWSLTLAVFSIFGALRTGAYMVYILMTKGLKQSVCDQGFYNGPVSKFWAYAFVLSKAPELGDTIFIILRKQKLIFLHWYHHITVLKWYSYKDMVAGGGWFMTMNYGVHAVMYSYYALRAAGFRVSRKFAMFITLSQITQMLMGCVVNYLVFCWMQHDQCHSHFQNIFWSSLMYLSYLVLFCHFFFEAYIGKMRKTTKAE

SEQ ID NO: 61 - DNA, 135462 bp, Mus musculus
  misc_feature (1)...(135462): n = A,T,C or G
cttgccaggcagccttaactcactgcactcatcctcagggctgatagcagcttgtctcactgcacaaaacttcctatagtgagctgtatctgacatgccaatttaaggtgttcttaaaaaattaacatgggatcaaaacaatcatattgtagacatttgagaggaagagttcttttcaaactgaaacagaaagttttacctacaagttacaaaagcaccttggttgtagtaatcgcccgcgcacacagggcgcagtcaggtggcttgctaggtgacttttcaggggggttcagatgaagcagaaccatgccattacagtcagctttcaaaatatcatggcaatgtagaaaaataagaagaatttgttacagaatgcagcacaataaaaagaacctgatttagcttatgaacacatttgcctaggggttaaaaatgtataaaattaatttttctgtaaaggaagcctagaggattgaaccttggctgtagacactgaaaaatataaagttaaacgtgttatataacagagccctggatgtcctgggcttggtttgtttttttcttttttctttttttctgtagaccaggctgatgtcagactcaacctgacagagatcagcctgcctctggctcccagtgctgggactaaagctcaccgccacctcatgctgtaaaggaaagcttctcttaatcacatgctaattaatgtgagcaaagcctttgattggcctaaaacacatcacgtgggttcatgacactgtcagttttgattattctagaacatacttgtatatagtaagaaagaatagatgtaaagttacaactatattaaattttggaatgattatgaagtagtgggtatggagccatttgctatgcattacagccgtaattcccctcactgtcaacacaacttgttggaagtaaggattgagtgctgcctgtattgaacgtgtcctgtgctctctaccatccttgctatggatctaaccttctgaggttacctgcagttttcagatgctctgcatcttcgatgctcttcaaacgtctcacccctcctttacgattcagtctgttgttcgaccgcttgcttctctggaaagctggtcttaagtgattcccatgtatttctcttttgcattagcctggtgcctaaggcatcagtcagccctagaaagctgtccagctcactgaggaacctctgcctttttctatcctgtggcccttgcttgccattgtgctcaggtttgctcctgatggacaaggctgccctcaatatatgtatgctgatctagcaaagagaacaaattattttcatctgtagtgctgcctaaaggtttgcttccccccccccctctctcttttaaatggagtagaggatattactggctagttatgctgggtagatttatttcaactccacacaaactgtagtcatctgagaggaggaaaccttgattgagaaaatgcctccataagattggcctgtgggcatcttcttaattagtgattgatgagacaggggcccaacccattgcgggtggtgctgtccctgggctggtggccctgggtttgtacgaaagcaggaggagcaagccatgggagaagccaataagcagcagctctccaggttcctgccttgtgtgaattcatcttagcttcctacggtggtggaataggtggtgggttatgatgtggaagtatcaggcaaataaaccctttcctccccaactggctttttggccatggtgcctcttcacagcaattgaacattgactaagacaccaatatatcagaattgcctttaatgatcccttgatgctgccttttgaacaaggtagtattgagtatatatatatatatatatatatatatatacacacacacacatatataatatatatatatatttttctttcgagacagggtttctctgtgtagccctggctgtcctggaactcactttgtagaccaggctggcctcgaactcagaaatctgcctgcctctgcctcccgagtgcagattaaccctccatttttatctttaaaaattttaattattattatttttttattttatgtgtatgagtgttttgcctgcatgtatgtctatgcaccacttgcatgcctggtgcccagaggagggcgtcagatttctggaactgaagttatatgtatttgtgagatgctgtgtgggtgctgggaattgaacctgggctctctggaaaagttgtcaaagacaccattccagttcctttaatctttttaagcaaaacaaaattggaattttttacaaaggggtttaaacacagattaagtatggatatcgagggagtgagagagctggaagaagggtagtacacagcataagatgcaggcagagagagagagagagagagggagagagagagagagagagagagagagagaggccctttttctcctctttttcttcttttggtagtttgcctctgcctcccgagtgcagattaaaaatggaggattaaaggcatgcgccaccacgccccgcagctacacttatatttttaaaacttgttttatgtgtatgggtgttttgcttacatatatttctgtctactatatgtgtgcctggtgtctagggggcggggcagaagagggagtcagatctcttggaactggagttacagttcgttccgtgtggaagccagttcctctgggggctggggggaacccaaaccaacaaaacagacagacaatcaaacaaaccaacaaaattcataccgaccaatctctctagcccaaatgaaatacactttaaaactctctctgaaattaaaaaaaaaagggggggggtgctttccagctttttagaacccctttttagtgtaaaagaatacaggaaatgtccattgcaagtgactgggtcagccacaggagcaccttacctctggtgcccttaagagtctggcatggtacctgggtggcctcagggtatctctctgttccctggttcttctgtctcacacccatttgttaccaggctttgcactcaggtgggtatatatataggaagtcattagctcaaaacagataaaaaagagatgaaaaaatattttctaatgttattttttattaggctgacaaatgtggtatcatgggctcctttgtctataatatcccaggatattttataacattaagtaagattagcaatcagtaagttttagaaaattcatattagtctttcttcagtctttagcaggatggttgagttaaaaattttcttcaacttaaatatgttaatttaaaagtatttatttctggatctgcctcttagctcttctatcttctgtattatagttagactctaagttagagtaactcagaataacattaaaaagttagcttagatagacagtttacagatacattttatttgtgtacaaggataccacatagtcgtgtatacagatttgtgtgtgtgtttgtgtgtgtgtgtgtccttgtttctcttgtgctgctcagtgttgaaagctgtggtgttattagactgtgtgacagacaggcttctgtggggccactcgaagttgcacgaaacaagacgaccatgccgaattcgtttcattggtatggtaggagatgtgtggcctctgggctaaggccagggtgctgcctgccagctcatggtctggcttcaaggagatggcttcagggagtgaacattaaacctgggctgctaagtgtgaaggcctttctctaaaggttgtaattttctgttcttgtaccagagtggcacaacttggggatggggcagttttgatcatttagaaaaaatgcccagggccttaagcgtcttaagttgttaggtcagtgctatttgttacctttacagcaattactggttctcagtaatgggggttgggaggttttcatctgaaaggcagtttagaatatccagccatctcaaggttatgtagaaataactgaaaggtttctgcaagaaacctgtgaaacagtacgttatgtaacatggcaccagactattgttaactgaaatcttttgccttaagaaaacgatcagtaagcagatggacatattgtaaaccacccttagatgtccactgcttagaacctattaaatattcaagtctgccactaagaactggtgaagctttttggatgaagtcatcgttgttggtcagttgcggataccagaaccttcttttcctttaaaagctttaccattgtattgcttggttggtttcctggaacaagtgtcacttgttattgtttgttctcacttcgagtggtcctccaacctgccactgaggaaaaactcctagactgagagcaagtgtcccaacattcatatgcagattccacgtgcagggtcaagggtgggggtggggctgagggatgctctgagactgtattttgcaaagtggctgaggtctggttttcctgtccccagacccccaattcaaagggcaagcctctaatctctaggaagagtgagggaaacatcgtacagcagaatgcacggtgctctgtgacccttggctttaaggctttcacacgaagcaagccatgactcattgagtcagtagtctacagaggattggccgttctcgggactttagagaacacgcaagggcctgactccgtggcagagtccagctgagggagaaggagcaggaggaggatgtggtcctgcagggacaggaggatggtgaggtggtctaggtctagacagacctgagacagcccagcaaactgagcgagttcggaatcctccaggggatttactagagcagctggctgcctggggacagggccacatctgtttggttgagtgttggatatgcagggtgtcggatgtcttacatcatcatgattggttattatctggtgaaaaaaaatacacgccgtccctgcaatcattgttaaggtttaaaactcactttatggttctggggatcaaatccaaggtcatatatttactaagcgtgccctccatgtgaagttgcatgaccagtctctcattcataccttgtttgtttattcactcctttatttacttctgtggtggtgtttttaagacaggctctcactcagtagcactggattgggattggataagtagaccaggctgaccttacactcacagtgaactccacctgcccctacctcctgaatgctgggattaaaggtgtgagccacaccacttctagctcccaggtttatttttaatacattatttggactaatccatgccttcaaaaggaacaccaccattctaaataattttctgtacagttcagaattattcctaaaatgatcaaaatggaaatctgtgttaggaaattgaggaaggagagatgtggtaggttgaaagtgtagttaaaatgaacatatagaaaaataccacatagtatagcgcaggggatgatattggcctttgaatcaatacaaactttcgtgaccaagattgtcactattcaaaatggtctttctccaacgggaccttcaggaagcagtgggtagcgtttttgtcggtgggtttctgcaccgccacaggtgttacatctttgccctgtctgatgagtagcccttgaacacttgaattcatgtggtttttaagagtcagaactgcattttaaaattcatttatttttaatgattttaaaaggcaacacatggctggcttagggagcacaaccgtagcgtaccccacagtgcccagggacattaacgtggaggaaaatgtgatcttggccagagagttccggaagggccccgcttagtccaggaggcagatttgaagctgcctggtgatgaactgaggttctgatgttgtgatttggaggcacttcctgatttctttatctggatgtttgtcatctggagagatgccttgcccaaaggcaagccttggccccactggacttgcctctttccaagttggctgttgaaggctgtgttgccagtggggaggtggctgcccatgggctctgtttagtactttcagtttgaattcaggctcagcagcgaaccctttatcttctgtgtgttcacttatcaccatgtggattccgttcttgtcttgatagtactgtctccttggtgacagagtggcctctttctgggttgtggggagggtggtgatacactgtgttccagcggcagggcatgccttgggaaactgatgtatacttccctccatgcagagtctctgccagttcttttcaggacctttggaggtaaaggagagaagttgagcaagccacccacagtggagctagcagggagcccggaaatcctcagtatctcacgggcaaacaccctacaaaacttcatacttgccaaagtgtgctggacattcagggaagagctctgctgtccgagggcttgaactagaggaattatttgcatccgaaaggtgttttgaattcgtccctttcctggataggtttctgatctgtgcctgtgaataaaacctctgcactgtggtactgcattaaagctcgggcacaaaggcccgagaatttctagaatttctagaatctgcattaagtagaacatcagtgtgacactgtccaataaaaactaacttagaatgacatcatttacagctcaaggatttctaactcctattgccttcgtgtgtatttgttgctcttagtgctgattttgatgtctttaatttcaaaaagatttagaaatctcgtggcactcgggatggagcccagggttttgtccgtgctgggccaaggctaggagctaccttctcagctcactgctggttctttgtgctgtttacttgtttagacctgcctgttgattcccagggaaatgaccagcagtccccacttggtcctcttacccgctgttcctaaccgtgcgctctgatggagttccttgagaggaatgtgcttctgtttggtgaagaagctgtgcttcatggcctggtctctgaccaaggtggagctgatgtgagcccctgcccgccttcatccctgctcattccttacagttgcctgtccattcagggaactgtttgccattcaaactttaatctaggttccattaacttatataagggcttttttcatctgtgaagaggagcatgggccagaggcccaacagtgcttgccagctctgagctgcttgcaagtggcatcgagcttctgcccatgctgatggtccccttcggtcacagtcctgtgcccccctctcacctcggcaccagtgcatcttgtgaactctctttgagttacaccccagttattaaaatgtttctctagggtgcatttaatgcataactactaggaagtgaagcattttttctgattgttactcttaggtgtggccctctcgacagtgatataggcacaggtggcattcagtgtagagaagggtgcagccttcaaagtggagctttattttaaacatgttataaaaactgagactcatgttgcagctgcaatttgggaaagtggtcattcacgtggtcttaataaaaaaaaaattgaccaaaatcaattaattaagttaggtcagatcgaaagtatggaccatggttaccagatggattcctggcacagttgccagttggtctgaggtgtcagaaaagattcaaggtggccttggtggccggagagctagcaatcactgatggtagatttcgatccacaggtttttaagtcctgcctgggccacacctgaggtggtcacagctgcagtgggtcacatgctcacttgatgccgtacaatgctggcatttttcatgcctccgggagtggattcttaatgggaatgaatagggaaccggaaggagggaaacaaagccaagcgtctggtataattactctcagcgagcctggtttgtctcttcttgtgcccgtacaacttcttttccccttctgctgggtccttagctgataaaaagcaagcgtcaagtccactgctgctacttcaagcaggctctgcagggccccgggcttcggggtgtgccccagcagacgaagctgttgggaaatgaaggaaggtcttccagaacatataagtgctattaccttccttaaactgcgtggtaagctggctgcatggctggcttaagctgttatcaattacattgtaacatttatttccttggaagttaagagtgagccttgagcaaatgaagactgactttttaagtttttttaggttacgcacaaattcagtttatcaatatttgttgcacttggcactggaatttctactccctgctctggacttttatttgttctggggggaaaaaaaaacccagcatatttttagagaaacagctttcctatgtacttgattctctcctgtctgacctctgtatttggagaaggtagatcagaaaatatatggcaggtagtggcagagtgaggcgacctttgacgttggctgacagctgtcacctgaaagctacagaccctctcaggtgtcatgtctgtagtgctgacagtgagcaggaatgttgtttacatttccataaacagagtctcctccgtgttacgaatacgttaggatagggcaggtagaagagagggttatctgtctcatgggtgactccttacagagttggttatatgcatattcttgtggcaatccgcagtagaattcacaactgagtctgtccagagcatctctggaaattctccatcgtgtgcttctgtgtgtcgcaagtgggtcagtgccacccagtgcttaatgtgctgtgagaggagatcagctggtgacagtccaaaggagtctcagggtccaggcatttttcttatgcgaaatcattcttgattagtttgttgattcagtaagcattgaacaaaaccacttttctgttttggttgttaaagcagtcttcaaatcaaattggttattttaatatgaccccagatctatcagagtttatagctaaggcagaaagctgggatgctattcggttagcataggaggtgaagggatgtgccagctagccccactccctcctgctgtgtcctgctttgtcctataaggtttttaaaaggtctggtggatatttttaactttttttctgttaaagtaccatccagttttggctagtttctgaagaggtctctgtctctaccaacaggaatagtcagttgtctacagctagtctttgagtagtcacttagccctcaccacagccagtggtggggtaaaatggagcctgtgtcttgaccctgctaccatctgccccacaatcgccccacaattctggaacgtgatgggcccagagccatgagtgaaatcggtcctcacggagaatgaaagcttcacttgtggtctctttctgaatcttgcctattcctgctattaagcataatgaaattatgaatttattgtgttttcaagctcgcttttcaacctcattacgggtgctttcttgttagatgcgtctgttgccgttgcagagttgtatgtgggctgtaaatatctaatttgtacaaaatgactgattttggtatttgtataatcctccagtcaatttaactaagttgggcttttcccagtcctcggtgccacgctcgccgctcatctgattaccgctcatgggagtgaggttaaggggtgctgttgggaaccagagctttagcccagcagatgggctgccggctatattcatacatctgcttgcctgctgtggcagctgctgctgcttcacgttgtgtccttttgttctgttccatccaagaacggaatgtgaggaagtgtagtgaatggattaatttaaggttaggttagtgttgtgctgcctttccacgtaaccgatcagagtgcttctggtagaagctaatgagtttcccttaaactgaactaggtttgtaaaatacagctcagcaaggggcctgggttggcattgttgatgggaactaaattcaaatgtgtaaaataccggcagcttttatcatttgttcctaattctttgtttccttttttctctcttctcaccccccactcctttccaggacctatatccagacttcgcccgcccgcctgacactgcagggtccgagagaattaaggaaatctagaatgacacgaagaagattagttaaggattataggttttgaggacaagcaccccagaaaagtgaagcacagacaagctcccaggctgtgttcggaggagccgtgtgttagaagaagatggcggacccagggatgatgagtctttttggcgaggatgggagtctgttcagcgaaggcctcgaaggcctcggggaatgtggctaccccgaaaaccccgtgaaccccatgggtcagcagatgcccatagaccaaggttttccctccttacagccatccctccaccatccttcacctaatcagaatcaaaccaagttgacccattttgatcactatagtcagtatgaacagaagatgcatctgatggatcagcctaaccgaatgatgggcagcgcccccgggaacggattggcgtctccgcactcacagtatcacacccctcccgtcccccaggtgccccacggaggcggtggtggcggtcagatgggagtctatcccggcatccagaacgaaaggcacgggcaatcttttgtggatggcggctccatgtggggcccccgggccgttcaggtaccagaccagatacgagccccctaccagcagcagcagccgcagccggctccttcggggcccccggcacagggccacccccagcacatgcagcagatgggcagctatctggcacgtggggatttctccatgcagcagcacggccagccacagcagaggatgggccagttttcccaaggccaagagggcctcagtcagggaagccctttcattgccacctcaggacccggccacctgtcgcacatgccccagcagagccccagcatggccccttccctgcgccacccagtgcagcagcagttccaccatcaccccgctgctctccacggagaatccgttgcccacagtcccagattctcccccaaccctcctcaacaaggggctgtcaggccacaaacccttaactttagttctcggaaccagacagtcccctcccctactgtaaacaactcagggcagtattctcgatatccttacagtaacctaaatcagggattagttaacagtacagggatgaatcaaaatttaggccttacaaacagtactccaatgaatcagtcggtaccaagataccccaatgccgtgggattcccgtcaaacagtggtcagggactcgtgcaccagcagcctatccactccagtggctcactgaaccaaatgaacacacaaactatgcacccttcacagcctcagggaacgtacgcctctccacctcccatgtcacccatgaaagcaatgagtaacccagcaggcacgccgcctccgcaggtcaggcccggaagtgctgggatgcccatggaagttggcagttatccaaatatgccccaccctcagccatctcaccagccccctggtgccatgggaatcggacagaggaatatgggccccagaaacatgcagcagcctcgttcgtttatgggcatgtcctcggcacccagggagctgaccggacacatgagaccaaatggttgccctggtgtcggccttgcggatccacaagcaatccaggaacgactgatacctggccaacagcaccctggtcagcagccatctttccagcagttgccaacctgtcctccactacagccccacccaggcctgcaccagtcttcacctccacatccccatcaccagccttgggcacaactccacccgtcaccccagaataccccacagaaagtgcctgtgcatcaggtaaggggtgcagacgcctgccctgtggcgtgaaatgcaacattgttaacttgtctacggatatcgtaggttgcctcagagtcgtgaccttccccccaccccccccctgccaaattggttcattcattcaggagttctttaatcactgtcctgagaattgtgctaggtctaaagctgtagtgacttagtgttgactgagcctaggtccactggttagaaaaagattctttgttcctctcctctcccccacccccttgctctctgtttgaagactacactgtaacttggtttccagcagttgcttgtgcattagcatccactatagctccttttctttaccttctgtgggtagctgtgaaatatgtgtttctgtggtccttaattgacctactgtcgagagagtgggaatgtaagttgtgagctgtaggaaatgacagcgaatggtaatttataggagttgctttgagatttgtgtgccggcactgaaggatcacagggttttataagttaagacttttgtagctttgccaatttgtatttacaaaggcacccctccccctttttgtggattttggtctccacggccttgacttgtgaagagtagtgtgtgtatgaacagatttttctgaatgcatcttcacctccccctgggcctacaggtcttcatggggcacagtggttgatttcagaattgtatggcatactggttcttcctgatggacttaatcaatttgggaaactatgacctgtgtgtgactgcaaaccagagtgaaagatcatgagtgcttatgtggcagatgtcccggaagaggaagtacctgggaaggaagagtgcttgaaattccagtaaatctttgcttagggaagtgacccctgcagacatctcatgtgctttaaggtgatttccccaaacatgtatgtgcacctggagttgagctctcttcagggagaagcagctttgagagggaaggctcaggccagggagaggatgctaggatcctgtatcctgttttacggaatttgacttaaatgaggaattactcctggtggccatgtcatcgttggaaaacttgggtgagcaacaggaagtgggaaccagctgtccaggcttgcgaagaaagttgggatcagagatctggtagtggaagcagagaaggttgaatctgggtgaaggaaaggctttgccttcacggtgagttcagtccacagtcaacagtcaagtggtgctggggcttcagcctgactttggctgccagagcaaaggtatagttgcttcagcctggtgcgcccagtgtctcaggagcactgcagagatggctcaccgtgcccacccatgcatgggggcagagcagacttcccatgagacagagtggtcagccttctggaaagatatccaggaagtctcccctcactctttcctgcagcatgcccagaggctgataggaaatgggaagacagctgccatcagagctgtatgtcctgatggagagccagcctcggagccagctctgaggtttcccttcctgttgactcagggacaaacacctgatgggtctgtcctaaggtgggccaacctctgttacctccaaggcagaaatgaatgtggcctagttttgggaaagtattgtgttagtaaagaagggatcgtgctgagaggtggttgtatacacctttaatcccaggcagaggcgggcagatttcccagagttggagactagcctgggctatgccgaaaaccttgtcttgaaatacaaacaaacaaacaaaacaaaagggagggggggaatagaggggtctttacaatgcttgtttccttgtttctgacttttcatcccagcagtgggaaggccaacagtttgttggggctccctgaggacattctggtggcccccagaagagaagtgctctcttacttactacttacagttttcagaggacagtagcagccctggcttctgagccccatgggggccagtgttgtgtgctatatagtctgggagaccccgaggggtctgtggtctaagtgggcacctcaaaagacaaagtcagaacttttctaaggccgcaggcccgggcatttgagctggtgtttcttcataggctcagctctgtttgtatttttcttggcatttacttccctatttgtgtttaacttggtaacctctttagttttgggggcaatcagttgatttgaaaaataaaatcagaagggtgtttgaatctctgtttgcccctaagcaggttggtgacacaggataagtgatttaacctccctgaacctgatccttcagtgagaccagaatgagagcagccccagaggctcgggtggggtaacgcccctcgacaatgaactttcatctctagggtgtagcttatgacctttaccctcgtgttgccaggtgtgaagaggttggttgtgaataattcagaatgctctcatgtgatctcgcctctttctgaatgactcagcctgggcaactacatcattctaactgtgctttgctcgagaactaccaagtccatactgaatttcttgtaagataccatgggagttcaagattgaagtatgcaggaatgcccaccgaatttccacagacatacaagcttgttgagtttctcatccaactcacccagccctgagccctggcagtcctagaactcactctgtagaccaggctggccttgaactttcagagatctgcctcctgaatgctgggattaaaggtgcacacaaccactgtccagcaggttttatacttaaaaaaaaaaaaaaaaagaaaagaaaaaagaaaaaaagttgtattcctgaactatttcatggagagaaagcaaacacttggtgtcatctcaaagcagttctgacattacaggccccagccatagaatttagaaacagtggtcagagccagacattccaaccctttaccttgagcaacttccttagccacagggccttcatttcatttctaaagaaaggggcttctctactttctgggtggaagtgcagtgatattagcagtaccatcttgtgaaagcccagtggggaccccaaaacaaaccactgtcctgtagcaagtgtccagagttacctgtcgccaagttagcttcactaattttagcgtcagacattgttttgactttatttcctgatttcatggaacattactcaaacaatggaggtgctctctgtgcttttggttgaaagacagaaaacagctttgcttttagggaaagagagagcccaatggggaagtaatgctccttatggaggtatggaggatcagtctgagtcgagggagagtggatagaggctgaggacaacagctaaggcttagcaagttgtgatacgaagttgatagaatggctcaggccttgcctatctcatgacctgaaacatggcattgagcacagggtacaccctctgctctatattcctgcaaccctgaggaatatgaagggagagaaggagggcttagtccaggggtaggcatctatccctgtgcaccaggagttgttcatttgaagagcttctctaaatgggtcttctctcatgtagctaagtcccaagttgctgaaagactagtgtagcccagttccgtgttgcctagttccagggtcattctctctgatagaaagttccggtggagtttttaggatgtgaaacactgtgtttttagaataaatgtaatttggatgtatttgtgttccattccttagtttgtcccttaaatactgaccataaaggagaatagaagttaaggtgtagacaatgggtaataatgctctgtgctatccccacatcgtgctgaggtttctagaaataaataaaagatctagaagactcagtggttgttgttgttgttgttgttgttgttgttgactatactgtgccatcttgtgaacattttaaaagcctctgggaaaccttttcctggaaacctgacttagtccttgcctgacactctgctttgtttttggttttttttttgtttttgtttttttttggtttttcgagacagggtttctctgtatagccctggttgtcctggaactcactctgtagaccaggctggcctcgaactcagaaatccgcctgcctctgcctcccaagtgctgggattaaaggcgtgtgccaccacacccagcttgacactctgtatttatccaatatgatagaatcgttagccactgttgtaagtatatggggaaatttggccgtatatcgcaagccacctaaatggaaattgtaattagagaatgcagaacgctttttttttttttttttttagtgacaggaacatgcatcatctgtgactactacatatgatgtcgcccatgcctttacacttgtaaacttgtctgcgcaagctggaaaataaaagacactgtaaagaaatccagcttctaacatgagtggcgtttctgggcgtttccatgtgcacacacctgcagagcatgggcctcctgttgaacgtcctgggagcagctggcccttgcttggcagcacagtcgccccgcccgcttgctggggtctgcttgcttcttcatgagcactcagtaaagctccacgtttgccctttccttcctttccttgtagcagcctagtgactctcatgaagcctatcttctgactggagtttgcatatgctcagcttcctgagagatctcctgacaccttttcctcctccccagagcggatttacctcagaggtcagaattttagtgagtttaaaatagaaagtgccaagtatagagttaaagtgctgcagaaaacacgatgccttggagatagctgtgtcttctagatggcttctgttttgtgacaagggacaattttctatggctatcaaatttgtcacataataagagtttagtttttcagttacctgtaaagttgcatattaggccactgttaaatgtcacaaggagctaagtgactttgttaacggtgtgtgcttgtgtgagtttatgtgtgtcacatgcatgcagaagcccatggtggccagaagagggcatcagatctctaactggggccataggacgttgtgaatccccatgtggttgctgggaaccaacaacctttggtcccatttaaggacagtgaatgcgctaagtcctgggctgtatctccagctcccaagttttaaatattgttgagacaggggtcttgctgtgtggctcagactaccttctaactcactgtgtaacccacgctaacatatgatcctctgtctgccccaagtgctgatatatactggagccttgtgcctggagtccattgttagatactgccatttcatcttgagtcttgggttcttccatttaacaacaccttagaaaaattagcatttgctctcacccaagcacttgattaaaggcagggatcgacagtgtgatgtttggggagggaggcaaaggcgtatccttaggtaagcctggggtttcgttatttcagtctaacgtactgcccagcatcgctcaagtgtttattttgttctgcataagacacacacacacacacacacacacacaccttatatagaggatatagatcagaaattgtttaatgtaattatggcacaagtgacacacacacacacacacactccttatatagaggatatagatcagaaattgtttagtgtaattatggcacaagtgacacacacacacacacactccttatatagaggatatagatcagaaattgtttagtgtaattatggcacaagtgacacacataaacacacacacacacacacacacactccttatatagaggatatagatcagaaattgtttagtgtaattatggcacaagtgacacacatacacacacacacacacacacacacactccttatatagaggatatagatcagaaattgtttagtgtaattatggcacaagtgacacacatacacacacacacacacactccttatatagaggatatagatcagaaattgtttagtgtaattatggcacaagtgacacacatacacacacacacacacacacacacacacacacacactccttatatagaggatatatagcagaaattgtttagtgtatttggcacaagtgacacacacacacacacactccttatatagaggatatagatcagaaattgtttagtgtaattatggcacaagtgacacacatacacacacacacacacacacacacacacacacacacacactctccttatatagaggatatatagcagaaattgtttagtgtatttggcacaagttctccaagacagcggttcccatcctttctaaggatggacaagtgtccacattgctaggtagcgtcagtagatgagtactgaaaggtctgcatgcatgagagttctcagtacctttcttgagggagaggtcactgagaggtcatttgtgtgaacctgtaagaatcactggtgtgtttctttggaaggtggcttccagccattttcaagattctagctgcaagtggtgtatggatactgtgagcggttaagtgtctgggtcagtacaggcctgttctctgctgctttctgtaatactgttgcctgaaaggaaaaagccttacttttaccagaaatctccagcaaccttctgcccctctctgtctttcaccctctgcttgtttattctctgtcttagccaccattcagaaagggagactctggtactgtagaacatagttggctgggaagtagttaataagcagactgagagaaaatgagggagtaaacattggtgaaagtaacctggggaagtcacctcgcagactccgtagttggaactgtcaatctgtagataggctctaaggacacagagagatggctttcatcttcccgtgcagcagtgtccgccctcagccctgtggctctgtcacagcagaagccagtgtcaagtgtggaaggaactcgggcttctgtctgacaaacaggcgaaaacccactgaatacttgagtgtaattaccagtgggtgctgggtgaggtctcagcttagtttaggttggtttgtttgtttttaaacttagttcttagaatggctttttaaaaaaaaaacaaaaaacatttaaaaacaggagaaattaagagaaactgggaaagtaccaagaaacagataaaatcttacagagccaacacagaatcagaggtcaccattctagctttctgggaggccatttccaatacatacaagtgacaggcaggttctccagtttccttgcctcttggtttaatgtttgaatgaaagttctctccctctcaccnnnnnnnnnnnnnnnnnnnnnnnnnnnnnnnnnnnnnnnnnnnnnnnnnnnnnnnnnnnnnnnnnnnnnnnnnnnntccctccctctctctctcaagtaatttggcatcataggtttcaggagattctcaagcccttagtgaggattgtgtaagcaaaagcttgtactttaaggtgtgagctaatcccagcaggttttctgtcttgtctgtttgagccacaggctgtgatgaggtagtagggcaaggaggcatgctgggaaacctatgacgtttcagaaggacacctaatcccgaagcaattcccaagtggggaacagaactcaggatctgcctggctcctgataggctcggccaccagtttgcagcagtacataggaatcttgtcctcacccactgatgtttctgggcttctagcagccatactgagtggtaggggattgcagactgtttccctactctgctgagggaaggaactgtaggttactaggtcactcatcagtgagggagagaacagataggcttaaaattcttactgaatatgaggatattggaattaaagttcaatttttagagcatgtttcttgatggattttttacagcctgaatattctttttaacttaaaagaatactaacttgtgagattatttcatagctatgatatgcttggtttcatcttcaacttaatttatcttaaaacatagtttatttttattgaaagtctgagttttgggttgttgtttctgtgtgtatgtatgtatgtataccacatgtgtgcctggtgcctgcagaggtcagaagagggcatcatattccctggagctggaattgtacatgactgtgagctaccaagtgggtgctaggaactgaacctggtgctcttaacccctgagcacctcagcacttcaccagtaagtgccagcctgtgtgaggagacaccctgcttttccttgggtagccccagatgtgggcggtgaagaactggctggagcattacccagtcctcaccgtcctcgagcagaggttgagcaggagacacgcgctgggccacaaatgggagctgacagctactgtgctttataagctggctgtgtttctgactgcatgcatgctgcagagacagtctcatgaaggattccttctggagactgtggaggtttccccagagtaacagaggcaagtcagacttctgcaggcaccgtttgatggtttagtaaggcaccaagtggtagttcgctcccatgggccattgctctctccttcccctttgaacatgtgttgtggggacagggggtcctgttaagggaacacagccatcttcacactggagcaaggtgctgtggcacatcctgtgtctagtgtctgactcagtaggttatcctctcgttggaaacaatggctgaagacttagctcagtgaggaagtattttgggattctaagtttggaaagatccgtgcttagaactaagctccaagtcacagcttttgtttttacaagagagttaaaagtcaaagttcacatagaaataaagtccctcctctgggaataatcaatgaagaaaacaaaaacaaagccagttaagagacttcataaaatcaaagccacccagacttgtagattggtttctacccgctttctatgaactcaagtctaagaagcaaagtggaagagatgtcagcatgcctctttgcctgtgtcacctgatgccctctagttgatgttatgccccagcctgtggcactgtcaatcctctcatccctggcagaggtagctggtgggggcaggggcttcatgggcaccaagagctccattttccccggctctccagtcgtttttaagtcatgtagtgtacttagttcactaacctctagtttcctgaggatgataatgtaccagtttcacaggattattatgggaattaaatgagatgttggcgtggagctttagcccagcatgtgacatgcgataagtgctcagtaagcattaaatacctttatcatctctgttgccccagtggccgtggaagagggctcttggagtctttcttgtttcgttctctaccttttcacttagattatgaatacttcattttcaaaaccaagacatcactaatgccaagactcctcagatttgtttttgtttttgcttttgtttttgtttttgtttgtttttttcaagacagggtttctctgtatagccctggctgtgctggaactcactctgtagaccaggctggcctcgaactcagaaatcaatccgcttgcctctgcctcccgagtgctgggattaaaggcgtgtgccaccacacccggccagatattttttataaggcaaatggaaattcatgattttaggggcactatagggatgtatgtttcttcactgaattttaagaaacaatgcatataacataccatttgcggtctagagttttcctggtttcactcgagatgaaagcaactcctcttagagcgtagaaccccacgtggcaggctaagttggcatcctgtttcatattgctagggagttttgctgggatccttgtatccaacaggttaactcactgagccggatgtgggtcaacgcactgctgtatgtagttcagtagtacagagtcttcactgtgcagtgtgtgcttaagtctcaagtcccatgatccactccggtcttctagtgtcttccgtgtgtccccagaagcctgggatgacggtcaactctgtgcggtgaatggctttctttctaagcacagtgaagggatagctgggaattcagtgaaagctgtctgactgtagatctttttcatgtttttctttcccttaagaagtaacttcacatgctttaaaacaggagaagtgtgaaaactttgcagcgtagcgtagtagctaagttcaaagtctccatgaaggcagctcacattttcaaaaagtgagatttcatttttggacgcagcttttgcataacttgtgggcttgtacaagcttttgcacacatggtgggcttgaattagaattgggcctggagtctagtgttgtgtttgtcaggagacaatacagctccatcaaagataatgattctatccagggagaaagccttttctttatcatattcaaactttatgtgctacagtttaaatatactgaatatatttcttaatgtctttatgcactatacatttttaaatttgtgtgtgtgtgtgtgtgtgtttgtccttttttgaaacagagtctctatgtagccctggctgtcctagagcaggttggccttgaatttagagatgaacctgcctctgcctccctagtgctggggataacggtgtgcatgtggcaccactgcctggccattataagtattattttcaataaaaatgagataaaagtgaactaggaattctgttccctgtcagttggagatgtttataaaatttttgttcatttgcatatgttgctttattgaaatgtagtatttatataatttatgtataagatgcaatattccctatatttataaaaatgctatagaatgatttcattctaggctgttacatacttttactgaatttgaagtttaagaaaaggaaaaattgtaatattgtgaactaaagtttgtccagaagtatctcatgttttctaagttgttgtgaacaagagcctgtcccgttctttgacatcagattggtagtggatttttgtaaaattcctgtggcctagtcctctgtgtgaactttttgatgaaaccgtctttatttactatcccgagttcggtggttgctgccacacatggacactgtgtccttgaagctgaatgagacctagggcctgaaggagtcactttgtttagctgttattttaaatgttcactttcttttaagggccagtcaagtataacaaaacaactttttatttttaattgctggaaagtaagatatgggcgacagttaatattaggactttaaaaagttaatggtatagatatctagtgtaagttttatgctcctagttttcatttatttatttttgaacacagtaagttcttcctgtctataagccccagggctagtgataggctgtggtcggcaacacaccatatgctaactcaactcatttaactacagtcgggtagccaagttaatccgccggctcctgtttaccatggaattctttaaaacaacacaaaacaacaacaacaacaacaacaacaaaaaaccatgaccaggtgcaggtgatactctggaaggttattaaagcattttagtcacatgtgtaatatgaagcgtttaaaacgaaggcaggtacaggggcattgctcttccgggttgttggccttctgacttcagtcaggagagactcatttgacaggtcttagtcagcaaaaggctctcacatgttctcatgtgagcatgttgtatgtgatcagattttttgtgagttgtatgtgatcaggttgtaactgagtgcaaaatgcttagttttatgttgtataaatctcaggttttagaaagttgaaaataccaatttgtatcttgttgctggagaggagagcccctaagaaggatgttatggcggctgaattcctgacccctgttcccacctggatgagctgccctgtaccccttacccccagcctcccaagctttttgccagccttgagggcagagacattaggtccagcttcctttgttgaaaagtgagtgggctctttctgctgtcaggccctggagctgctcttggaggtgtctaggacagcagcctgtagctgcctgttgttaggaagctcttgggacacacagggatggtttaaggagtgcactttaaggtctgtgtaacagttcaggctgtagtaagtgtatgcatgtgctaacagctgtaacttgtgtcagcacagggtccagacccataatcgatagagcaaaagtctttaaactctgttatctgccaaaagaatttttaaagttttaaaatctctgactttatctttatgtttgcattaatatgttaacattcatctgcgcagcagccaatatctcacttaaacagcctctgctcactggatggagtgaggcccatttggatattttttttaactacaatgctgcttggctcttttgagatgaatgaaactggggttcttatactttgggaccatgaactgtaataagactggggacacaagaaaggacgttctggtgaagataaggattgtgggaagaaaggggcagcagacaggagcagaggagccacatctcctggatgctcacctggcctgtctagcgttttctttatcctggttggaaggccaaagagaagaggcactggtgtctccaatgctgtttatttgctcatgtcttctccttgtaaagaaaagaaccccagctgccagtgtggcccctgacccatgttcaaagggcttggtcaggaggctcttgagtgtattgtggccagaggagctgctgtgcgcccacacaggtttagcctggaggctcttgagtgtattgtggccagaggagctgctgtgtgcccacacaggtttagcctggaggtgttcggaacaggctttaggtggagaacttgagtctttctatgaagtggggtagctaccttagtacatttcagtgaagtgagttgatagcaaccagaccaaagcaatgggttgactttcccgggaggtcaggcaccagcggtgactgctggtgctaggaggagtgaacttggacatggattctgctttctctctgatgataaagcaaggcaggagagtgagcaagaacatacatctccccagttctcagaccatcccatcctgagacaaaggtctgcagggaggaaactgctcgtccgttcacacatgagttagcttagagcggatcccaaggtctctgtatttttaatcgttacatctgtaatttgctacaccagagattagaactgaggaaattgaaaaaaaattaatttacttaaaataaaccattacattaccacaggtaacatctgaaaacaaaaacaactattttcaacaaaagaacagaatagcaggggatcattgtttaatatttttgctaatgattacatgtcctgttttctaggaggcagccgggtcctgggtctgctgcttcaggctgttgttttggttgagatatgtgaaagttatcggccctcacacacatgtaattatgagaggaggagataattatagatattccaaaactctacaagtgcttgactcacctggactcttaagtgtcagtgggaatgtgggggataatgccataccaattaaagatttatagactgttaattagaatgtgtgggtctgtacccaattctgagtgccttcatacccacccctgattctgtaacgtacgttattttgaaaacatttcattgaagaatgttcatcttctgaattcagtgtacattttaaaaagtttatcagaagtacttaaagattgaaaatgcatggaagcaggacaggcccagctctagggatgtaaatgagggctttgtgcagagagaccaggttttacagtcagaaacgaagagtgggtatttgtggatgcagtccacaggtgtatgcaaaattctgttttttttgcttaaaagtttatatttacatactgtaagtacacagtgttagttagcttctttgaagggagaatttatttcaagacaatgcctggcaaattcctgagtgtgaatctcttcggcttgcctttcatcctttcaaattaatgttccatgaagatgggcagcctcttcagttccagccaagcatggaggacatgctgaggaggtggccctcctgcttctgtgtgtagctgttctgttccatgtggactctcataatctccatgcaaaagatcaaaaattatgagtaattttaaaaaatcaaattttcctgtgtcgtccagggcattcttaagtcggctcccttcgtttcccaagtgcagatttgtagccataggagtgatagtgcttacttgtaccgtgtgctgtcctggtggtggcggtggcatatgtatcattgtgtcggtgccagtgcaagggaacagacaggccatgtccttgtgtgttataaagaaactgtgtgtgttacagaggccctgaaagaatgtcggcgattgccaagtatctaccaagtgtacattctacagacaggtgagagaaaattcctagcaccaaaaagctttctttacacaacagaaaatatatttttatttggaaagtgggcaggtaaaacagaatagaggtgttcacggtcaggaagcaaagagggatggagggcgactgttggtgcttagcccccgttcttgggtgattgagccagggacttgaacccacagtgggtcttccttcggtcctggctagcctagaacttgctctgtagaccaccctggtcccaaactcaacagggatgcacctgcctctgcctaccaagcactgggattaaaggtgtgcaccaccatgcccggcttgaacatactgttttgttttgttttgttttgttttttgttttgttttgttttgttttttaaatcatagcctgtggctctcagaagctcatataatgcaagatgtactcatgctgatttcaaaattccctgtagtctctaatagccttaacactatttaaaggtccaaagctcaggggccaaagatgcctccctcaataaggtgcctggcctgcatctatgaggacctaagtttgattcccagagcttttgtataaaccagctgctgtggagtgtgtctgtaaccccagcataggggaggctatatgtgtgtgtgtaaccccagcatgggggaggcaagacaggaggatctctgagctgactggccagctaggctagccagatattcagtgaattcaggattcaataaatgaccttgtctctgataaacagagaacccagggaagacacccaaaactatgccatggtctccaacagcatgtgtacccaaatgcatttgtgcacccacttacatgaggcagtccataattacatacatcccacgtttcttctgagactcaaggcagtctgaactgtgagcctataaactagaagactaagttgcattcttctacttacagcggtgatgggtaaacgtgtccactgtagtagggaggagagggaaggtagcaagaaagactgaacggaagcaagactgcaggcaggagtgcagacaccaaaccctgtagccacagttctggcatctggggttagtgacagaatcaactgggagtcagcagccttagaagccctcttagctctgctgcagcagcagcagcagcagcagcagcagcagcagcagcagcagcagcagcagcaaatgccaatggtctcctgggctagttctatttcatgcctgcagctttccttgctgggtatgttacacacccccacccccatatctggagtctacattacaatgcaggtttcatcttcccagatttatgccagtggggctatgcccctgcctcctattgcccgatctctggccttctggactattgtcttaggtccccgcgctttcacttctgggcctaccaaactagcacagggccctcactgctcagttctgccacctcaagatgctgccgccctccctcggatgacagctacaagcccctgagtggcatcggagctgacccctgggaacgcttccgtaggtggccttttgaatgctgaacccttcagtggtgttctcatttccgtgtttctaagctggagccttctgtgtggggtgctgccctcaaggtttctttcctcctgtccgtaatgtagaatatgagaattgtctgaagtattagcccctgtacaattagccttctctgggaaggagcgaaggcagcgtgtgtctagtggctggcgtgctgaatggtttccaggctggagttcacttgattgtatcaggtggtctctgcctttagggtgaagactgcttcttagcgaggttaggtttacaggtcagccacttcacggtctcacatgcatccatagttttttgttgctgttgaattataacagagttctgagtctgagctagccagttcaccatagaccaagcatggaggtgcatgcctgtaatctcagtatttataaggcagaaggttgtgggcatgagatttgtagtccttgctaatgatgaattctgtccagaagctcatggtacagcaatgctactagctagttgttattaccaatatcacaagcaaggcgtagggccagttacagtgcctgctatgcaggcataaggacccgagcttaaatccgtgtaaagagctaggtatggctgcctgtgccttgactggcattacagcacaggtcaccagtggggactcagtggttagcccacctggccaaaatgagagactgtggcttcaaggcaggaagacacaatagaggaaggcccctaatgtcctgctctggtctttgcctgtgtgcccatctgtgcacgtgtataggtcacagacacaaagaccgtcagctttcagtctccactcccactcctccaacggttgcagtctttacccatacaaagcaaccagttcccagccccccaacccccactttttgtgagccaggatctcactgtctctagccgagactggcctcggacttaagagtcttgtgtttaatcctcttgagttccaccaggcccagcataaagaaatcaccagccttaaagtatgtgaaagtatttatgagaggttgttcatttgacaagcaagtaaccactctcctttacagagcacaataggagaaatcctacagtcaggatgaaaagccagatggtcctaggggacctcagtgtcagaccagtgtgctttgtgtgtcccactttctgccatgctaataacgtgaagaataaactgaggtgtttggggtcagatagggaaacagggaggttagggtggcccttgaattggcgacataagaatttcttttaaaaatctcagcttttatctttacaataaaggtgttttgttgtactggtgctacatttgcctacctgccccttccccacatcctgatataaaagtcctgctgctttagaccctacggccacaccccacaccccccaacctccagagttatgtaatgttttctgcatggcgtttcttgtgctgtgatcagataactgacgaaagcagcttaagagaagaagggtttatttttggctcagagttggaaggagatggaatatgtcatggcagggcagggaaggcttgccagtggatactcaggtgccgagtttatagtctccgcagtcagccactggggccaggcgggtgctgcggaatgggtgctttccccttcctccttttcatttactcccagtctgtgggatgctgctgcccacattcagggcgtgtcgtcctttcttacaaacatgcccagcggtgattccaaatcttgccaaagtgaccgtgaaaacaaacacaacacatcttctcacgattttcctaaaatgtagatgtttgcatttgttaggtgagtaggcagggtcttcagaagcctttagcctagtgctggccgagccgctctgcctgaaggtacatgtcggggacgagggcactgacgtcccttcacacaaagacgctaaggttggttcagggctgagaccaggaataaggcaagtcctgccctcctggtgcctgagctttccatgtctccttggcctggtgaaccagttgttgtttttagaatgttttccctccagagccctcagtccagagcgtgcacccataattagaaatctctccctctgcaaggctgtgcctgcctcccagtgaacacagatctaggcttgttgcctgcctgagtcagtcaacactatctgggtagtgactactgttagcagctcaccagccatggatggcagtgtaacatgggagtaaagaacatggtgatggagcccagactgtcatttaggaagatgtggtagaattaaatgtagtttttctgggtctcagtttctcccctctaaaatgagaattgtacgtggacctgatgatgatgtagaggactcagatgaagccagtggtgtgccacgcctggcccatagcagttgtccataagttactgttgcagttagtgcgatattgttgcagtatctcttgctattgtattctgctagtgtccttgacccaatccccgccattgtgttctaagtggagtgaggccagagcttgtgcccattgtctgggccatcacattcacagggcacagcacacggagtctgtctgaatttggatatggagtgtgtttattagcagggtgttttgggggtggtgtcagggacgtcctactgaaaggaagggtccttgctgattctccaaatggccagggtgaacccagagccaatgctacatggtagctccctgaaagaagagtctggagggaggttggggggttggaggagacaggagtgctgagtgaggttagcacagaacctgtgaatggtcatgggtggtgctgtgctgtgtgaacaggatgtgaaacagaatcatccattatgttaaaagcgcaaagtcaaacaggcgaatcttagtgtgtgtatataaaatatgtatatagtctatttagtttatacatatgtgtagtatattttattgtttatttaattatagtatatgttatttagttccaaatatacacaaaatatttttaacgtgtagcatttgttgtcatttcaacaaatagcaattaatataaaatgatgttttcgtttgttttgactgtttgtttgccctgagtctttgatatgtgttgtgatttttatgcttgtggcacatctgtcgtactctgggctagactgcttcaagaacccatgcaaccgatgacatgggcctcagcaaaaaagacgtggccgtaagggtggggagaaggtgagggctgatagctggacagggcaggacaggactggaagactggcgtgctctctctgtgttcctgaggcaagtggtcggcagtttagaaaaattcaggagaaaaccttgaggtttatctatgctctcaggaaacaaggcaagggggtgagctgaggagtcacactgtagaaggcatgctgctgcaggaatggactccatgcaagtaaacctggggccctgtgggctcggagtcctgggaaaaggagctgatatgctgtgaatgccctggggctgtccctcccagtcagtcctgctctgctcctgccctgctctaccttaagctatggtcgagctccaggaaataggcacccaccccaacccagggctgtggccagagataggagctcgggggcattctcacacatgccttacccttttgctgaaggatcacggaaaagctttacagtcctgagggggacagggagcaggaagggcagagggagggacgcacgcatgcaggagctcttcagagaatggaacctgggacttattagataactacactaccactgtaccctctcagccccttttaattttaatgtcgtgaacaatcacaagccatttttggtattaataaaaagtatgctcattgtagttcagctacagtagaaaaaggtctgcacctagttaggggatgaaattctgagaccgcttccggatttctgttgaggcagggtgcctctgtaaggcagtctgtctcttcaggagtgaagggatcatggttactgtagggagttatctgtcaggtctctcacgcagggtgcttttctgttctgtttctatgcacccattcagtctccagtcatcacattgttcatttacaatgtgccagtctctttacaagaaccagaaataagggcacagaaattagctttttatccttttaagaaaaatcccagttatcacttagtggttggtctgcatgacaaaaactaagtgcagccatagtaagtctgtggagttgctccataaatccacactttataccgccaagttatctgtggggctggggagacaggtgaagcttgagccgggtggaaggggcaaggtagcaatttatcagtgcacagctccgtgctcccagacccaaaggctaaagtgtgccctcatttacacatcaccactgggcgtggtggcgcacgcctttaatcccagcacttaggaggcagagacaggcggatttctgagttcgaggacagcctggtctacaaagtgagttccaggacagccagggctacacagagaaaccctgtctcgaaaaaaccaaaaaaaccaaaaccaaaacaaacaagcaaaaaagaatctttttgctcaactaaacgtttacttccctgggctgggtaccagaggcacagagagcatgtgagatgttgctggacccagactgagggttgagagcggacatctgtgctcacacctgagggtgtggtgagacttgatgttctttgcagcactcagcctaaggagtgcatctgtgttccatgctcctgtccatcctcctatccttcagagagcagagaaccagaaggtgtcagtagtcaggcagtatggtatgctgagaggtccttggctttgggagggccttggccctgcccgtacagatcagggaaggccccatgaagagagtggagtgagtgaactgagtgttgcagagcaagtgtggatttatggagaggatttggagactgcttccatctgtccaagctctagattgggaaagagcaaagtgccttggtgtgactgccatggtggtgcatgggtgaaggggctggtggccagctggaacgtagcacaggcaaggccctaatccttggtgctgggggattctgacttgtgtagctggcagggagccctaggtggactgtgcagaagtgtagtccatttacactgatagtggccattcagaaagactcccggggcttcaaaaccatgagatgaatgagaagcagttctgtcccggcctggactgcagaaacatggaagagacatgttacctggaggacttgggggaggcaagtgttaactggtaatggacagagccaggtagagggagggaggcagatttctgattgggtcaggaaacccaggtgtggaagtcagtttagctgagggaggtgactttagtgtgcagatcctgggatgtcaccaggcagcctggagtcttcctgggaactgagcacctggctctgtcctgtggtgaatggactcatgagtgctgtcagaacctaagagagtaaagagacaaattctagacagcatgaatgaggggagccatgcgggtgagaggatccagctaagaaaatggatcagtgcagtccctcgcttggagttttacaaatttcaaatctatagaactgttgggaaaatattacaataagaaccagatgacaattctgggtcctggaggtggatagagaaccaggaagtttttcctcccctctctcagatgactgtggccatgtcagagtggatattgggcaggactgttggagagaggggcccacagcttagggtagaggtctgagctggaggcaggactttgcaaagcaccaggctagaggtagtatgcggacttggaaacatggtagagatgagactggcgcaccgcagaagtgacaggtggggaagataagccaggcagaaagtgtaaggaaggaggggaaagggccatcctggccggcttgaaagaggcagccagagtgagcagctgtgtgggctgttgctggtaggtcaggtgagctgaggagccagccagtgggggtggggtcaccttggcaagagagagagagagagaaagagagagagagagagagagaggcgctgtggaatattaatgtggttagagcagactgaagagcactggaggagaggaagtgaagacagcaaatgtcgttgctctttcaaggactcttctctacaggggaagagagaagcgggtgagagtgggaggaagatgtgtcaagaggctcagtaaatacctgaaatagttagcgcacgacacggggcagaaggctgtgcagatggggaggactggccatacaggaggcacacgaaggaggaggttggtggatactccccaaggcagacttctaaaccattactttacagagttgctgcaagggtcctctgtcaaagtggccagaatagggatagccttggctgtgctgaaggcttccaaggctctgggcacctgccggtgctcatcagtgctgctgtgccctggcccctgactcctggttctgctgcatgcccctggctcttctgtgtgtgctgggaagaatttgggagcctggaggcttcctggtcacaatgtcccaaggccagtgtccagcctccaaggtctcactagagcttttcccagtgaaccttctccacctccagtctcctgaccgcatctggtcttctgctggggttgaggctgggcagcctcgggccttcagtgccttctgcttctcctcctgtctgaggattagtcattagggtgtaagacttctcagttcacaacctgtgtggattttgtctacctaagccttactattctgggcataatgggcaccattttatacatatcgtgggaggactggaggcccggtgggggcctctcagagttttccttctgcacctttgagttcgtcactgtccacggcctagtgttacgtgtgacttctcatagaagtatatactgtaattggatatctcttcccgtggctcctctcatccaagctttgcttttgtagtggaaaaaaatacatattactggaaggtttcacttaggtttccagttctggaatattttaatctagtcttcatagatcttcagattaattttgtttttgtttgtttgagaaacttcactagtacttcctctgaaattacctgtactcctcacagcccatcttactggtgcttattttgataactctaacccaacagtgccaaacgaccttgagaagattgtgtagcaataccgatacataaatattgcttaaaacccctctgaatgggaatatcagtcttcttttcctttttctcttaaattatattttaaatgagaatgttagaatacaggtgttggtactttaggcaaagtgaaaatatctgatcggaagtcacctgaaatactatattttcgacacagtagtgaaggtaacagaaatagattactcagtgctaaatattttcaggtggacagtatctcagtgaagccaagggtgttgctgagtggatgctggtcctaagaccacgctgacttacacagctgtttaaactctagcagcttgactcaaagggtactgctgttttataactgtatttaaaaatctgttcctcttttactccctcaaactgagctcggagatataatgggacccattataggtaaaaggtctgtgactcagccatccagctactcaaactctgggctcttttaattgccaccattaaagctttagtacttttatctcataaaaatagatatcattgatgtaaaatgtgtgcctgttgaagatacatgtgtacctctgccctcacagttagctaatcagccagccatctgagttctaagttagttgggttttatgcaaatgagaacatgacatagatcacaaattttgttctgagttctttaattaagaagacattccagtggtactcagggccgagcctcactagaatctcaatctcaatctcagccctctctctctctctctctctctctctctctctctctctctctctctctcatagaaccttactttcttcgctttgtgttggatagaagctgtatttagttgatagaacagtggcgggtccctcggttccttgatcccaagagtgcagtgcttctggttcaaacactgggatttcaagaatttgatggacacacacagattactcttctgtctctagctgaaacatcagcttaaatgtaaatgtggtccttgaggtatttctctctgctggtctgctggtgggttcctgttgccaaaaatataagctctatgatgaggaaattccaaagcgcgatggaagctctgataattcattgaagccaaatattaaaatgtggacagcctgtttgttctgaacgttttttccagtgtgctagcaggctaccttcattcattattcacattgctgtgcacagagatgacacctctctagatgtgccatgagtgtattgcagcgaagtttagctccctacccagtcatgctcacatttacttctctgttgtgaaaatagcaactaattagtggggcatctccataggcgggcgagcctctcctgctctcacagtgatagggtagccctcagataagagaacagagtcttgactctaagaaggactcaaatccaaacaattctaaaatacaaacccacccacacaaaacatatgtgagctacacagccggcctctctccttgcccagctgtgtagattcaattataataattttctcagttgcataacattgctatttgtttattactgcgttattagtcagtgaatgaacctccctctttttgacccctcagcagtgtttataaaatacttaattgctttggtatcttctgttttgtgtgtaattccagctggaaggagccatggggacagagtttctctgtaagtgtataacagaatgtttctaatgtgcagtaaactttctttaaaaaggtgtgtgtgtgttttaagttgaaagtaaagttgttttgtttcaatctccttgtgaccctaagtagtgtcgtgggagccactggccgctgggcagctctgcacagggggtccgggaggacctgatgggagcatggccaacagtaaggaggcagttggcgctgagcttgagaaagtggactttgcctggtgtcagtcctgtctcctttttggtttttttttttttttttttttttgtgacttgggcaagttttttgtccccttggatgtattattctccgttagtgaatcagagaatgtatgaccacactcaatgaccccttcagcatagcgtctttacagagacacagggaaactctgcagtgtggtcaaggtgtgagctatctcacaggggaagaaggaccctcggggaaataaaccaaaaagaaggaagtgcaggttagaaataaggggaggtacttctttgaacgtgtgtagtgttgtgtggcatgttaccacagacttcatggcttatagccatgccctgctcctcctcagcattttcttaggtaggggtctgggcatggtttacccgaggccactcagggctctccaggatgcagagctcaggcagagtttctcactggaatcttcctgctagctccattgctagctccattcaggttgggcagaagtacttatggctacctggggcagtgttgctgggtgtctttcaatgctacccttagctcctggagactacctgcaagttatgcctaagggttccccccactcccctatggccactggcttcttcacagcctagataagattcttccctcctctttaaaaggctctctgatttaaggcagacttgcctaggataattacccctttgaggtaaccccaaaccagtgatttctcaccttgatcagacctgtgacgacatccttttcacctttagctagaagtcaaaggtcctaccactcttagagataatggggcagattaagagttctgcctcccacaacatgcgaatgagtttttatagaccacagtagtctatcattaagcatttattgtgagctaaatatgctagattcccagtctcgaactgtggggaacttgtctagagtgtataaataaactttatcactaaatcctctaatttttccccctttcaaaaactcccagttctgcaaaatccctggtattggtcagtgttactaagagacctgttgtcatcctttgaagttcgagtttttaaagccgtaagaatagcagagtaggttgctttttaatattaacacacgtaagcagcgtaaattgcttttctggggccaaactctatacctttcctttttataaagcaaacttgctgttgaatgtaccagtggcggcaaagcatgctgtcaagtgtgcaccagtggcttaatgcactggattcattttgttttttaagtatgtaagtttgaccttcgtcttcattgtctgtgaatagaattccctggtgtctgtgtgtgtgtgaaatattttgaccaacccggaggctttgttgaaggcacatacaagagtgtttcactgcgcctgagcactggcagccacgggagtttggggagtgcttgtttatggcacaggttgtgggacagggagagccttactgctgaagaagctgtgctgtggattctcattcgtgagtgctaaggagagggcaggggaagagaggagaggcgggctccacggggttagtctagggcgctgcagagctgcctttgctggccttgcctctagaaagctgagctcagaagcacagcacccgaagcctgctgtcagcagcccagagatggcgaatgaggagctgaaagcaaagccctgtgtggcagggctctgtaatgggtccatcctcatgagcagccagagctgtgcaccccactttccctaagatgtccctcctgtggaacagtggccatgcctgctcttctggcccaggcaacacagaaaattattactcttactaacatggaccctttaaaaaattattattattttcattaggatgcgaactcctaggctttcctatagatcttgaattgtggtgtgcttgtgttgttttgtgtctttcccatgacgcagaagacagttttgccacccctgtacctctcttaccaaaaggacttttcaggaaggaggtggtccagcctgggcacattctgcttacctgtgcactagttttgaacagggatcacgtgggggaacagcactcagatttcacataaacaactaagctaatttttccaaacatttctgaagccatggagacacatcaaaacatgttcaatttaacatcagattactttgtaccctaggagtgagtgagtgagtgagtgtgtgtgtgtgagtgtgtgtgtgtgtgagtgtgtgtgagtgtgagtgtgtgagtgtgtgtgtgagtgtgcgtgtcagtgtgtgtgagtgtgtgtgtgtctgtgtgtgtgtgagtgtgtgtgtgtgagagtgtgtgtgagtgtgtgagtgtgtgtgtgtgtgagtgtcagtgtgtgtgtgagtgtgtgtgtgagtgtgtgtgtgtcagtgtgtgtgtgtgagagtgtgtgtgagtgtgtgactgtgtgtgtgagtgtgtgtgtgtgtgtgtgtgtgagtgtcagtgtgtgtgtgtgtgtgtgtgtgcaggttgtttcaactctgtgagttttgcattttccctaagaaatggcagttggcttaccagggggaggaaagggtgggtttagagtccttccccagagatagactgcagtagatgagtgagacacacgcaggtccatcctttaggatctgggtagttttcaaggcagggcagggaggcagggagctaactcgtcttttcctggtcccttcggaattgaagtggctcggggggggggggggggatgttcccgctcattgctcttaagcacctggcttgtaccgtgaacctctccacatttagataccaggtccagcagcccttccctgtaatcccaggtaaccatcaggctgaggcagggggatcacaagttcaagggcagcctgggcaatgtgcaagaccctgtccccaaccgaaagttatgaaacaaatgcacagacacccacccgtacccctgagggggagacaggagagacagagacagacagacagacagatgaacacgtatctcagcttgagttctcccacccccgtgtcccagcggttctgttatttgtttaaatatgtgttgaatgaacaaattagcctcttaataacaagtgcagttttaaaaattaactttcaccccaaaagtctcagtagcacttactgaacccttgctgtgtgctctggatctttatattttggcccaaaggtagaacttcagatttgataccagccttactgtcttaagggagtgtagaggatccaaggcccaggggagacaaaaccaaaagttcagaatgtccaaaaacatttcaaaaaaggttcataaagtgcatttccaccttatgtgactaatttgtagtttgcaaacggtttaaatcatggttggctgtgttgtgagcccatgtttcttgctaccgagttcccattggcggccacttccttagcagatgtcttgtctctgagagctccgatggctctttatgcctctccatagctaatttgcggggggtacaagttggcagaaacagtctctccatggtccagccagtcccggctcttcttttgtgaggcattactcggaatctgtacttgtttgcatatgtgtaaattcagatatgtaaatgtatgcttgtttgcaaataagccttcacccacaggcctaccgtatgtgaagtactgtgagctttagaaattgtatgtgttgtatgttggtgctatgactctatattgcttataattaaggcaaaatatgaaaagaagatagcttttttaaagctagaaaaaccttagaaggaaaggacacttaaaacagtcaagaaatctctcctctacacttttccaccgtctcatctgcggtgcttcctaagtttgacatagcagagggatttgccctcgcttccccattggctggcctttgacagtgcatctggtccttcggcagctctgtacaagtgctgacttcctagttgatgtactgtcagcagaagagttaagggtaaaaccaatacaactgggttttttctttatataaaacatacaccttgggccatttttacttatcatttaaatatcagtccgctggcttaagacccaagagtccatactgtacttcttacagacaccacagtatgtcaaaaggaatatcatgaacgatgtcgggatgtgaagtctgcatggtatctaaaatccctcaccttcgttttaataaatgagaggtttaggaatggcctatatggtaatatcagatgttaatggcattgattacctgtcaggcagtggggattgatgggaaaatgtccgctgtaaaattaaatagcattagagaagactgtaccaagcatttggtgggggtagccagggaagtggggggcctgagggactgtcagggttttactgggagctccaggttttttttttttcttaccccacatgattaaggcagaccatctgttctttgttaaatgtttacaaaaacagcttccctctaaaagattcaaggagaagtaggtctggtaaacacgcatttccctgagcaccttcccgccctccttcagatagtaccaaaacaattctgccgtagagcagacgagattaatacgtttctatgttccatctttacttttcccctccttgtgggagattaaattttttacagagtccctaatttatggcctcatttatttataaaagaagcatctaaagtgatttgtatgctaacatgtatagatgaattttcagctttttttgtgtttttattttgtgtgtgtgtgtgtgtgttgctctttttaattcatacatgtgcgctggaaaagctctcaggggacactggtattctgtaactggagtggaagccatgcaggttgaagatgggtacatatccctcccatagtaagtacattgctgtcctacattggagccatccctccgattttcccttggtttttaggaataacttttcttctatttttttgaatgctagattctcccacaaaagtttcatttctatcctccatgcagaaagctgtgtcttcctcctgctcagttacgttaggaaatgtaagtaactgagcttgagctgtttccatgtagaaagtggaaatcaagtcagccaactcagctagtagccggggctttggttgctcgggtccctgaatgtttgtgagggaatataggccagtagtgacccttcagggtttgctcagttcagtgttggctccatgttttgtcttttccagaaagaagacttcaagaggagtgggttggcatcagagaagtgctaggtttaggaaacacttcacctctttcccttacgtgactcctgatagcctcatcacctcctagaacgcacttcctgtctggaagatggggtagatataaccacatgctgttgtcctgtgggacctgtgtgcgagtgtgtgtcggcgtgctcctcctcccacggtgcactcacctctgacttctgacatgcctttctgaattcatttcctctttgctgtgaccaaaaaagggcaacatatatttttaagattggtcttataccaatttgttgttgttattgctgctgctgctgctgctgctgctgctgctgctgcttttagaacgatggggatcacaaccggggcctgtgcctgttaggcaagcactctaactatgagctatatgcccagctcaccccataatggaaagaaacttaacaagtagagaagctgaactctgggtgggggaaatgacttccccagaaagtgtaactgtcattagagtagccagggcaggctttggttggaatggtgggttaccttcttaagcttgttctagtttgtcatgttgttttggagatgatcatggagccccttggagataggatgaaacttgaggcacctctctagaaatactcctgtgtgtaaggttttaggagctggttggagttttaagacattggatgaagaaggaaggctgcattcaggtgtcacctccagtccttgtgtggcctgaaagacagagataagttctacgatttccttgtagattcaggtatatggacacataaactcactatagggcagaagatatgcagccataaagattttatgttgagttgtgatttctgtaaactgtgctaaacatgagcttctaaccttccttcgtgttgagtctgtggactaagcctgggccctacactgctctgtttttgtgggttataagttgtatcacctttgatattggttccgttatgacttttgtttcctcaggcaggttactttatgttagtgtgtcattgtccccaactgtgaaactggaaggttcctcatagtccagagacctggtgtgggaatatagtgatgtttcggccatgaagcctatgctgggcttgttggaagatcactcagctctcagggatatagggaaaaggcagaggatgactgaggttgcagatgggacgttttcagttattcatttgaaatgtgaagatttctcaggtgcagcagtctgtcggatggatgatgcgcctgcgctgtcgctgccctgtcttgggtcctgggctttgaggtcactctgtgcaggagttatttactctgttctcacttgacttctcagcatctcatcttatttgtcagtattttttaatgtgtactccccccccccaattaatgtcagcattgatttcatttgtctatccattcatccatctatccatccacccatccatctggcttcaagaagttagggaaaaaaaagattgtccacatttctaattacttcaagaaacttagccaatgcaaaatcattctttcacatgacattttaatctagacaatttaatgttatttaatccatatatgacctgtgtactctgtaaaggttgtattgtacttagctctatctttttagtactagaatctttcaatgttggatatgcttgttctttgtactctatctgtgtctttgagtccccccccccaccccccattcagagagaggcctctgaggctgagcctgtgttttcattttacttcttgccctgtgttcttgcagttgaaaggtgtggaatgtctagctctgtagcctctttcccttcctgcactaatgcttttctgtagtaataaactggcatttaaagcattccccttaaagaaactcgtatgtttctaggctgagagaaaaatggcgaatcctgttacccttagtttgtagacgttgcttccttgagtatagaataggaccatcagccattgactcctagttcctttcttcatcgtgaagaatgagactaattcagtcccatttgtgtctcttagcattctccatcggagccctttctagagaagccagtgccggatatgacccaggtcagcgcacagaacgctcagctagtgaagagcgacgattacctgccgtcgatagagcagcagccacagcagaagaagaagaaaaagaaaaacaaccacattgctgcaggggattccagtaaaggttttggtaaagatgacttccctggtggggttgaaaaccaagaactgcgcaggaactcactggatgtgtcccaggaagaaaaaaagaaaaagaaaaggccgaaggtcaaaaaagatccgaaggaatcgaaggagccgaaggagaagaaagagcccaagaccccaaaagccccgaagatccccaaagagccaaaggaaaagaaagcaaaaactgtcacgccaaaacccaaatccagcaaaaagtcaaggtaggctgtgggtgatcaaaggctgcgcatggggcagaccagcctcacgctgcagggtctgggtgagtgggggtgtggagtgcctgtgtattttagatcatttgtgaccaactttggctcatacagtgcaaagctaaggtgtttgtgtattccaaactttaggactctactcttacgaactgctgatttatgcagagttttactggataaaaaaaatgttattttgcagccggcttctttttgtaaaaaccacaacggtgcttggttctctccgtaactcataggggaggatttcagaggaaagcaaggccactgaatggctctgaacattttactgccaactgcagaatttgaaagagagttgattgtgtctgcttagcaggataggtctttcacggcaggttgaagtccttgtggacagtgtgggaaaacacagtggaactcatcattagatatggcttcaagaacaggcatgggctctgggtataggaaagagcctctcttgctctgtatgccccaccaagtctctggccccctagaaggcatatttattcagtaagaaaatccgagagaagacattgaggactaatttttttcatttgtcctgaacatttccaacaactgttctgaagcagttccagacatctgaatccgtctttcagaatatggctcatgttagaaaatattaaaatatggtttccagatggaagtgtagccggactcggttaatctgagcctgttcgcatactctgatagaaaacacactccactctctagcccacgtgcacatgtaaacatttatgtgctcacacactcagttgggtcattgcctcgtactttctgtgtggagctatagccctttgctgatgggctacactgtgtcatgtgcagacacatacaccagtgcacagaggaggtcataggtgccgagagagagagagaagggggcagcttcttcagtgtcccgccagcaactcgaccgtattccgtgggttgaggctgtgagttttctttttaccatggattacttgtgtggtatccaaaaagccaagtatagacgttcactcaaacttaccagtgcccttatatttacagacaaggcttgattgtgcagtcttcattgaaaaggttttttttttcctccctgtgaatattttctaagcccagaactcattacaaaacctttgcatttattaaagaggcattttattgaatgcttatttgtaggtaagtgttcggactataatgataagtaagatacaggtaaaatttttagtccgacagtatgtgtttgtttttaaaaagctgctgcatgaatgtaaatactgggctttggtctgaggaagcacatcccccagggagagtagtcaaatccaaatctgaaacagaaggtgtgccctcttttcttaaggtgtaggtgtgtgtactaaaggggtgttctggactttagcggtattatccccaacacttttagtaccagaataatttcagttcagttttcttttgttgttgttactattattatacttaatggtaaaaatggatcgaatcattctaggattccgatatagatttccaaccatcttcagctcgtgtctgatcaggcagggtctatgttcccagcttacttgggcatatccttaccagctgtggagtggttcggaaacagactttgaaatggtgtatgtagtagtgacccttgtatcgtccctgacacctgcgggaatccagcctggtcagcactgggtgtgtagcatttccttggtgcagctagagatcctgtgtccacacagagagctattggggctgactccagggtagccagagactgtactcctgagagtgaggtctctgccgagtgtttagcacaacttttttttttttttttttttttttgtagggacaggagggaatttttacttaagaagaaaatatactttcttccttctccctgctggcactcactagttgtctcccttagagctatacacaaatgctgttttgagtcttaatggtttgggaacctttgacaggagcagggtgatgtgtgtggagatgtacaggggtcaggaagccgcatcaggtatgtgccagagacttaaaggccatgtttaggggtggtgctgggagatggagggagttggtagcacctctgtttgcttggatcacttcacacgcatgtgaccactggctgatttacagtgaagtgtggtaagggctatccccagcagctttcccgttgttgatggtctttcaggattggctgtccaaacataggataattgcattgagatgttaaataaattaacaaaccaaaccattattttgtcaaaccacgttgttgctattggtcagatgaattgagtatgtcaattgtggtctccttgttcagttacatctacaaggaaatagcatccttgaatcaaggataacgagaatgcatacaactccatgtagattttgaatagcatagcagaataattatgtaaattggatatgcagtgatgaaggtaatggggggtttgggctgtgttagtgctggggctcaattgccagagcagtttgcgtctacgccgtgaaacacaacagtggcaattttgttttgcaaaatgctatgtgataccggttatttccatccttgaataagttaacttgatgaatttgtttatacagaaaataattttcctacagggggctgaaacagaggaaatgagcaagtgaaatgaaaaatttagcctagtagctcctcacttctttccgtcggtgtgagctgtgtcgttgctgccacactgccagcagacatgttgtcctttgagtgttgatgaggaagtgacctgctggtggtccgcatcattctcacacccttggtaatgagggatgcacagaggtgatgggcgtgcagagtgggtcctctggtgcccacgtggctctgctaaaagtcagttaaatttgtggacatcctcaacaaccaagatacagtcacatgtgtctttactgtgccagggaagctacaatagtctgcctagaagcagttacgtgggatggtggagaaataggagaaacagttgctcaacacagtaggataaagacactttgtaccctaacaacagggtgggggtgggggatgggctacttctgggcccaactcctctgatagagctatgttccttttttttttttcttacttataatatatttttcctatacctgttttttattgctctccatgggtgtccttatagctttcaaatattggctgttaatattgaaaataaaggcaggccctcggcgggcgggcgctggagaggctgcgttttgcatgtgcttggattccgggctttgcttttccctctccgggctttgcttttccctctcagtgctctctgttgtgcatgcgcgggctctgggaagagagagtttggaggaagcgcttcctctgaatgactcttgaagggtttagtggtccatttagctacataaagattctttgaatgtacagaagaaggggacttggccagagcctgtgacttgactactgaagcctgaattagccggagcagtgtgactgccgctaatgtagtttctaggaacacgtttggttcattgctcccttccccacccccactgttaaatttagcagaaatgaaaatgttgtttttcaatcgagtgaagatagcattttattttaaaccagaaaataaacatactactctcatttttaaaaactacacaaaatactaagaacacaggccatgcattttttgctagctcctgtaattatcattaacagtagtagttaatatttatttagcaccttcctcctgaggaacttattttctcaattataatcttacagagttagggtgttttcacccaagaaacacttattcagtcagcagactcaggtcaactaatatatcttcgcattgtgctctctgtcaagcttctcgagaggggtcccaagtaaaagcaactctgtaagccagcctaaaactggggccaaacgcatctgacatcaggtgtcttcacagcggctgtgggaacgaagttcctagattctagtcttttcctatcttgttccttctttccctttagagcacttacgtgctatgatttagtttgattcaaaacactggaaaatcagaccttgttttggctcatgcctgccagagaggctacacaaacatgcgtgtgcatttcaagtgtgtaaatcgcaaaagaagctttgagcccctttagtgctggtggggaagaaagaagcaccctgggtgatcatgctggctctgcctccgagcctgtcttgctaagtctcttattgtcaggacacgttagagatgaggtgcatgtgcccacccttctgtcccaaagctgcccttgtcttctcagagccattaacaacgattcaagtccccagacgttccctgctttggggtggccacctcagtccctctgctgtgggccttcctctctagttcaaagtaggagaaccatcaggcagcttggagagcaagtgctgccccactgcgctgtaagctacatgcaggatgtccctggtgggggcatctactctgcagtgagcttcagtggactggaaagcaatgacctgctacaactttggtttctgcaggaaaggagagtgtgtcctcccctcccccagtacaccaccaaatagcagtggaaggtaaggaggccctgagcagaagtgggtagaagagggagacttctctagagatattttttgaagtctttctgaaggagagtattacagaggagtgtattttgctatggtagacttggctttcatgttatctctgggaggaaggggcaaagaggaccgcaggctgacagtgctgttggcattggtgctaaaatgtccttactgtgtcggagtgcttgggaaaaataggaaaatgggtacaatgcagtgtcccgtctctggctgtgtaatgatgcttgccgggctagcctgggcctagccagagtactcctggtatcagtggatgtcagagagaaccaggcagcttcctcgctggcttctcctcacctgtgtgcctttagctctgaaatgttagataaggaaaagctatgaattacggaaagttaggatcgcaacgcccttaaatattcaatagagtatggttttattttattttattttactttatttttagtcctgaactatagtggagcaatgtagttcgcttcccagtggtctgccttccctgtttgggtagatggtggcagttttctcctttgtgcccttactgttgatccatctaattcccatcctgctgatttgacctgattgaaatatgggttggtaacatgacctctcctgtgtcagccaccctggcaggtcagagaagacaattgtgagcctagagagtaggatagtgagtgccagggtgaccctctgtggagtgtaaacatggtacaagtagttgaatgtgcgtctagcagcccggcactaccataccatagaggctccggttggcatcagcatcgtagggtagaactaggctcaccctctgtgctgtactgcaaggcccagcagtgccatgtagcttaagcggcctgtgtcggtgtcgggcttcagtgaaaagacagcatcttagctgactgcacttcttttccaggttccacatcttaattgagtccacaaaacaatgtgtagattttcagtcttaattcttgacgacatgacaaacatctttgcttcagaatatattattgttaaagatttagttctttcaggaaaattttctgttgttttcccaggtgaacttatgaatgatgctctttagaaaatgactaacactatagcaactctaaagacaaggtcctgatattactggcttaaaatgacccagggactacaccatgcagagcagatgtttacagggaagttggttaagacctgccagatgccatgggaggccatgcagctctgggcctgacactccaacacgcacacatgggctctcaggcaaggtatctggttctggacgacagtgcctggcgtttgattgttgaatgccaagatgtcccacgtattcaaaacataaaatcagattagtccttgcaatctttcctagttttctttgctattctttctttaaaatgtagcacttggggataaagaaatggctcagcagttaagagcactggctgcccttccaatggacctgggttcaattcccagcgcctgtgtggtagctcacaactgtctataattcagtatctgagaccttaacacagacatacattcagggaaagtacaatgcacacaaaatagataaacaggtaggtaggtaggtaggtaggtagatagagagatagctattttttaaaaatctagtacttacagtatcagcaagaatcttttctacagtagctataccttttaaggcaacaacgaataggactgttttctgggtgttttatgtaatgactttcatagaactcaatgctagtagtttttgttcacatcctgtgtcatttctagtgagccaccacgtggttgctagaaattgaactcaggacctctagaagagcagtctgtgctcttaaccgctgaagccatctctccagcctctatgttttctagtacacccaagctttttaggttgccctagtgggtgagcaggtcacctggtcccagcgcaggtgtcagggcgtgcattagaggagagtcttggtgtgctggtgtgttaccttctactcagtgtgtcccaactgctttctcactagtttattctgctgtctgcagtttattatgcagtttatgctgttagatacctttgggcagtaggacttaaattttatttttgtcttattttgtagggctgattttactttctcatttactgcattttatgctgctttaattaatcttttaaaaaaatttgtgtcccctcccctgcccctaagacaaagtttctctgtataacagccctggctagcctggaacttgctttgtagaccaggctagccttgaactcacagagatcttcctgcttctgcctccaaaatgctggtcgtaaaaccgtgtgccctcatacctggcttacttttgtgctttttaaaaataattttcatgtggcttacgaaatgggtttcattatgtaattttcacagatgcacattattgtatttgtcttgtatctgtcctgattcttctcacatccactcttttcctcaaacagcacccctcttctgaatatctagggtgtatgtgttcgcacacgcgtgcttgtatatgtgcatagtgcatggatctagatttcccgtaagagagaaaacatgaagcacttgtctgtgtgcctgcagcttattttgtttaacatgggtgttatttagttccattaactttttctgaaaacggcataatttcatccttatggccagataccattccactgtgtgatacacacacacaaacacacacacacacacacacacacacacacacacacacacacacacacacacacatatacacacacacatacaccacacactcgcttgagagcacctgggatggttccatgtcttggctattataaagagtgctgcggtaaatatggatgtgcccgtttctctgtggtgcaccgacttagatttgtccaggagtggcagaactgagttatatggaagttctatttttagtctcttgaggaacctgtacactgatttccacattacattctcacccagagtgattagggttcccctctgcccgagttctctccagcatttgttaatgttgctatttatgatgacagccacttgaggagagatgggaatctcagcacagtcataatttgcatttccctgataggtgaaggctagggaacccttttcacgtagttagtagtcagccatatgcagttcttttgggaattttttcttccattcgttcacccatctgagtggatggttgtttggggttatatattaaagaagttaacaacctctgtctgacgcacagttggtgaagattttctcccattctgttggctgtctctttgctatataggaatttttaattgtatttgttctcatttgtcagattttggaattgtcttacactgttggggtccttgtcaaagaaagcacccttgtgtatacctgcgtcttgttttgactctgttgtttcagtttcagcactgaaaataaaacaatggttctttacctgtgggtcttgaccccttcataggggccacctatcagatatcctggagatcagatatttatattactgttcacaacagtaacaaaattacagttataaagtagcaacaaagatagccaccacaacccgaggagccatcttaaagactcacagtgttaacaaggtcgagaacccctgcagtaaggtccttgatacattttgaattgggattttctagggtggctatcccatgttcccagcaccacgtgctgacaaggctgtcttttccgagtatgtctttgagactgtagctgtgtgagttcatcactgggttctccgttccattcccctggtttagatgtgtatttgtgccttcctgttgttgttgttgccactgtggccctgtagcacattttgggatcaggtattcccttttctgccctggattgcttggggtggggggtgcacactcgtgctcatacacgtgcgtttccatgtgatttttgagattcctgtttcttttctgtgaagaatgtcgttggaattttatagggattgctttcagtaatatagacattgtcacaagcctcaattctcgcagtcaaagcgtgtggggtcttctagtgtctcgttcaccatcttcaccatcgaaaaattacctaactacactgggtggttttattcttagttacattttttatttttaattaaaaaagttcttgctgggcgtggtggcacacacctttaatcccagcacttgggaggctgaagcaggcagatctctgagttcaaggccagcctggtacgcagaaactctatctggaaaaaaaataataaaacaaaacaaaagtatttttaaagctatcttgatttctccactctagttctttctgggcaaatttgttgtcaacccacggaaaagctactggtattgggatgctaattttgcatcctgttactttgttgaaagtgtcaagagtgagcgcgttagagcctgtggtctttaggcgctctgaaggaccagctcatatcaggggcaagtagaggagacttgacttcgtcttccctcgcttttgtatcactcgatactttatggctctacctgagacttagataccaattccaaacacacacacacacacacacacacacacacacacacaagaatggaaagacgtccagatccaggcaggttgcacatgcctttaattctaacacataggagacagaggcaggtggatcaccccaagcaccaggctagccagcactacatagtgagacacccccacacaccccactgctaccaaataaaagaaagagacacttttgggtttccctatttagtagagcattagctgtagatttttcataaagcttttattataccaaagtaaatttcttctgttgctagtttctgtggtgtgttgttttttttttttttaaatctgttactttttattttcactatttaaaaaccaagtagtaagggctcagagggcttctgatttttgaaactagatgcacttttcatcaacgttgagccctgctgtccaccaagtatactgtgttctgttatgccagcctgaatctttagaattgtaatactctgttatgccagcctgaatctttagaattgtaatacctctgacccacatcctatgtggcagttcttattggttaacatcagtaaattgaaaagtctgttgttgttggatgcattacttcacacctaatccaagctgtctgggaggttgaacaggaagactgctacacgttcaagtctagcctagcctactaagattatgcttgctatgcaagtatagggacctgaatttgaatagccagtagctatatgaaagctgggtgtggtggcatgggtttgtaattgttgctctggggaagcaaaaccaggttgagcttgctgtgcagtcagcctagccaatagctgagctccaggtctgggagagactggacagggaccgactcatggtccgctcatgcgcacacgcccctccagcatatcagttcgaagaatctgtctcagtgccctttttaaagaagatggtgtaatattttggagaagcttgaatcctaataatgttcctgattaatcgtcctgacctaagtttcaaggttgatttctcccactgtaacgagagtcctcattaacttactttatccttggggcctgccaggtcactagctcccgcccactgccagtcacctttattaactgactcactcctcatcacatttggtttcatgatatgggtcctttttaaagtttcttctgagaatgaagatctgtaggttgacactaatgactatttaactgcattctgttttgtcgtaaatcaggctagcccaggctttctaataagctctggctctttggataaagccttgtttagaaagcctgcaatttctcacacaagagttggtcagctctgatccaccagccccatcttaggcaatggcttccactctgtgtttttggtgtgttatgtcttcagctaaataggggtccttccagaagtgaactcccgaggacatacctgacaacagtgcagctctgaacgtggagtttgtgattgcacctaagcattctcctccaggtggtgcacggcgctgggataaccatggaactaatgagctgtggggctggccgctgtgagtctgctcctataataaggtgtgaaacacgaggcttcaggagcaacagtggcctttcaaatttccagggtgtcactggatttatgtttgatttccaggactcactagaacgagtagaacctctgtatctaagtctgtggggcaggatagatagatcagtatttgtatttctctcgtattgctgattaaggaagataggaggaggttggatttttgacttggggataaaatttataaatggtaatttattgtattgattttgaaaacttccctgtttccctcaagtttattatcacctcatttcacactgtcatcctttggggnnnnnnnnnnnnnnnnnnnnnnnnnnnnnnnnnnnnnnnnnnnnnnnnnnnnnnnnnnnnnnnnnnnnnnnnnnnnnnnnnnnnnnnnnnnnnnnnnnnnnnnnnnnnnnnnnnnnnnnnnnnnnnnnnnnnnnnnnnnnnnnnnnnnnnnnnnnnnnnnnnnnnnnnnnnnnnnnnnnnnnnnnnnnnnnnnnnnnnnnnnnnnnnnnnnnnnnnnnnnnnnnnnnnnnnnnnnnnnnnnnnnnnnnnnnnnnnnnnnnnnnnnnnnnnnnnnnnnnnnnnnnnnnnnnnnnnnnnnnnnnnnnnnnnnnnnnnnnnnnnnnnnnnnnnnnnnnnnnnnnnnnnnnnnnnnnnnnnnnnnnnnnnnnnnnnnnnnnnngcagaggtgggcagatctcttgaatttgaggctagcctggtctacagtccaggacaaccaggactacctagaaaaaccctgtcttggaactcttccccccccccccacacacacacacacacatacacacaaaagaactttgtacttgctattaaattgtttaaataggaaaagaaacataagcagcctataagcccatcttaagcaggcagtaggaattcagagatagttccttttagctcacaagatcgttgatgaaagatacacagtgctttgattttaatacaacccagtaatgttgacatccatttttttagtgttttaagtatttacatgttgtgtgacacctaagtaggaatttgtaatcatacctgatctagactgctgtgtcgttctgaaaatgtttcttggaactcattccaagatctgtcagctaagccttgcagaggagcaggtaggcttcaagggagcagaggccacattgcatttgcctgccgagcatggctgtgaggagcagaaagaagcgaatgttgtgacttgtataggttggaaggagtggcaccccagtactgagatttgcagacatcacacactggggatttaatttaaggactacttcctgagattttagtaacctgcggagaggagatggcattggtgatctggctccatcaggatgctgagcagagtaagagctaacagtggggcctgtgcgtggctagctttcctcgaggtcctgcttttagaccaaggttctgagaaggcatcgttgcaactgttggaagtacaccagagctctggatctgcaccacgcagcctccagtgtcatagtgctggcttagggagtgcctaacagtattctcatccctacaaccagcgcagatgtcctgtttgcatattccagctttgaacacagtttggaagaagaacgagtatatggctgtgtttggagtctggcagtataagaacagtttgaaccttacagatataaacaggatggtaggtggactctgctcttttcccactggtctcatgctggggacccttgccttggggcgagagtgaagtgacaggcagtgactgttgtcatttaggttggtatggcaggtgcttggctgaagcagtggtagtggcagggtgaacgtgccgtgtgttctttcagctagtgactaacgctatcatcggtgttccttctgtgaacgctctttaagtgagctgatactcgaagcttgtggattttctccatgtgttccgccactgaattggcactggtgggtgtgggtctgggtcgcagagagagagcatgcactgcacagatgtgctgcttgtcttccaggggtgtgcagagagtgaccatctctgtccaacgctgtctcctttcttgtcttttctcattcaaacccacagaaatactgagcggtgcagatcttgccctcatgggatagatgagggaatgaaggtgcagggaaactagatgtgatttatccagagtcccagttggagctgtggcggttagagctcaggctgactcctgtctggtggaaaccagcattctgtagtacttcaggtagaagaaaaaaattgacttgtgttttacgtaggtcaaaacagtttgaatattacacttcataggagtccagattggcttattccaaaatcataatgatgtgatgtaagtgattgaatattgtcctggtttataaagtgtctgggtggccactgaagaccccttagtctttttctgacttcttagggtgcttgattgtatactggtgggtgggagaacctagctgtgcctcagcaggaatgtcgtgagctctaatgagtttgcctcttgcagtaatcagaactgaaagtgcttgcctgggctgggaggtttttgtctaagcatttggagaggccctgcctgtctgacttccagccatcttggaggttctgtacagtgcatccttggatggagcagatggaaagtcattagtgtttctgtcccccagcaaatagatgtttcctcaaacctggctctgggcactaagcagacaggcagcctttgctcctgcagggtgccgcttgcacagcccgaaaccccacaaacttgaactccatcctccgcgctgcttgatcgaggtcaccatggaaaacatgcaccgccgctcagtttacctggcagtggttcagctctttgacagacctacctctgatttaaacaaattcgagaaatatgtaaagttttggaagcagttttgcactgatttgataaaagaaaccacaaaacactgcagcgcaggtgttgagagtgtttgaaagctgattgagggaagcagatggctttagtcagtggcatccagccaaaagagcaggtgctggtcacgtgaccgctggttaccagggtaatctgattgctcttggcgtgcagatgaaaggaaaggggcccagtgttcagctgtagtattgtataatttgtggcagttagagcggaaataaatgctggaaatggagcctcatggtaggggagacttctgtcagtgtgtagcgtaaacaccaggacactctcctcaggaactgctgcatgaattttttaatttaaaaaatattctgctgtctgtggatttctctgacttagtcacaccacctctttttattttttaattttttgtaaataaaatcaatttttgaaatgtaactgctatttgtgatcatcttgaattgttttcagttgtttcctgatgtagctgtttgctatgctaaaatgctcatgtatcaaaataagctctgagtatgtaaaaaacaacaggtttaagatgatcaaaaacatattagtggagaacgctgccctaggtgtgtgccggaaacgctattgacacactttggaagggtttaacgtgacacatctgtacttagaatcattagctgctgcagcctcttcctagtggctcaacaacatctttcttagggcctctcttggtgagcttctctgggactttataacatttaataaatgtggggttttgaaatatgtatctttagtttttcaagctacttagagcttgaggcaccctagaaatagtaaaaaaaacaaaacaaaacagaaggctggtattcggatcatacattttctgtgttgtatatataacaaacagtcatttgatggtaagaagtcttgggtgcagagtgtagatgaaagggaacactgagtgtttgctctaaaagtactgtgaggaacggttttgggggtggggataacccaagaattttatttttcctgtgttttggtttaccattcaactcctggtgtttctcaggaacatggaaagcgagcttcagttattggtgagaaacaagcacacgcttataatttcaaagacttagcttttggtagaaatgctaattgtggggctggtggtggcctcagtggtagagagagctcttgtccagcatgtccagttgctagcactggaggaaatgaaggccaagtgtggctatccctccaaaatgcttagcaccaaaaggaaacttactcatagacaagaacaccgaattaaataaaattatgtatttctaggaaattaatttttagtaaaaatgtaccggtcaccattggacttaaaaaatgactgtgtgaaactctgtgccagagaaataagggtatagtcattagatggtatttttcccccctttggttaaaagaattggtcttcacccgactttttagcaaagagacatcctaggttttttgtcacagctttgtatgtcagcaggggctgggggtagaattctgtgaagtgttcaaagttctacatccagttctgtttcaatgggtgagaaatttgctgaaggtcatcaattataagttttgttgtcaaaccttaattaggagtaccatttaatgaaaagcgcccaagacccatcgacctggcctttgccaccactctttattaacagaaagagaaggtttggggcatgtgggaaaccacaccgaaggtgtacgctaagtgatgtactttgaattctagtaataagaaaccggattcagaagcaagtgctttgaagaagaaggtcaacaaaggaaaaacagaaggttctgaaaattcagacttggacaaaacacccccaccgtcccccgctcctgaagaggacgaagacccaggtgtccaggtaacaccattattcccttcggggctccagctggggagtggggtaactttagccacatgtaaagcacgccaggtctctccaggctttgtttgtcaggtgtgtgtgtgatggccttattgttgtctggaacattatatccacagtgaagagagccagagcccacagaaacccagcttactctagggccttctgagctttgagattactaaagcaaagagctgccctttatttccacaaatgtatgttttaatggttatgctgttttaagcatttttagcgttgctattatatcgcttcatttaaagtatcattcacatttaaatttttttctaaattttttttggtcaatttttatttgatttctccctctccctcgagtgtgtgtgtgtgtgtgtgcgcgcgcacatgtgcacgtgtgtacattcatgtggaggcaagaggccaccctcaggtgtcattcttttaggagctaaccaccctgtgtttttgagacaggctccctcactgatttggattagtgaagcatgctagccttggctggcctgtgagccccagagatcttgtctccactccctaatgctggaattgtgagcatgtccttttatgccttgctttctgttcaaaggagcaaggctgaggcctcttgcttgcaaggaaagcactttcctgactgagccacccatcttgcccttgttaattttttttttttttaataaaaaccaaaacatactttgtagcttatttatagcacatggttggagatgtgatatattcatgatagaattttgatcaataagtcagtggtatcccagatggtaactggttcagtgttagattctcctgaggtctaaaagtgagtagtaggaattcgggttcttgtgtatgaagcttgctgccttcactatttggactgacagaggtctcaaaagtatgcatgacagttgtgagttatttccttgataggttccgtggatgcatgccagtctggtcctttgggatggctgggaatgtggcttgtgcaagtgacatctgaattatcagggagtgggtcccattggaataggcagccagcccttagggaccagttgggcttcctcttacctgtaatatatcctcagatcttcctacccaaggcccaagggtctgtaatatgtggccccctgcagagaacttcagcttgaatactgcattcttcttgagtagaacatcctggaagaaggttctaagaaggtagaatggttgaagatggttgtgacccaccacgtgggtgcagggaatcaaaccttggtcctccgcaagagcaacaagtgctctcaacaaccgtgctgaatcttctcttaaaagttggttaaggagtttggaactaagaatgtataatgaaattcattgtatccttgaggttgttttgtcttaatgtgctcttttgggactttacaacaaaaatatttggataatattaagaattgttctcacaggcctgatgtggtggcacatgcctttagtcccagcacttgccagtttgaggccagccaaagttaccaaaggagaccctgcctcaaaacaaaagaattatttcccgttctgactaatgaactactgtttggggtgggatttcctccgggattccccccgccccccattttcccttttctttccactcttttccttgccttgtgtccactttccaccctgtattttaggtacggaaaagcacttagcagttcaggccaagctccgtgcttccatctaattgtctcagtaacagttctgcattcaacagccaaagtcaggcggccacagaaactgcctagaaagctgtcttcctggtgcctgctacaggaagtgatgacgcaggctgcgtgtttgttacacttcttcctgtggtgcatctgtgaggggcttgagggaaaagttccaatgctctggttgctcatcaagagttaatgacatgttaactctaactgactctttcacaaggtgcggccacagcaaggccacattttcattttctcctcaggacacactgattttaaccaaaagtatctttataaagcaggttaaatggaatcgttctcaggctatgaggtaccgtcctgaggccgtgtgggtcttgccccaagagatcacagtgtctgtcatgtcttcttcatttgtatgatgaatattttacgtcctcccatcttaatgctggcctgcacaattgatgaatctttaagaagcagcagttcgtaattcttagaaaaatgtttgtgtcctgtattcctcggtggcgtcattatcctttcattatttattcctattttttgctctctatttctttaaaaagaaatttatttctttaaaaaggattttcttttagggctgaaattacagtgttctacccctacccccactcattctctctcttcattcagagagaaccttatacctagtaacactttttatttcttcaggttgtccctgttagcggaagcacacacaggtagcttctccaggagtatttctggagcggtagagaagtaaagcgctatgcattgcgcctaagcagcagattctcttcctcttcagagggctcttgatcgtctgcccatccagatagagaaacagtttgcatttgtcttaagtagagtcataagtgacttttgcagtcacgtgatttgctttcattcatcaatttaccatggacagatttccaaatatatcacgtagcttaccggaagtggcgctggtaggtcataggcttcacacatctatgtcgtcctgcacaggctgtgccgggttgtgcttgaccacaaacatgaacattcgccagcagtcgtactgactaccaggctttgacatttgcagcagcatggtaaaaagttgtattaaaactagaactgccaggcagagtggcacacaactttaatccaagcatttgggagacagagacaggcagacctcttgggggttggagcctagcttggttgtgaatttcaggccagccctggctacatagtgagaatctgtccccagataaacaaacaaacaacgccaccctacttaccaaagctactcattatgagatgtgcgtgtggttcccacttctccctccttctccaggactaggaattgacctggggctctgtgcattcttcgtaagtgcttagcactgaggcggacatctccagccccgaactgtttctttcaggccccagagtaaagtgcattggaataccttgagaaataacaatataacaatgtttgtattaacctttatagcctgtagattattttctaatgcactgttgttggtgggctctctacattatacttttcagtcatagagaaataagagcagagtgtgctagactgccataggtccactgtgcacctccggtattgccactgcccgcaatggagatggccaagtgagggacaaggtttgctgtacccgtgtgttcttgttgaagggactgctgtttggagcagcagcattacaaggtcctaggaccccatatctccagataattgctgtggttgtcacaatgtcttttcactcggcattctagatgaaaattgccagttttcctttaagatttagaaaaggaaaggaggaaggaaagcagtcttactactgtgtaccgtgttacagagccccaaagcctgccctttaacactcacactgttgggcttctgttgtagaagaggcggtccagcaggcaggtgaagaggaagcgatacactgaagatttggagttcaagatttctgatgaggaggcagatgatgcagatgctgctggaagagactccccatccaacacctcgcagtcagagcagcaggtcggcagccaggcttgcgccgtttcatgtgtgctttcagggtggactgggaacttatgcctggaagccaagcagttcagtggcagaggtggacttggggcaggggaatgttctgctgatgttggctgacatgtcgtgggaaattcattgttcagtagtatcttaaaaagccctacttgctcaaattcatttttatacaaggcaatgatatgtaatgtgccagaggtttggagaattaaatgtctctgctgaggaagagtctgagctagactatgaacctctgagaattcagtgctgtagctcccggaaccataataaaccactcgagctcatctcctgctgcttggcaccgtcagaacccctttataaaattactgccttggagtacccagcagggcacactgtattttctgtgcaatgtaaatgatggataaaatagtttgtatgtagctcgggcagtaacagaattgattattgcaaagattttatttattcttttttttttgctcttactgtactttagttaacaaactggctgccagttgaaaggccctattaaatgcagcttggtgtttagctggcaatcggatctctattaaattgttgtacacagcctccgtaggacagagctgcctacagtagcagggcagagggagcattcagtccgtgaatatcggtgcagggaagttgctcctgaccggctgtcgcgcacaggttacttttccttagcagccagggaggatgcgttgtggcttgagggactgtgcttctctccgtaattaaccacacagtcaggaagtcataagcacagcccttcctttgccttgctgtatgtagtgtgaggtttttcttgtttttagtaatttttcccactgttaactttgggccctgtggttgaaagggcaggaggcatgggcagaggggagtggtgctttcccactcgcgcttgcagcacaggtcagatggcttgccagtgggatcggctgataccactttctctttttcaggaatctgttgatgcagaaggcccagtggtggagaagattatgagcagccgcctagtgaaaaagcaggtgagcggcgccctgtgcaaagatgaggatcccatggggtgatcgtccaggtggtttgctgcatactgccctgttaagatgccactatggcgcggggtatggtggtgggtgcggaggatcaggagttccaggtcagctgtttcttcatgtgaccatgtctcaaaaaagtaacagcaaaaagacaaacaaataaaactaaagaaaagcccaatggctacattatcataagatgaagtgtctgtcgggtgatacttcgcatccccttggtgattgattgctctggaatgaaatcaaaactccattaagcaatgaccttaagatgtatcaacctttgtaaccctatttggagaagtcaagaaactcaaaagaaatgtttaagacttccagaggtacagacaaccttttccatagaaaatgctcccaagaagaccttgctcgggagctcccaatgccctcatcaggctcggtctgttactggggcaagcagacgttgtatcacgctgcttacaactttttgcataaataacttaatatgttgaaagtatctttattaccgatacagttcatattgataagcaaaagtgcctgccagtggcagcaggtaagctcgtggcccaggcgcgttagaaagaagaactccattatgttctctaagcactgggaattctctgctccgagtcagttgccttcctgcccagattgggaaatgctgagcttgtatctccagaaagtaggtactgtggatatacgtcagccaggcaagcctgagtagttcttcatagcttttgaaatgtagagcaaatgtgatttcttttagtaaaatgaatgcaaggtatagtttcccagtggccaagagaatcatggaacttagatgctgtcctaaagtttatcaactatcagacaagggaaaataaagacagacagacagacagacagacagacaagcacgctaccagcaacaaaatactggtgagcacaggcacttaacacaattgtttctgttaatgtatcatcggttggggctgaagaggtgactgagaagtcaggagcacttcctgcttccagaggacatgagttcagttcccagcaccctttttgaatgtttcaaaatgacctgtaacgtaacgccaactccaaatgatccaatgccctctcttgacctgcagtcatatatgtgcacgcacacatacataaaaatagaacttgtattttttaaactgagagcttattgagatacccctgcaccaacagtaggcttgcatgtccctcttttctcacatactcaggatttgcacacttattaccatatacactacatgctcctataaaaactatccggagcaacaagtcaacgtacttcaaatcgggtgttgaggtggagtgtggaggatgcagttggtaactgagtttgtagcttcatgccctaatggatcaaatgataaaaaccaaggcaggtttgtcacgtgttggaacagacacgagcactacttagctcgttacaaaggctgccttttcctaatgtctctagaactgttagtttgtgagtacagatatatggtaaaatgtaaatagttggcatgcttcaaagagtggtccccttcactggactggcgctacttgaggaagatagctgtgttcttggaatgggatgcactcatgtctgttgaacttgtagtacttcggcaggcatacttagcaggcttagagctgagattataattaactctattctccatagctagtgagattgtacctgatgcggacatggcttttctttctgttttgcctgcttcaaagaacttagtttttccccctctgcccacctttactggcaggtacctatggattacaaattgatattacagccccgtgtggctcgctgtaaggcattagatgtcattgcagatgtatatgaagatggaacatttattgaaatggctctcaacctccctaattcgtgaccctttaacacagctccttatgttatggtgaccccccccaccagaaaatttttttcattactacttataactgtaatcttgttactgttatgaattgaaatgtaaatatctgataagcagggtgtctgatacgtgacccctgcaagaaggttgttcaagcctcaaaggggtcatgacctgggttgagaaccactgatttattggcttggtgaatgtgggaatggagaaaattggtaggaaaagttctctggaagacaggaactgtctgaatgtaaggattgtagagagcccacagatgctcatccgctgccgccgctcagaggctgctaaaactccatcagaagagacagaccattaacagccactaactttttaaactgcaaatgttctcaacattcgttgctttaatttataattgctataagtttatcattttaaaaaatgataacaggggacaatattgcacgtggaaagaaaaagaaatttgatattttcctgtggactctagctgtgcttcctcttactatgaataatttaagaattgtctcccagggagagccacctcagcttcacacaccatgacagtgggcgtggcttggcatttaaatattgtcctaaacacaagttaatgtccccaagacccaggagaggggtcttgtatatgaacattgaggtatgtttgaatgtgtgtgtagatatttagagtgcataggtgttttgttttccatatttagttatagcacttcctatatgccatctatctatagaaaataatccaagcccttttccttttagaatcataaggtcagaagttatcttagagtcagaatctgggtgtactatatacacaggagagatactatcccctaacatttatttttctttatttaacatatgttttctccataaggagttatattagattccaggataattgaacataacaataaaaaatagaacattttataaagttaaagtcttaactatagtctccagaatatctttattttctcactcagtactctgtaactcactatctctgtttgagtatgaaatatattagaccagaagcagtttattattcttctctgtatactttttcattttttgttcattatttgtatagttttgagtagaagagctgtctaatttagcaaggctattctttccttgagggtgcaggttatcatgtgctaacggctgtttcaggccacgttagagaactaggcttggctccttggtcacatgaacagtgagacaaatatgttaatatagccaaaacatcaggtttcctgtaacctgttaagattcctttacattcattcctggggaaggaaaagaatacccattttcaaatgtctattgaactcatgaaaatactcagagcactgtcaggttagacagtagctggccaaggagtgatctcagtgtttgtgtgtgtgcgtatgtgaagctgtgcgttatcaccctatcattcattgagtctgcagagtatggaagtttctgcacactggtactgtgggctgctggaggatggacaaaggagatgtctttagtgaattcttgtagagagtcatgactcagcattctctccgggaagcatgtgcacacttacgtgaaatgtagttagcagctggagttgaagctccacagaagaacatggccatgttttatgtgtagccagttaaacagaagacagcaaacaaaatttttgtttacttggggacatggcacacgcctttaatcccagcactcgggaggcagaggcaggtggatttctgagttcgaggccggcctgctctacaaagtgagttccaggacaggacaggagggctatacagagaaactctgtctcaaaaaaaaaaaaaaaaaagcaaagctgtgttatggttaggacctttcataagcccactagagtaaaatgagatgttcgtacgtattggccatattctagaatatctaggctttgcactggtgagaagcagtttaaaatgcacatttaattgaaactgataaaaggttggagggaattctaaaaggtctttaactgtggtttgagtgttatgtatggaagccagccggagtgcccttataagacatgtgccctctgtcatcctccacgctggctctcctgtttggccccaaccatgttcctgttcaccctcattttcttcaaagatctatgagaccacccagcacccatgtgtgagcctccaggcaagctcaccagctctcgtaggagcagaaaagaacttcctgacacgtgggtaaaggctgtttatggtttacatctttgctttatctgctcaaacattgtaagaaaatgacatattatgaatcctttcacactccaaaagcaaaagccaaaaggaaaagagaggttctaaaccatagcattgatgttgtcttcggtactttctggaagcactctgaccaccgaaagctcttgactcggcggacatgcatcgcaattttaacccaccgaaatgtgggattggaagtgttaattttatttggctgccatgtgtgtgagacatcttgtctgaaagactttaattgttccactgagtaaaactcaaaccatgagtagtgatgccccgagtcccaccataagagcaaggtttccttttatatggtttcttgtttagagttattaactatatggagaaataaatgtcttttaaatattttaaaacattacaaaacccacaatgtaaagttgccatgaggcagccaaaaataatacatatggcattcaggagagcagttgctaattggctgctgcctgagaaaatggtacacttggcgtctacttaacactgcgggtttggcagccagccaggcttggggtcaggttgttgtgaatgaagctgcatgtggttagggaggggttaaaatgattcatgccatacaatcacaagcgcgttgagtggagcagcgtgcatgtgcctgagtacgtcagtccccacggcacaggctgcccaggcttcctgtgcgctcctctttccagtcaggccacctcaggcattgtgtccccctgtgggagtatgtggctgcctttgaaatcgtcggtatatgattttaacgtgtgtacctcaatcttctttcattgcagaaggaatctggcgaggaggtagaagttgaggaattttatgtgaagtacaaaaacttgtaagtaaattgttcctcctttcagcggggaagggtagacctggagtacaggactctttaagaattgtgaacatggagagtttggtatggtttctttgctgcctcagaaaggctgtttcctcctaactttgttatttgtagtactttgcacatgcttttctagaaaatatttagtgtgtagaagttgactaattttcttatataagcaagaagctcatcatagatagaaacatctgatgtgatcatagtgaaataaagtagaagttgactgtcccccaaagagtggctcttgctcttcatggttgcgcctctccctgcatctgtgatgagaactctgtagcccctcagaggccccgaggcccaggatgctctcgggctttgatgcagtgagctctggctttatgtgcattgctttccaatatttgtttagtgggtttagtttagtttagtttagttttaatctgaatggagaaacacagctgccttgagctgtgtcatgggatctgtgtgctcactttggcaagtcagtgtggttttcaggattggtcactaccctcccgaagaagacagaggcccttcctaaccagacacacagctaaggacagacacctttgctgaccacagatctgttctctctgctttgctcctctgaagaagacatatgtaaagcccgggtgaatcagtcctgggttttaaaggatgatttttaggagttgttgtgaaaacagcctaagaaagtacattgccccaggaaaatgtcaccaccgagtgccatgtttctctgcttttgtccctttggtctgcattgtgtaaatacagggtcactcttctgaggaggtaagcaaaacattaagtaaaaagtctctctcagtcttactgtgagagtcagtgaaatgaagtctggcagtataaaataaaatgcacaataaatgttagctgccatcagtattgtgtcctcatggtgagtttatgtctaagcacatcgttcatatgaggtgatttcctgtggggaatccttaacgagagaagctgaataggcaaagagggggtaacctaaatgagttgcagggggatttcccttgggtgtgtcaagtcagatggaggactgagggttaagtgttgattgacatgtaattgcaccaatagatgacaggcatcagagacagagtgggtgggacccaagggttgccatccattcacctgtgggaagctccaaagacagtgtaggaccctgtaccagggactgctgccaagccagaagacttatcaaacaggcaacaagaagtttaagggaggactaagctggtttcctgtgcactattatggagatgaaagagaaattaagctttcaatagaagtttttattaacttgttttgatgctaactcagatttgtaagaacgttgcaaaaattgtagggtggattttttttattgtgattaatctatatctgaaatacttggagattgttaaatatggtaatgtttgctaagttggtggaatacttgggcctttattctctgccctggctaattcatagtcaggggggttcattttattgagatttgaattcttctctctggtagtagtatttattttgctcacgtcactacagatgtagtggtgggaatccctttaagctggctctgtcttttcccttatcctgtttggagctctggtgtcagagtgtgctcccagcttgtcctctgtctgcaagttgtaggatcagtaattagatagagaatgtaggagccaaatgtgggccatgatcttgctcatggctgccaagaagtcactgttggtagacgttgctaggattgtatacacacctgcaaacacatgtacacgtgatctttaggcacatgtagctgtttgttatatatatgtgcttacctctacctatgcctccacttgcctaacaacaaaacagtgccacccaactctcccacagggtaccctctgccctttctcctttcaatgggtagctattcccctcttcaatgatatgaagcttagctcttaccatctggttgttgttgttgttgttggtttggtttggtttggtttggtttggtttggtttggttttggcaaccttaaaatatatagaaaaggaattaagaaatcctagctgagctgctggtggtgcactcctttagtcccagcacttgggaggaagcaggcaaatctacagagtgagttctaggacagccaaggctacacagagaaaccctaatgaaaaaataaataaataaaaagagaagtattagctgagtttttgtttcagtttctttgtttaggatgttttatcctagtttcacagtgttagaggttatataccttactcaaaatccccttagtcccaaggtctccatgactttatgtttacccacacaccactgagttgagcagtgtcagttttcgatttaattttatcttcgacatctcctttgcatttttaagttggtgaaactattacaatgagtcagaagtcggagctgtatacacagatagtcaggtgagaagtgtcccttctgctgtaacctaccattcaatacggacctgcttcttacacttctgactgacgcgagtagcagctatataggtcggcatgtatgtgcacacataggtaggcatgtatgtgcacacagaggtgcacatgcgtttccctgtcttacaaggttgtatagcgttactataccttttgctcttccccctccttcagtactattctggacatcactgtatgagtctttgtggggtgtgtgctgccttttgcttttggtttttacggcttccactacatgattgttgtgcatctcttcactcttccacatctgtgaccttagcaatagcgtcttacattttgtagtgatagacagcgccacagtgatttttctcaggcatgcctatatattttttaaattgttggatatttaccattagggtgaattcctaaaaaaaaaaaaaaaaaaaaaaataggattgctatatgaaggcataatgtaatttaaaaatctcgtacattttcatttgtttgtttgttttgtgtgcacatatgtgagggtacatgcacgtatgccactgcatgtggtagtaatcagaggacagctttgtggagtccgtgggtaccaaggaccaactccagctgcgtagggttgggaggaagcactgtatcccctgagccatcatgatagccccatgctagtgttgagagatgaacactatacctgcatacagaggtgtcctcagccttcccagcatgctgtgctgccttctcagttttggtgacatttattacgttttctcttgactgtaagaacaccatttcataactttatgaccatcttttgctacgtctctgggtatgtatttgcgcatgttcctataactcattgtattggtttgtaagctctttaggcatgagggttatcctctcttgggccagaagccgccagggactgagttcactgtgctgttgtcttctcattttttttttaacttattacagcataaatgttaaaggcgagatggctcagcactcatgtgcaaatctgacaacctgagcttgcaccccagatcccacaaggttgatgagaaaatcaacaccagagagttagtttcttaccaacagtggtgtctgacctccactgtgaaccacctgacccaccccatacccccaatacatttaagagttctgcagttagatttattagtcttttgttggagcgggcttcccagtcattctcccctatattgctgggaaggtagaattagcccacgctttcctctagcttacccatgtttctttctgcttcaaagcacggtgtttggtgttcatgcttgtcaacaacagaggcccatcctgagaaacacaccatcatttaattccctcattgtgtggatggcatggcatgtccttaattagacctagatggttccggtcagtcattcagtatgatgctttgagtcagtcaaaaggtagggtaaagatgagctgtctaatgctgtcgccactgtaccatggcttgtgagtagaagttcactctaaataacgaaaaggattgcataccgaatgcatagctaggaacgtggttgttgttggcattgctattactgtatttaactaactatatgtgctatactttcatgaagttggtagcacagtaagtttctgcttgttaccacaaacacatgggttacgtactgttccgtggcattacaatatttatatcacctgaccatgggaagtttttaggtcctttataagattatgggaccactgtctgcctcatacaaagtctgtcacagagcacaatgttagatggcacacacccacagttaagtctttcctttcacagatatttgagatatacagcttgtgcaatagatctacttatatctatgtatcctctcttctttcttctctcctctgtgtgtgtgtacatgtgtttgcatgtaggcatgtgtatgagtatgcatgtacatgtgggtacatgcatatggaagcattgggagccttcaatcttgttttaccatattcattgactcggggtctcagctggacccagtactcgcctttctagctatccttgtcagagaaggctttgtcttgtgagctccggaattacatgtcagcttccatgcccacctggcatttatgtgggtttgtttttttctttagaaatccaaactcctgagactcatatcttagtgagggtttagttagtaacttagttaggctgtggcagaggtcagcgcctgcactggaggtaggaactgcagcacaagccatgaggaactgtttccctgtgttcctcatgacttgctcagcctgctttctcacagaactgagtgccagcatctcacagtaagccgggccctcccacatcaaccagaagtcaagaaagccacaacagactcttacaggcaatccgatggagacatgttcttaactgaggtttctcgtcccagataactctagcttctgtcagggtgacaaacagcaacactaacagaacaaccccacatcagaccccattcttacttggtatacaagcacatcggttattaaatcatagccctgtccttttcgttcatccctgagatattccagtattaaacattccaactcacactataaaaatgcaaatattttaaaagtttagtatctttaaaatgtccagtctcttaaaagcctctgtaaatgtccattgtctttaaaatagtacaaacgggcttaatggtagactctataagataagaacaatatctatacagttattttttaaaaaggcagagccagggcacagttataatccgatcaaagcaagactgaagcccagcggtgcagtgagttcagcgtcttacacgtgggattcactctagggcagtcgctatgctgtgacccccccaatacgggattcactctagggcggtcactatgctgtgaccccccccccaatacgggattcactctagggcggtcgctatgctgtgaccccccccaatacgggattcactctagggcggtcgctatgctgtgaccccccccaatacgggattcactctagggcggtcgctatgctgtgacccccccccaatacgggattcactctagggcggtcgctatgctgtgaccccccctaatacgggattcactctagggcggtcgctatgctgtgaccaccccccccccaatacgggattcactctagggcggtcgctatgctgtgacccccccctaatacgggattcactctagggcagtcgctatgctgtgaccaccccccccaatacgggattcactctagggcggtcgctatgctgtgacccccccccccaatacgggattcactttagggcggtcgctaatgctgtgacccccccccccccgaatacgggattcactctagggcagtcgctatgctgtgaccccccctaatacgggattcactctagggcggttgctatgctgtgaccccctaatacagctcctcagtctgcagtgaccacccaaccataaaagtaattttgttgctacttcataactataatttagctactgttataaattgcaaatatctgatatgaaaagatggtcttggggaggggacccttgtgagcaggtcatgggttcgtaacccacaggtcaagacctactaatttatgatcttctgggctctataggggctaagcagattttcgtctgactatgccatctggagtacacccagcttgtctcagagacgcagcctggctccactccatacctgttgctgtccttggtagtcagcccatgacaccgacatctccaaaatgctaagatctgtaatataactgtgtgctctcatcagtggctttccttaggctctcaaggactctgaccctgccacacggtgccaaagcctcaatttagctccacgatcccttcagtactgcggcttcttctgctattgaggctgcaccttcactcgtgtccttttctggcttctcacaacgctcagccactctccatgacccctttatgctttctaaactgtcaccacatgcgagactcttacacacaagtatcacatctagccttggccccctctgggccacacagcttctgcgtgctgaccttgaggaagcagttccaagaagacttcagctcagtgtggctggactcttctttatcacagctaacccgtcagccccaaccgaccagaactacagattcttaattcaaataccaaatagtgcaataatgtttaatgggctctcaaacctcccactgaaatttcacaagcctggcctccatcatctgcatagctttcagcggtcttatcttccaggctcccatagaacggctccgtgaactcttgagcacttggtggtctctccatctcagaatgcacctattaccacactcctcttataaaccacatggccaggtctgtcacagcctgtcaccccacagcctggtgcctgcatctgtcttagttaaggcttttgttgcaatggtaaaataccatgaccaaaaagcgacttagcaaaacagccattactgaggggagccaaggcagcactacagaggcaggagctgatgcagaggccatggagggatgctgcttactggcttgctcctcttggcttgctcagcctgctttcttatagcacccaggaccacccaaccatagatggcattgcccaaaggtcagtcttttggaagtattttcctaactgagattccctcttcccaaatgactctagattgtgttaagttgacaaaaaaccaaaacagacaaaagcagaagagcttgcatgttgagttaacacactaattagaagagggctgaggcctggaagacctcctgtggtcagtttctctctctgtgtctcagcaccagcttcctcaggagctgtctagtatattttaatatctggtatgtttcctagatgctccctgtttttaatgtttctgtgggtcttgttgcatatttatttttatacaagcagtcttctgtgaacttgtgtagttccacgattatgcttacttatattttctctacactgaattacacttacaaatttataatttagaatattgactttgtactgtatagaaagccgacaatccttttagttggttcagctctatgtttgtgactttttaagagtgtgtaaacatttcattatgcacatttgtacagtttgtgttaaattcatagctaaatcctttgtctttggtgttgttatgaaagaagttttatgcaagtctaatgccctctcattggctgtttttgtgaatgatgtctacgtattaactccatgtgccaactttactttcttttacattactgaattagttttctgaactgttggtgagttgtgtgtgtgtgtgtgtgtgtgtgtgtgtgtgtgtgcgcgcgcgcgcgcgtgcgcgggagtaatcatttagtctgcaaatagagatagtttatttaatagcattggtgcctacatgatattgtataatagtgggtatccatatcttccttacccctgacctttgtggaaaagtccctgttgcatctcttgtctgataagacctagcttcatgtctaaagcctacatacttaattatgttcataaaatatcaatcaaatccaagtatcctgaattttttattagatattttctttatatacatttcaaatgctatcccgaaagttccctatgccctcaccccgccctgcttccctacccacccactcccacttcttggccctggcattcccctgtactggggcatataaagtttgcaagaccaagtgatggctgactaggccatcttctgctacatatgcagctagagacacaagctctggggggtactggttagttcatattgttgttccacctatagggttgcagaccccttcagctccttgggtgctttctctggcttctccattgggggccctgtgttccgtcttatagatgattgtgaacatccacttctgtatttgccaggcactggcatagcctcatatgagacagctaagtatcctgaattttaaaacagcttctgtaagcgttaaatttcaagcaatgttgagcaccaataggaataattgtgtgacttttctccttagacatatatcaacattgtatactttaaaatagatttgctaacactaagctaactctattattactgtagtaaatcttactttcttgttgttgttttttttttttcttccttctccccatctgggggtgggagagactgtctgtcagatgacagcctgcaggagttggttctttcctttcacagtgtgtgtttcagggattgaactcaggtcatcagaattggtggcaagcatcccttaccactaagccctcttgctggctcatctgctgtcttcttaaagcagtatgggacattttctagcatcttagttagaacctttcactaacatgtggaaataggtggaattaatttcccttttgtaccatctttttcaacattacatataaatattatttaagtcatttcttttagaaaaatgtctggaaaggaaggttcgttttgcaaagtaactgcaagccatgtttttctaaggcttcctgaggttatttaatagtttatttttctcatagttgacccctccatgaacatttgtctcgttttcagtgctagctagtctgtgaggaagagctcttctgctttgttccttaatgaacaagagatggcaggcagcctttgattgtttccttcttctcctccctgcttgagcctccatgagttatcagtgtcgagggagaaagtggagtttctgacggaaaatttcagatagcaggtggcagagcagggccagcctatgccagcccatgtgcttgtgtccagcttggagcctttctggtggcttcatatgtctttgtccccttctctaggcaaaaatgttaactgcccatgtgtttcttctgtcaattaacccggaagtctggagtagattccttgtgttttctgattgtggttatattgcttattatgtactagaattttgtccaagttgaaagcacacagtacagcagttgttaccttactatttatgatagttagttgcttgttgatgcatgcacatttggtctgttttctgagtatatgttgggagttaaatgaattgatatttgtgtgaggcatttctgcttaaaatacttttctctttcacttaactttagtgtttaatccactgtacatttgaaaatacatattaggacataaatatcaatagaaaagggttttgaaagattctgtaatcaccacttaatttatgtgcagcagcatcttgatgctagaagagtcatagatccaagtatgccccattcttcctttcttaaagatgatggggctggaacccagaactttgcacatgcttgtaatatggtctgctgctgagctacatccctggcccttagttttctgaagaaaggatttttctgtgttacctaggctgatcttgaacatcctcttgtcttgcctctgcagttcaggtgctatgattttaggcatggacccatgtgcttagtaccaactttttgatgccgtcaccggaaagaaaaacaaggtgatggtagctattaggggcagtgatgggtagatggggcaacacagtgccaaaatatcaaatagcacaaagctgcacagcgtggaaggtgttgcaaaatatccgttgttcttctaaatctggtgcaagcagaagggaggatcagcggatgttcaggtccaggttaaggaaggaaaagacatctaaagggagacgttgtttcaagctcttagaagaacacaagctaatgacaggaatgatggttgagggtcatgggctggagccagagctgcaccgtcactcttggtggctagtcgtgctgtgaattggggacctactactcgcttatccccaaaggaattgaggctttaaatttaaattattttaacttgataaaacccttttatttctcaaagttaaaaggctcaagacatttcataattaagggtgccctgtagtgctcattgtttgatactgccatgtaatctgttaacttaggaaaacaatttgtttttgggctgttttctgtttgattgtttgcttttaagtttttgggttttttttttttttttaaaatgggtaatggataaagcccgaggctaggcagatagcaactttcagtactattacattactgattctcatttattttcaaatgttagtagctatgctggatgcttggcattatccattatcattaagtaggggtgtgtgtgtgtgtgtgtgtattctcttttgatgatttttttagtaagacataaattagatgatttctttctaaatgttttaagagtattcctttcctgttccagctcctatcttcattgtcagtgggcgtcagtagaagatctggaaaaagacaagagaattcagcaaaagataaaacggtttaagtcaaaacagggccagagcaaattcctctcagaggtatggaataacctgattagtttttgaattttgaaatgttctctttatcaaaatattccagagtttgaattttaggactttaagctgttaacaaggcctggtttggtactgtgacttggtactgtgacttggtactgtgacttggtacggttacttgcacattggttaactgatgctgctggaatttgtaaacaggaagtttctcattcttcctgttggctttgtctagaaaatgacatgtggaaatagcagtgacggtgtgattaatattgtacgatgagaatgcagccgagaaatgagcaaagtaagcagacagaggtctgcagagagcaggtccgaagcttcagtatggagggttttatgcgatggggatacgtggccattggtggttgctcaagtttgtgcctcttaccaaggtcacgaacagatgctgtgccattgcgcagagggtaggcagcgtctcttacccctgtcctctttgccctaggttattagttaaagatagacagagatatctaaccttctttgaggagaggaccagcccctgacatggtcagttatgtctcaaagatgcttttacaagctgcttagccggctctctggactcgaggtcactaacttatgttcaaatacaagacaagaagatttaaaaaccagcagctctctaactttgaaggagattacttgatggtttcttagctgttctccagaaagtgttagccaggcccaagcaggttgcctgcaaatgtgagtctgtggggtttgttccttccacaccgacaggggcaaaggcaaaaaggaaataactaaagacgtaactgcacataagctgtgaaggatagggttgtgaaatgctcctactggtcagcctttcaggtttagccttctgtggaggaggaagagatggaagagtcgagagtctaaggtcacgtgtgtgcttttctggagcatgttcagggtacctgcaggcaagcaggcaggcggcctaggatacctggcgctgctttctctggtctcagcctcctgccctgctgtctcaatagcactgagtgcttgacaccgggtggcttgggctcctgactgtgactcagttctctctcctgggagaacggtagcaaggctttttttttttttttttaagagtagtctgaaaataaacctgtgtgtttctatttcctgtgcccctttttatgaaagttaagctaaaatgttgagatgctgggtgaccagcatcagcagagagaggacccatgtgtcctgttgaccttctgtgaggcgcagcaggagggaaaccaggaagctccgtgggctttccctgtctgtaaatcagggccctgttcattcagtttacctggactctggctcctgtattcactccttagggaactgtgcctggccctaatatacagcctgtttctctgaacctgctgtccacatgtcacttgcatccaggatacaaagcaccctggtaaaatggcaacttagaaatcttagttctatctggaatcttagcaggaaagagtacagctctgtgcaccccttcctgactctgtctaggatctctggctatggctgctgttgcagtctttgctgaaacttagccttcctgactctcctgaacctacagtctactcagaaataacatctaggccaggaagcccatcatatgcctatgccacagagcactggaagagggtgtaggagagaacacgttgggtattggctatgaaagctcatgctggaaagacagtggtcttacagagggcctttgtcatccaggactagtttgtggagtatttttacggcttgtgttgtatataaataatatgtacgtgctaattgcctaaatccagcacttttggcaaagctaaattcatcagaacgttaacactttaaatcgaatacactgccgtagtgtattctttttcttaccgctcacctctgaggaaaaacggaaggcagcagaggcattttttttgtgtctgtgttgtttggttcatagttcataatccaaagcacccagggtggacattttaagtgggtacaatagccagagtgacagagaatgaggtctgattgactctaagctgcctttcacgtgtaagcattacagagtgttaactaagctactctacagcacgcgtaactgtgtgtctttgtttctgactcagatcagaaccttcacagatgtaggtttcttaaagtatgacgtggcctttagctttcatgggagcagcagtctgttcttccgtatgaaccagaatctgcttgaagcgtattctagcctcgtattctttctaaacaaacattgttagaatattagttaaattagttagtaactgtgtttaaggttactttggattcttttacctaaacactcacattcagtacaattaagttattggaatgtttaagattaatgggacgactgttattctatgtgaggtggtgatatcggttggcaaagatttccaaccatcccgaccatgctcacagaccagtgtgagacctgctgatttcagggttggtggcttatgctaacattctgtacgtggtgctgtgcagcgttcttagatgcgctcactagctagtatgtactgtgtgtggctctgactcttcactgcagactgtactttcaagaatgctaaatgtattgcatgccataggccttttggattgcccattagtgaattgtaatttcacacttcatttgaaatattcttaaacattctctcacagtagaaggcttcacacagtaattaaaatactcagttaacaaagtctgagaagtttgatttcctcacagggagtgattttgctaaattgtagcatttcaattaatataatagaagatgtcaaatacaaattttgtgttgctgtgacccaaaatcctgcctagtgaaaagtgaactactgtttctctggagacaggaacgagactttaagccttttcttccttcttgggaacagattgaggatgacctttttaatccagactatgtggaagttgaccggataatggactttgcacgtagcacagatgaccggggcgaggtaacagagatcatttgtgttaccctgggtggctcacatgtgttgacagaagggacaaaatcaaggtctgagcctggtcaaagcctccactaccaagcttctagtctgtgtttaactgaaacgttaaacacagaaatcctccttccctcaaggagaattcccactgactcagagcacccaaagtgtttccccttcagtcttccagactcatattcaccattgtaagtgactgagagcaaacaggatagtttttcccttgaagaaaaaacttgtctgtttttcactctgcaggcaactattcagttatataaacaaatagcttactataataaatccaaatcatgtaattgagtaattagattacataaaaattaacctttgatttggctttttggtattcattagctactccttaatatttggtcatgaaccaatgattcagataaaaagctcattttttttttctgttaatacccaataatccactttctagtatacactggaaatgaccactttcagtgcttatagttataaaatgtgggcagttgagtcttcccagtgctgggggttgtcttggtcagggaagcagagctcatgtcttttcctgaatatatagtatttggtcaaatgactttagttctgatttgtttgaacctggcccagcctgtgattcactacctggtgaagtggtgctcactcccttatgaagacagcacatgggagctgaagcaggacatagatcaaacaaagatcgaagagtttgaaaaactcatgtccagggagccggaaaccgagcgtgtggtgaggactggctctcggggaagggtttgatttgggcatagcatagtggtgtagtcactgagaaaccactaatggcatctactatatttggaacaggagcgacctcctgctgatgactggaagaaatcggagagttccagggagtataaaaacaataacaaactcagggaataccagttggagggagtaaactggctacttttcaattggtacaacatgtatgtaaacatgcttctttttactttcaataaatgctgtagctcatatcctttgtggtattaagaatataaattttaatgctgtaatacgtttttaaaattcaactgttggaatatacttaatttattcaccaaattaatcaatggatctatgtagaaatgatatctgtttgctgggaacttttctttgagatatattttgttgaactaagaaaatagctaaggtggtatggggtatgcatttatggagtgtatactctgtaaaaagagagtgacagctgataatcacgaagctttcctgtccttttctttcctaaaggcgaaactgcattttagcagatgagatgggtttgggaaaaacgatccagtccattacgtttctctatgagatatacttgaaaggaatccatggcccctttttagtaattgccccattgtccacgatccccaactgggaaagggaattccgaacctggacggagttgaacgtggttgtgtaccatgggagccaagccagccgtcggaccattcagttgtatgaaatgtacttcaaagatccccaggtaaagcggtggggtgtgacccctgtgcatgttgtatatgttttagagggttgaagactcagatctctatgacctggggatagaagcctcgatttcccttacttgagaaacttgcttgagatttcttatccaatgcatgtttgaaaattgtcctacatccatgaatactggttttagcatttgtcattctgattattataaagagtaacttaacatttaagaccacaaactctataacatattagtaacctagttctattttgtatgcctaagacaatgccacacacacacacacacacacacacacacacacaaaaatgatgctaaaatgtgaccaggggggacattttattgtcctatgatcagaagtgaaaaagtcattaagtaaaaatccaagtatgccacagaagagggagttagtgcttgctcgtgtaagaattgttctaatcttgtcttgtagttacctgcttgtagttattacctcttactggcaataaagcattatgcatgcatgataggggatggtatatgctaaaacatgtgtaatctttaagtagtagaggctgttgtagagttggtaacaatacaaagtgtgacctatagttaaaagattaaaaaatattgaaatctgtttttatctttagatttgagaaattataaggctcatcctctttggattcttttttaaatttcaaatattttggtattttacagaaatgttttaaaaaagaaaagaaaaaaattaagttagagaaacttaaaaaaaaattaacgttacctcagcattgaatttcctgttaggttctgtgggctgtgactagactggagcacttaatgtcactttattcacatgtgctctctaaggaaatttgaccccaaatttttctagtacttcaccagtttctttttaaaaggaaatgtttcaaagtcctactttaactaaaataactgtaaccagaaaacttgacaacagaatgtgccacctaaaatacagaggtctccaaagggttaaatacatatattttagaagcttttttatgctcaaatgtaggaacatagccagtcctgtgaaacagctctcacgtgctgtgccccccccccccagggtcgagtgataaaggggtcctataagttccacgccatcatcactacattcgagatgattctgacggactgtcctgagctgcgtaatattccttggcgctgtgtggtcatcgatgaagcccacaggctgaagaacagaaactgcaagctgctggaagggctgaagatgatggacttggttagtgaccgtggcggctgccgctgagtccctgcactgttgccttggtctctgagtgtgctgccttcctgactgctgtctgctggtatctcagtagagcatagtcatgataatttgaacaacatcaatttcaaatatttgccatgtcattaactgttgggccaagccttgcctccgtgatgacaggccacctacgtttcccagcacgtgtttttgctccagtgagggcagttgtacatgcacgctgttggttagtcggctgggacatctgttcagtttctgcagatgctgagaagtttgtaatattgaaggcctcacatttgctctggggttttaaaccacacttattttattttcccaaagaaatagccatgccttcctactttggtgatagaagatttttcttttctgtaggaataattatcagtgacatgttgtaagaatagcaggattttgttatttgttgtgcctgctgctgtgtgtacaatcctccgatagaagttgctacaagctcttctgtccttgaattccttcttgatccatagttttcaagttagtatggccatttgtttgtcccctccctccctccctccccctccccctcttgcatggatctgcttgtgtgttgaggttgcacacataccttggtgttcttgtggaagtgagggaaccacgtgggtctccctaccatgtgagttccagggagtgaactcaggttttcagaacttttacctgctgagccagctcaccagcccagcttctcatttttaatgtacatttgaaaaagcattgttatcctgtagaatgtagtggcagagttgagaacttctgtagatgtcttgttattgagagtggatgatgggaaggaaccttctgcgtgttcagggctgtcctaaagactggacctgctgaagagaacctcagagctctccgtcacagcttttgcaagggtttggcctaaccagccattcttttaattacaaacagcgaaatctaattttgcttaaaggaagaatattgactgatttttttttcttcctacttagggtagcatttcccattttattatcaaataaacagcttattaacaaggtcctagatgttttggaacgcagttcaccaaatttgatagccagtctgcaaagcagcatgagcatttagaaaaccagagaaagtccttgactagggttctgtagacggaaggactcctagctggctccggtttccctgagtgatactctagcagtgcagggaagtaattcgttctttgcaggtaaacacaaatgttcaggacctacctctctgtcttcagagcagaggtgtgccttcatggtcacccaccaagagacaggctgtttctgaaggcttaaagtcatggggctgagcttgccctaagttgtactctgttgttagtttccaggtctcaaaatagtagattctcattgtgaaatactccttagttagtgagagaaatgtgctgtacttctctcaacatcaaaacatttacttgcttttgaggtgttatagaaattactcttttattaatggataagaatctggcatagcagtaacttttccgttacatatcacaatatttgtttacttttttatgcataatagcacatagggaaattataatgttttcttcactgagctagacagggagggtgaggctgcccctcgaaatgggagaccagtcatggggttctgactgtcatagccagtgtgcctgtagcgtgtttaagataatgtactcagaatctccagtgtcctatctcagaagagatgtttttaaggtggaagatattattgttgttcaaggccaaaatgtccttgtattgatgcagctgagaattgctgactgcttggtgcttaagtcctaacttcaatgtcatttgagcctattctcttgccagagttacctagtgaggagccgtccaggctgctgtaggccttagggatgccgatcctcaggctagactggcaggggtgagcacatgcttggtgaagatgacctgcaagctagaagggaggattactgagtgtctgtctgcctctcctctgtaacgaagtcagagggaggattactgggtgtctgtctgcctctcctctgtaacgagagacacagagctgtgtcagtggtgatcatagttgacaacatcctcagtaagagctctgaaaggaaagccctcgacaaagaggggctatcctgaagttgttagaggtcattgactctgttgtctcctcattcattgacaggaggctccacacaaaactgtgttgctaaagggaaattaagcacactttgtccatttgcactaaagaaagcaatcatgttttcaaggcaggcgcagctctacctatccattgaactggaggctgtagtgcccagtagcccaagacaggagaggtcctttgctcaaataagtttcctttgaaatgtgcatacctaaaagtttgtaatttctaagttaagtgctcagaccttaagctcatgaggaaggagattcgatagctctgagacagtcaacacagcatggccactgttctttcactgtccgggatgacactttcaaacgctcttggataaagtcattcaggactttggctaatcagagatcacagccagtgaaacttaaatagtctagaagaccttgaactcatttgcagattgcacaggctttgtgagcctagtaatgatgataagccactcatctgctttagtcggagacttttacaagagaggaagaaaccagaacaaacccatcaaactgcctcccctcccgtttaaagtgcttccctgacagatagacctggtagagattgctcttacttagattatgtcactagggttcagtgagtatatgctctgtgtggtcagctttcaagttaaaccagaatcttattttgaaattactacatggctgcagtcacttcctaaaataaatttgtgttgtgcaccaggaacccaaacaaaaaagaaaattgtaaggcttttaaaatttgtaagctcgggtctaaggagcctaacgatcaccaaacaatacacttgtttgacccagcccacaaagcactgcataaaacctggcacggtgatgcattccttaatctcagcacctagaaggtgaaggcaggagggtcataagttcaagtccatcatgggacacgtgagaccctgtcttaactttttaaggacctggaggagaggtgagaggagaaattgcagtctggatgtaatgtatgagagaaataaataagtgaatgaatgaatgaaagataccattgttgatttcgatcagtttaaaaggcttccttatgttgaatgagagaatgctaagtagtaggtaggtaggtaggtaggtaggtaggtaggtagataagtaggtagataggcatctccgttgcttatgttgaaatagaaagagaggcttggttgaatcaacggctggaggaaggcgagcacaagtggaaacactggttgaagcaatggctaatatgtttcaaagaaacaaaattagaaaagcgttgaatttaaaaaaaaaaaaaaagacggtggtatttaaaactaagccgaccgctctgctagttgaaaatttttgccaaacaaaatggttttccacgtactgttgctgtttgaagcacctcttttgtctccgtcatgagtcaagcaggaagcagatggaaaggtgagagtcctgctgatgtagagaacagaaaggagcgtgtaaccgagtctggggccttcagaggaaaactaactacagcggagaaaaaaaaaatcactgagattgggagacttagaaagccatcctccttaaatctccaccttgcaaactcacaagaaacaggggcaagccctccagagtttgctgcagtgttctctgtgtctgcctgccctgcaccaggagccatgtccacgtgtctctgctctgaggtctacaccttgtgtacatgctgacccaccacagtgagcagaaatagactagagagagagagagagaaaagtgttagcgctgaaaactgctctgttcctgactggcaagttgtttccttcatgttcttccaggaacacaaagtcctgctgaccgggaccccgctgcagaacactgtggaagagctcttcagcctgcttcatttcttggagccaagtcgcttcccttcagaaacaacctttatgcaagaatttggtgatctgaaaacggaagagcaggtacttgacccctccgagttgcctttcagccatgaaactgaagatgaacttgtgaaatggccaagatttttggtctttgcaaattgtaaaaagtaagggttgtgttgtaatagttaccaccccagcaaagagctttgtgattccttctctaggacttgaagtcatcattacaaagttgatctcttcttgtttccttctcccgcatcccgcccccgccctcaaaagagccctttgagtttttatcgtgtggttactttaccaaggcgacttttagagatctttgtgccatttgggttagttttctgcagggtgtaatcacgggtagtgtcagaaacccctagggtttagagaactacctgtccactggaattttgggtccttggtctcattgctgagtcatactgcttcaagcctatttatttacatttcaaaattggaggtgcaactaccccactggattcctgaaagaaatcagagggcttgtgtgtgagaagcacttggcacctgtaggcactggtgtggagcatcctgtcagtgaggcagcagagacccacatcccactaattttaaaataaatgcattagtaagctcagaatcttggacttgtttgcccactctccagtctcctggcgcaaacctcctggttaagtttgctgttttgtttctcttctgtaataacaacagtacagtgccatcagtgggagagagggagactcctgctcggtttgctcattgatgcagagtagtatcctccagcgccctcaccctcgctgtacctctttccacaaaggaagggaagcatagagtccccgaccttgctcctgacctcttcctgtccatccccataaggatgggaaactaaaccagtacccctcccccaacacgcacttagagtttctcaagcccctcaagtgattcaggagttctcaataggtaaagttttctctctgacacaagcgacaactcacagtttagctccttcacattcttcctaggcttcaaagaactaaagatggatattaaataaataagacagccttccttttttttttttaaatgccaggatgttttaacacgcaagtgaatggagataccagtattgacttgaggtccttttttaggtgcaaaaactacaggctattctaaagccaatgatgttgagacgcctgaaagaggatgtagaaaagaacttggcccccaaagaagagactattattgaagttgagctaacaaacattcagaagaaatattaccgagccatccttgagaagaattttacatttctttccaaaggtggtggacaagctaacgtacctaaccttttaaacactatgatggaactgagaaaatgctgcaatcatccctacctaatcaatggtaagcctgctcatctacccgcctggagcccccgctgcccgtgcgtgccgaggctcccagggcgtgctcccagggggacccccgtctgtggttgctgaggttggtagccagtgctctctgaaagcaccatgccaccacacatcgccttcgtctgaaagtgggtatttgcaccaggaatagatgtcagcagggccaggccagtggctaaagccatgcctgtgagatgttcttgaagggagtggtgtgcttgattccaaagcagttaagagcatctccttgtgggcagcacccttgcaatcggaagacctttagggagtgtcccctgaaaatgggaagggattttaaagtttcgattgctgtattgtccctgttactgagaaggactttataaccttgatgttttctattcgactcccgcgggttaaatgccttacacacttccagaaactattaaggagatgtgtcccctgcctgtgtgagcacagccagtagggacgtagggggcgctgcctctgagatgcaagtcccaggggaagatggtgtatgagaccaggattttgccaggcaggacaagaaaaagaaaggtcgctgaggtgaagccctaactcaagcaaacaagagaacaaagggaccttacccaaagtatagcagtgcgcggcacagagggactgtgccccttagactcagtgggccctgctaggaagcagatggggtcacatgctactttggctccagacagtgggtggaggaagccacagctggtgtttgagctgagcgctgtctacgtgcctgaggatggacctcagtgggtggagttctcacctagagtatacagagcactgggtggcatcccaaaacaccgcattaagccaggtgtggcagcatcttcctgtcgtctcagcccggaggaggtagaggtcagagaatgagaatcaggaccgttgtcggttatatagaaacgttgaggctagctagccatttgggaggacgggctgaggaggggctgttgttcctgagagcgtgcctcagaaatgaaaggactagagactgaccagagccaacattccaaaaaagatggaatgaaggatagacagacaagcaaggagagaatgatcagctgaagggatatggctgtgatctgggcagtttgcactgtgatggcaggctaacccgggagtgttgaggtccgtgagggaaggagacaacctcccattcccctgcctcagcatgcacctgtccaccaccctggatgtccttgccaatggaggagaaacagtagtatccaccaggaggataagctcagggtatagaacctgaggccattgctctgctgtgacatctgtgaactcctgtttttaagtagtgtttcagtagtgtttgttttctaagagagcaccatgtctgatagttgcccgtccactgtgctagctaaccacacagtatttatgagcccatatggtgtccactagcctgtggctgagttgggactcagggaaagtactcgtgtatgaggaggacacacctgactatgcgcgcatacttttatttcatagcttatagagagaaaatagataacagcaacccccagcaggaaagaggagaaaaagagattacataaaggactcatggtgctgacgaggcctgtgtcacagacgctcagtcccatgacaaggaggactgctctgagcttccatgtccttcctgctcactctggttaattgtatgcagagagcattgccaaggctccccccacctccaaaacatagcaggggcccttttctgtatctgatttgtctctggagtcccctgtatagatagctcttcttctagagccccttaggactccttgaggtatttgtcctaattgtcatgccttgaggtgagctctcttgtcctaagaataaataacacagtgactgttagggaggggttcttgtacccatttttttggaaagttaaaaaaaaaaaaaaaaaaaaaaaaaacatgtacgttaggctcctagctccagagacagtgagacagtgtatctcatggacatctcagggattggtccagggccccactgcacactcttatccaggcttatccaggatctgtaactgagctctcatggagttatggctgtgtccaagtggcacccgcaagaaagtttaatcatccgtagtaagctgttatgaactagtcgtaagagaggaaagtgcaccaactggcctaaacttctattctacagagcatgtctttggaaaagtaggagcaaatctgtacattggtgggagtggtaagataagcttagtgggagagaactctggatggtgggagtacatgccataaagatgcatgtggttgaagagtgtctgcatatggtagccagagtccccggcaagtagcagctctctgtggaaggaggaaagctctactcttctttccagttgcctttgctctgcatacaagatgaatgcactaccagctgcactttaactaagtagttgagtttatcataacccatatccagttgatgttttcaaatctaacctcaaaggaaatctttaattgctaatttttaaattttgtcttgtgatacatggggcagaaattgcaactgtctccagatgtttgaccccggtgttcacgtcccatcccatgactcacaactgcttataacgctgtcttgggaggacctgatccctctggctctgcaggcatccactctcgaatgcacacatgcacacgtatgcacacactttaaattctaaaagttaaaggaaagaaattatcagtggcatcaaaaaggcaggagtgttgttttgctgcttcttaataaatttaaaattttataatgtgagtttagatttctctttgaattatttatgtttcaatttttcactaaaataattccagcctgcctgacatttgctttctcaaagtgaaagtctcatttttaaaagacaattccttgatcattaagtggttttaaactatattacacttcatttttatcccgggttgtatgcctcatagacaaagaatacccaaatatcatagggttaaattattcatttctaaatcgtaagcatcttatgagcattatacaaaagagtaaaacttactaaaagatataatgtgataattcactgtgagtctctgtgtgagcccaggagagctttctgaacctagtgcctgccaggtctccagaccgcaggcctggggacaccatcacctttagtcagggacactgtggcttctgtccttaacatggcatctcctccttatctttccttggtctgtttccacacttacagaactaatctgaatctcagctttttgttcttgtggaaggcgactaagggtcaggcccttccgagagagttggcattttctgcccggttcactttgtgaaaaggtcgtgcacctgtggaaggcctggcattcgctccaaacatcaagtggctttaatctgcccttgatgattcttaactcatctagtgttctctgtatgaccccatggggacagcctcaacaccaccttaaatggaagcaagactgtccttcactggcattgtgttgcctgtggaggtgccataagccgttacagtggccttcctgacccaacccgaccttcagacgcctttgggagatttctgtaacccacatcggtacgtcacatacagtgggaggaagttcctggcacagtataatggcaggaagtgagtgcttggggttaaacttggtgtgctttcgttctcaaaagcatctatgataggagaagagtgtgaaacccagccctgtgtactgggggcccagaggccaaggagggggccagatcacctctgcttcactccagccaaaggactggagcattgagagaagcctacctgccgctgcctgaacccacagcacgatggaggccgtagctgtgagccttcctcctcggggacatgtccttccactgagtgctctaccgcactctgtgagccttcctcctcggggacatgtccttccactgagtgctctaccgcactcaaacttctgcacagtgtagaacatcgagaaaggggacttagccaggaagccataggttgccttggttttcatctttggagggtttgggcattgctgtttttgttttactcagctgacacccccttcgcctgtagttcaggctctagcttttctgtaggtatttggcccttggcttgttttcgacacctatggcctaacagtctgttgttgaaatctgggtgtgttttgtttggttggttttggtttggttttgttttgttttgttttttaatatagtcagcaaacatttggtggctggaaaatgtggatctctctccaaactgcctcagtatatggaacttaaaactttggtccctttttaggcctgtggttatgtgtggatctaacttggagtaagcaggtggcttcctgctcttacatgtgaatgggatattctgattttgccagtttgctgtgggttttgaaagcaaatccattgtttttagtaataaaaacctcttacagtattcacgtcatgccatccaatctctgcaggtgctgaagagaaaattttggaagagtttaaagaaacacacaatgcagagtctccagattttcagctccaggcaatgatccaggctgctggcaagctggtgctgattgacaagctgctgccaaagctgaaggctggtggccacagggtgcttatcttctcccagatggtgcgctgcttggacatcctggaagactatctcatccagagacggtgaggccactgcatagaaacaacagagagagagggcaggatgcggtgtgagtcacctagaagtgacatttacagtagaggtggcagagtgggaacaatatatcacacacccccccctttcaaagccacagttatatataagggcatcttacatgagagcagggggcactgtgtactttttttttttttctgagacagggtttctctgtgtagcccctggctgtcctggaactcattctgtagactaggctgctcttgagctcacagagatccacttgtctctgcttccttagtgctgggattaaaggcgtttatcaccaccgccaggtatatgtaggtttctttgtttgtttgttttatgctgcatacttttgtgagcagtttttcttcatttcgttcaacttggggagaagagttcttacttaaaattaaaatgtattttatcagctgtttttagagtttagctgtttccttgaggaagtaaaacaaaactttaaatcttgagtgttctggcagttgtatggaaaacactcctgatttgaagtatttatgctaaatccttctattatgtgagtgcatattccatattggaatacttatttgaaagcaaaaatgagcgagcatatggtagctgtgggtcaggcctccgtgttgtatttccaggtacccatacgaaaggattgatggccgggtcagaggcaacctccgccaggcagctattgacagattctccaaacctgattctgataggtttgtgttcctcctgtgcacacgggcaggagggctaggcattaacctcactgctgctgatacctgcatcatctttgattcagactggaatccccagaatgacctccaggtaagtgggggcaggccacctgtccccagtgcctctcgtgacagacttatcagtcacaccagtgaactagtgtgtcattgcctttgtctcctgactcagaggatatcaactagtgatcacctgatgtgtgatatgagaggaaaccctttagagtgttggtatcgttccaaactgcacctttcattatttcaacaatgtgtggttttagaactaactagagagacatgtgtttcttttcgttcttttgttttgttttgttttgtttgttttttgtttttagagacagggttttgctgtatagccctggctgtcctggaactcactttgtagaccaggctggcctcgaactcagaaatctgcctgcctctgcctcccgagtgctgggattaaaggcgtgcgccaccacactcggtgagacatgtttgttgagttgatcactttggctgccataacagaatgctatgatggggtagcgtaaacaatatccatgcctttttcaaggttctggagttgaactgtgaggtctggatgccagcaagattaggttattgctgcatagacagctgtcttcctcctgctgcttcttacaggacactaatcctgttcatcagggcaccaccctcgtgacctaattacctctgagtcctcatctctaaatctaacattgagatcagcttttaacccacgtaattagggaggacacagacctgtgtgtgctccacagtcctgtgctccattgcagcagcctttggttccttttctttctaggctcaagctagatgccacagaatagggcagagcaaatctgtgaaaatctacaggctgattacaaggaactcctatgaaagggagatgtttgacaaggctagtctgaagctgggtctggataaagccgtgttgcagtccatgagtggaagagaaaatgccactaacggggtaagaagaaactgcccaggttgtgcgttcagtctgccttccttttgcatccagctaattgttaggaagtatttgacattgttttttgttgtttattttcttgagacaaggcctcactatgagctcttgctggcctggaacttgcagatccacctgtttttaacctcctgatttctgggtttaaaggagtgtgttaccacactccactggctggtggttttggtttggtttggtttggttgggttgggtttggttttggttttattcgagacagggtttctctgtgtagccctggctgtcctggaactcactctgtagaccaggctggccttgaactcagaaatccgcctgcctctgcttcccaagtgctgggattaaaggcgtgcgccaccactgcccggctccactggctgttttttaacctcagattctcagtatattttattgtattttcctttgttataagtaaactctcttaagacatttagtttgtgttttaagcctgaattactctgaatacttaaaatttctctgaaaaggtacaacagctgtccaagaaggaaatagaagacctcctgcgaaagggggcatatggtgcacttatggatgaagaagatgaagggtctaagttttgtgaagaggatattgaccagattctccttcgacgaacccacactatcaccattgagtctgaaggaaaaggctccacatttgctaaggtttgaatccaggtctttagtgcagccttctagaactcatgaagagaacttatgcagaacattggcctttcattgtgaattatagactagttattactttcccagcgcctcccaacacacacagcgttctctgtgcgctgggttctctcctgtgcggtccctcatggtcctgtcctcctgtgttcttcccgatgctcccgctatgaagtcctcgtgtgaattttgttcttcataatctcccagaccccagtgcccaaaacgacccgaaaagatgatcaggtcgctccatgtttaagtctgtcttgttttcccctttcgttagggctccacagctctgctcacagctaaaatgagcccatggcattctaccccagctcctgccactgcctgcctcacagctggcaccgtgtgctcttccaccaagccagcccgctaaggccaagctgctctgagccctgactgtcgcctcaaacccacttgctagtattcgggttgtccacaccaaggctcactctactttgtagttttgctaaactggtttacttgccgtaaagcatgaaattcaacactttgacatattataggctggggtgaccgttagcacaacgctaggttttgaatgttcctactacctcagagagctccctgtgcccattagcaggcagtccctacccttcccgcttcacccagttctgcaaaccgcatgctctttttttttaaatagctttgtccaccctggaaacaccactcggtgtgaagttatatcacgtgtggtcttttgagtgctttcataaaattaatgtttttcatgtttgcccttatactatacatggataatttgttttgttttggtttggtttggtttttccagacagggtttctctgtgtaaccctggctgtcctggaactcactctgtagaccaggctggcctcaaataatttattcctttatggtttgcaatgttctactgtgcgggtatcacacagtgaccaggtgatgataaatgctccagtcatttattaattgctaattgatgaaatttgggttatttttactttgggattttcagtgtagtagggttttttttttttttttttttggacatgtcttttcgtttctcttgcacattcgacagaagcagaactctaggtgatgttagctttcttggctccccagtgaggtctgtgcatgcttatcatttaaggaactaacaggctgggtttctttgtttctgtttctcttttaaacaaattggggaaagttctgggctccaaccccccccccccatcttcttccactggtcattgtatacagcatcccttatctaaaaaaaaactactgccttcagtggcccctccactctgcagaagccccttcatctgccttcacatcacataagacctattattccttctccccttttgcttaaaaatctcttcctgtcgtttcatgacggagcctacacacacacatatagcatccaggttcacatgtgaaacaaatgtgtttatatctctgagcctgccttagattgctccacaccgtggtttctggctccatccacttcctcgcaagtgccatgattttgtttttctttacaactaaataaaagtccactgtgtatagctagaacatcttcttttatcagttcctctgttgttggacatctaggctggttccatttcctgcctattgtgaaacttgggtgtgcaagtgtctctgtggtgtgttgactcagagaccagccttcaagaacacaatctggtggcgtggctgggtgacatggtagtgctatttttagtggtttgaggcgctccacactgacgttcatagtggctctgtgaattttcgtccctattggcaatgaatacgaattcctttttcactccatcctggacagcattccttgtttgtttgttttcttccaatttctgtttccccggtggctaaaactgttgaacctgttttctttctggatggatcacttcctgttgctttcccatacctgtgtgttcaggtggcttttccctcgtcctcacaggtaccatgttaactagtttgtgatctgtttcaagctgagctgtctgtggtgtgaggaaggagttgagctcccccgtggccccagcttgtagaggttcttctctggcctctgcacgctcatgtcgttacagtctcttgcagtctttcctcagtcctcacatgcagtctcagcatgtgtaagacacatgtgtaagacacacgtacgtgtttcacgcacgcatgcacgcacgttctccttctgagtaacatgcagatgccagagttggatgtggtagttctccctgccttcttcactcttgttgttcatgtctgctgatgtctacctctattaatttcaccttttgaagaaggtctttttaggaagtcttcttcatatttggtcattatttctggtgtaaactgctggagcagtgtgctctaacctcactggtggctgtcgctataacttctcccccatgcaactcgaggcacagccatgtccatattaaacttatccctattttctaatagctcctgcttcccctgggctagggctcagactgctaaccacacgtgcccgccccctgctccggcctccaccctcatcaacttgccatggctcctgtacctcgagcccctcatccttgctcctctcctgggcctttgtgcagggctctgccatgaacattcctgccacctctcttcttgtacaagtcttctaaaatatggtccaagcattttcttctagagaaaactaattttttttttagatctgctcctagcaggactttgctggaaccaagttccaggcctttctcaattgcttgtacttttctactcctgtggcaggtgtggaaaagtgtacatggggcacttgtcatctgtctcccatccactatactgccttgcagaggctgagcacgcatatactgtgactagataaacagaggctaccgggggtcctgactctgagaaccgcatctcagagtaacgcacacgttttccacctttaggccagctttgttgcgtctggaaataggacagacatttctttggatgacccaaatttctggcagaagtgggctaagaaggctgaattggacatcgatgccttaaacgggagggtgagtgagaaagtcccatccagactgctgcctaatctgacccgaaggttggtatgacgctcaccatgcttgctctttcgttagaacaacctggttattgacactcctcgagtgaggaagcagacccggctatacagcgcagtgaaggaagacgaactgatggagttctccgacctggaaagcgactccgaagaaaagccttgtgcaaagccacggcgcccccaggataagtctcagggctatgcccggagcgagtgcttcagggtagagaagaatctgctggtttacgggtaaggccggttcgctgcatggagtctcattttattttaccaacagctggaattctcagttgtcataggaaaaccttctttctgtggatctgcgtggctccccttagcgtggccagacagatacctccgcactaactttctgcaggttgtggctcgtaaagtcgatatgacccacgttctaaatcctcctgggtgtggagagagaagccactggaatttatgagtgctagcttgcaccatgggaattacgacagttctaattattaaaaactaagaatgatgtaaaattgcaaaatcttttggcagtgtactgtcacataaactttatgaccatagtcacctttaatagatttctgctgtaaaggcttagcagaggcagggcttccttcatgtgcctgtcctccagctagtctgcagcctcagagcccatctgaacgtctccagtctgtgggcttccttctgctacaggacgactcccacatcagcttcccatcccatgtcccatggcacccacgtagcactttgaatcgcagggtcctcagtaaacacctgaatgagtaggaagaacgtgctcacagatcatggggctgtagacagattccattaaaacagagacagccaacagagcacctgtcactggttccatgttgtcctggctatggcctgaggcatttcttccaatggctccttgctggtgaagggggggggggggcgactggggggatagcacatgtccgaggcctacagggttctgcggctgacacttgtctgtcggaatctttctcatgggtgagctctgtttgggagcttagcttccactaactcccctgtcgcccctacccttctctgtgtgcccccttggttctgcctaggccccgccccctcctacacaggtgaccagccttaagcctgcctccgctccgcgcccctttgcactctggcctgcatgtctcatcattctctctcctgatggaatcccattcagcatttccagaaggacaggagctctttcagtgtatcctcagtgtatgcgccgtgccacagatacaccgtgctgcatagatgtttgtgtgccagctgtacactgggtagctcgccggcctctacccaggacagagacttacccctgtacctttgcccctgtacctccttccttgtttcggcctgatgatcatagatacaaactatgttggaaaccttaggactggagcatacttataactcctaggatgctcatggcgtctgtctttcagtcaagtcctttcctcttcccacttctactgttatggattaaacaaccaccctgtggtgggcactcagataccagagctaccactgagcaaggctggtatagcctaagaggcaggtgagcaagcaaaaatgtcagtagcctatgaagatgaagtgacaggcagcgcctggctaagaggacacagaagctcagcacattcccttaagacatagggactgccctcacgctttgggggcgaggaggagtcacagagagaatctgtggctgagggacatcagaaatgtgcagatgtgagaaagggagggaggagcaagcccgaggcctgggtctgggagaggtcagaacagccaggaagaaccgtggtttggcgagaggcagcacatggcagaggattttctctgttctcgaagcacgactctcagctgttacagaaagcagcagagaggctctacattgtgagctctgcctggtggggaaggcacagctcaggcggcctttgagcccgtgtgttatgtagtaggtatttctgagaccgagcagtacgacggctgtttgtgtggctgtttgtgtgacagtggtacgtgtgcttttgtttcctgcgcttagtccttcctcctggcatttttttctgggaggccctgagacttggtccagcatcttccctgagctggaagtagccattccctgttgaaaaggagctccagggcttttagcacttcactaattactgaggcatttgagatgggttgatgcagcaggacccatccgcatgtagctttgatttctagtagtcacacagacttaaagtcatccttcatctcaaaaggttgaaggaagacagatgccagggtcctctggttgctcgcatctcctaaaaatgacagccgtagctaccagcagcctaggaacactattggcaagcaacatgggtgtcagggctttgtcgttccctctgtgcggaggtgtcgtacctgtgcttctttcctatctctagaagtgactagtgccgttgtgggtccaggatttctcagtcccagaccctggctgtcaaggtgatgtcacatctatatagtcagagattccatctgcatgccaccttttttttgctttctagctggggccgctggacagatatcctgtcccatggacgctacaaacgtcagctgactgagcaagatgtcgaaaccatctgcagagcgatcctggtgtactgtctcaaccactacagaggggacgagaacatcaaaagctttatctgggacctcatcacacccacggcggatggccagactcgggccctgctaaatcattccggtaggtctgtcttctgttctttgtgcttctgggtcacaaaaggctaccagaaacaccaccattcggtaaaaggctgcggtgtagactcttactctcccactgggccttacagtatctgcctctgacactgtaatgtgcactgtaaaggcatacgtgactgtgaccctggtgcttctaggtctgtcggcccctgtgccgaggggccggaaggggaagaaggtgaaggcccagagtacgcagccagtagtgcacgatgctcactggctggcaagctgcaacccagacgccctgttccaggaggacagctacaagaagcacctgaagcaccactgcaacaagtaggtaccaggcggaggtgggcaagcgtgcagagcgcctgaggtcagcaagtacatgtgtaccgtgggaacccgtttgtaagagagcagtgtgtcatgtgcagagtgccccgtgcttgtcactgccatctaagatggacactcagtcatccagtccatcctggactggctgctgcacggtgaataccccacagtattcatcccctattctgatcgtttcatttggtctggcacccatgcttcgtccgtgttgtaggtagtgtcaggatcctcttgtccgataaatgctattaagctctgtgtacgccttactttgttaatcctttctcatcctctagtggacatctggactgttcccacgtttacctgttacaacctcgctgtggaattgtagatgattggtgtggggctaacgtgtggtagacagacaattgcaggtcctcttgtaggactccacctttcactgactgcttccatcgttagcactggggaagtcacatggcgctttttgctttagttttgtctctgttgctgtgtagacccagctggctcaaagtcacagagctccttctgcctcagccacctgagtagctaggatggaagggatgcagctgttccattttatctcccgcttatccacaaagacgaaggtctctaacgagagtagtttacctaaggtttctcagttcagaacccagtgggacttggtggcacacttcctttcccccatgcccacctgaccacagaagtctgactctttgcctccgggctcttgaaagggtcaccgtgatccttcaaagcatttggtgtctgtggaacttgttactgtcctagcatggtgtttcatactaaaattgtaacctgatcatcatagctctcagaaaatgtccccgtcttcatggtttaccttgttttgggttagttgccttctgggttcaagattcaaacagaggaagttaaatggtttaatgtgacatgccagcatagctgtggtagtttttaattcctagtctcctgtcagcagcagtcttcatagggagccctctgcagttaggacacgtggtggaactggggctctttgaatatctctttcagtctcagaaaaccactgttgataccttctagcttttctctggagtggaaagtgtcccattgtccttggcctgtagactgtgccttgagattcactcttgtcaaatgtgaagagatgttgctgttaaggtagaaaagtgaggccctagaaggacatcgtagagaaaagatgaccactgctcctcacaaatgggaagcttgcaagaccagacagatgaaggaagccgagtgggggatgttagtcccgtgtgcagtcctggtctttgggttgcagtcactggcaggatgtgtgagagagtgtggaccagccccaggggcacgttagccaccttgtccctccgtcacggagtggactctctgagagtgggagctgtgtcctggccatcctttctcttcctggctttccctctagaagaaaaggagatgctcacatcagttcatagaaagctccacactactaaacctgccccgaaatggaagtctgtgttttctaccaaaaggaaaagaaaccattaggctccctgccttcgagtcaaggaaagagtccatccacaggtagaggagatttcctttggaactactgtttctgagcacccagtgtaagaaaacactggcctgcggatcctctagccagaggaaagcagtgctaactccatgttccttattggttcagtgtggcaaagtcagtacctgagcttacctgttaccaggagaaagaaaactgaaaagaaaaaaggcattccccaacatgactgcatatcttggcatgcattttaatatttgcaaccttgcagcctatccaaaacctatgttggccatgggtggactcttggggtagacagcgcatctactgatgcctggacaggactagtctgttttagtaagactgcccctgcttgtcattttgatgtcttagaggcaagtcgccgcatcttgggagacctagatctgcatgcttgtgctcaaggtgtccctgtgaccttgggtatataactcgtcctctgttaccaacagtgttcacatctgtagtgtggaaatgagaacttgcccatgtcatcacaggttattatgaagaccaagtgagccagtgtatatagatgagaaacattggtacaggggtgttatacagttatgtgacaggcttattcagctagggaaataacactggaagaaaccaaccttcaccaagaaggtcatcttcaggtgtcaatcaatcccatatgcacatatgggctgtagtaaagacatgacctgtgtggtataccaggtgagttttatttgtgggggtggggaagtcacattttagccattgaggagacacacccaagatggaaaatctggtggcctgacagcatcaccagtttttagtgctgattcattaaaaatgagtatcagtgagttggataattttaatcttgtagtgtttattatttttaaaccacaactaaggtcccctgataatataagtagaagtaatagaaatgtttactgttccctgagtagggtaaggacccaccccctgcccactactctcaccatcttcctttcttggaagcaaagttgtataatctgaaaaacctgacattccatattgagggtttattgtaaggtagtaaaaccagattttatatctcgtttattcctacaacttctgatgtgcttccaaaaatggtattaaggcagcagctgaggaaattttatgagataatgaagcagaacagttactgaaagccatctgctcggttgtttacaaacttgcttcaatacttcagaggcagtggtagggtacgtgtctaaacttcacaagctgcactaggtaggtctaagtgaagtgcgcctgggctgggctgagctcactccctctctgtgcagcgtgagcggttgccaggcaggcctgttggaagccagcagaaagcaccacacagaggtgattatgtggcaccatctgtcacgcttcaagcctaccatacagcatggctaatcagggttggcagtatgatggatgaacagcagcagctgccaaaagccactgttggcaaacagcactgaagttaagaacttttccccccctctctcttcctctccagggtcctgctgcgtgtccgcatgctgtactacctaagacaagaagtgataggagaccaggcagagaagatcctcgagggcgctgactcaaggttggtgcaagcacacgtttgttcaggcctccacaggccagcccaggtggttgggaaactctaactccaggcttgtgctcagaaccctcccctcgcaggagctcacctcctttctgtgtttgtcctctgggcctggggatgggaggaagaggaggtcagggccatttgcatgtgcttggttgtaagagggtgagaaacaatggcttctgacctagctggcatactttgtgatgaggctcatttctggctactgaccactgccccttccgtgctgccgattccttcctacatggtgggtgtttaccgtgtaggactagggttcattttcagtgctcctatttaaagagtgcttcaatgctgtcttccagtgaagcagacgtgtggatccctgagccattccatgctgaggttcctacagattggtgggaccgagaagcagacaaatccctcctaattggagtgtttaaacatggtaaggggcctttctgtttgagcgcatcttgactgtgtggcttcatctttatttagaactctttgcgtactcttttccaaagtcataatattaatgaggaccgttccaaaggactcttggcgcctaccatttttctgtactaaaaatctaatatgaactgtaaatatcagatgctgtttttgaatgtttgttgagtgtttgagaagaaaacatttctttcttggctgtaaacagaagtcaaaccatatttgttttagtaatagccaagtcgtaccgtagcattcccgaaactttgcttctggaacggttgccctcgctaactctgccagcccgtgtcagagtggacggtggtcttaacctctgctattaatctggacaagtgcctcctgggctttgttccaagcaatatttcacaaatgtcagtgctgaggactcacggctcccccgagtgggatgtagccttgttaactttgaaaggctggggatgcagaagtgctgtgatatatacagtgagcgactcctgattatagtcccaattgtctggaggtcctggaggtattctcagccgcccagcctgactaacggggagaatgatggcttataaagcctttcatgattacagtttggcttgcggctctacggcagttaggagcggtgtgttgtagtacacatcctaattgaattgtgctgttgctctgtgtactccagccgtgttctgtgagcccggcctcagaatcacttccctgcagtgcactgttgggatctgccatttcccatctagtcaacttgggcagtcaaaaagcaaattgcagtttgaaaaccatagagggaacagtgtcatcttcctgacatgcagcatcataaacctaatgagacaggttcgctggcctgccttccatacacgggcattttcagccgcccatgtgagttcctgcaggaccaaacctactgaaggtggggggagggggggcctggagaacccctgcagaggtcataaagaaacgttaggaagccttttaaatgtcaagcaaaattagatgttggggaagaatagggtcagaacccctccctggcatcctgcagttatcctgagccctctctgtctgtgtttgtggtgagtcagtggcacagccagggtataggggccacaaaagctgtcctaaagtgctgcaccaaagcaaggtctgtttagctcgccacaaatgatgtctgggagacaagctggctgtgctgtggcaggggctgtggctgtgttctgacagtgacgggtcttcctttgttgtcacgcgtgtcctctgtgtgctggtggctgtggcccaggctatgagaagtacaattccatgcgagctgaccctgcactgtgcttcctggaacgagtcggaatgcccgatgccaaggccatcgctgccgagcagagagggacagacatgctagcagatggtggtgacgggtaagaaggacattctaaaattttaataaactttatgtcagcatcacatctactggcaagagttggttcttatgctgaacggggccctctcttacatctggtttgaatttgatgctaccagtaggttctgcctatataccataggaactattctaaacaaagttcacacacacacaaataaatgaaattgtctcgtgatcaccccctcgccaccccgtgtaactgctttctgaatactggtagagtccatttgcagtgcagacccagacttggtattggggaggttgtccctcttccactctctctccctacagactgatgtgatttaaaactatctttctttttttttttttaattttatacagtggagaatttgatagagaagatgaagatcctgaatataaaccaacgagagcaccattcaaagatgaaatagatgtaagaccttaggtgtattggcttttacagtgccagtaacaaattatattcccatatagaacttgttaaactttatagataatggccttcctctaaaagacaaagtaaaatccaaccccagttgaaagtagctctgtttctcacattgctttcaaggaatttgcgaattctcccgcagaggataaggaagagtccatggaggtgcacagctcaggtgaggctccagggcagctgtagagcaggggacaggttgggcagcccgagggctggcagctggaccccaaggctgatgatagcggcccgcgggtactcttccacatgggcccttcctttgggaatagtggtgatccttatttgtgctttttacttccttaatttcttgggtagaactttttgattaagataattgatctgctcatttatagtcattatttagtggaaaaatttaaagtccttagaatacttttattgagaggagggcatttgtttaaatctgaaatatttctgtagactattgacccaacataaaataattgttatgttcaagattgtcgtcgtaagcatgtttacacgaaagacctgttttctttgtgtaagattgataaaccttcgcccctccctagaaggacttaaaagtaaatagtttatacatcctctccacttttactgcttgtctgcattttcagatctgagtatagcggggtggcctctctcaccctgtcctctgagatctaacgagtcatctctctttttgttgttgttggaaagttgtctgtgttatgagagatgtttcagactctttatttccacttcctcaggcaagcacagcgagagcaatgctgagttaggtcagctctactggccgaacacgtcaaccctgactacgcgtctgcgccggctcattactgcctatcagcgcagctataaaaggcagcaaatgaggcaagaggccctaatgaagacggaccggcgcagacggaggccccgggaggaagtgagagcgctggaggcggaaagggaagctattatatctgagaaaaggcaaaagtgagttctccaccttttttgaagtgtccccacccccatgccccaggccttctcttcccttctctgctgggtccccgagaagtagtgatcaaatcacacagtgacagtaaaaaaaaggcctggcgcctggaaggtgtctgtccctcaaccctaagacatgctctgcgagcagaggaaagacagcgccctgtatgcccttctgagcacagtgtgagccagatctttccgcaggtggacgagaagagaagaagcggacttttaccgggtggtatccaccttcggggttatttttgacccagtgaaacagcagtttgattggaaccaattccgagcctttgccagactagacaaaaagtctgatgagagcctggggaagtatttcagctgctttgtggccatgtgcagacgggtgtgtcggatgcctgccaagcccgaggacggtaggtacacgaatgaaagacgagctgcactgcgctaggcaggtggcgcggtgcgtgcaggctaaggtgggcccgggacctgtccacataacacccatgcttcatgttgcagagccacctgacctcgcctcccttatcgagcccatcacggaggaacgagcatccaggacactgtaccgcattgaactgcttcgcaagatccgagagcaggtccttcatcacccacaactaagtgacaggctgaagctctgccagcccagcctagatctgcccgagtggtgggaatgtggacggcacgacagggacctgctggtgggtgctgctaagcacggggtcagccggacagactatcacatcctcaacgaccctgagttgtccttcttagatgcacacaaaagctttgctcagaaccgtggggccagtaccgtccctcctttgaatactctggccatgggctttggccagactcctccagtcatttcctctgctcacgttcacgaagaaaaggcaatggagcaggctgaaggcaaggcagaggagtgtgaacactcaccggccaaagagaggtcggatgggaaagaggaggaagaagaagcaggcggggccaaggatggcaagcaggaatgtgaggtcgaggccagctctgtgaagggtgaactcaaaggggtggagggcagtgcagaccctgggtccaagtctgtctcagagaagggctcagaagaggacgaagaagagaagctggaggacgatgataagtcggaggagtcgtcgcagccagaaggtaatgcctgactccatcactgtcctgataccacagcagtggtgcagagccttggtgtgacgccataacttgtattttatttttaattgagaaatccaaaatcttccttcatagctcaggctggcctgtggctcacagacccgcctgctcctgcctccagagggcggggattaaaggcctgcgccactaaggccggcgtctttgcgttgtaaagaccattgatggctaggcctggtgacacacactttgaattctagcataggttggttggtctatatactgaagtccagagctatgcaatgagactctgccttttcttttccccctaagagtaattaatgtccattttcttctgtgaaggaatagtttcaattatgtgtacacgtgtttgacctcatactttatacctgcaaacatatttcaagaactgtaaactcgcagcatctgtgaacacaccggtcacttccggtttaaggacattcatagtcagctgtgcaagaattctttgtaatgttaaagttgacgtgtgaatatgatgggagagagtcactcaccgagcaaatagtatttcagaataaatgatgattcattggttggttggttggttggttggttggttgatagcatgttttccatgttacagattgctataaccaacacaaagtagaaaccaggtaccatgttgaactttgctgctgcagtggcccttctttattagctaatatcttaaccagaacagaaacccttgggtcagaaacatggctagccttcagcaccaaaagatttccttagtgtaggggcacgtgcttcttatttcagcacctgggagtagagaaaccagaggatcacaggtttaagcccagcctctctatatagtgagtctgaggaagtcttgggctacatatgactctgtctctatatgaccacaaaggaaagatttccatggcttcttcatcaagatggaagaaacaccatctatatttgtgggctgttttgttgtaagttttagacaagacaccccatatctttctagatgtacagttggcatgcaggaaagcagagctgctaggtggtattcctgttgtcagcaccgtcctttgtagacttgagctccgtgcattctggctatgagtgctgcacataactcatttcccagcaggagccgtctcgagagggaagactttcgatgaagaaagcaatgcttctctgagcactgctagggatgaaacccgagatggattctacatggaggatggagatgcttcggtggctcagctccttcatgaacgaacatttgccttctccttttggcccaaggttggcaagattttgttactgtgattgttttgttgatctaacaaaagagcgggaaaaaaatctctagcttgatttttcaaatagtttgaagtaaaccttgttggagcatatcaagtgtacagaattttcctttattttaaagtaatgatcagaaagaacccaaatgaagaaacatttaggatacttttgtattagataacgtggaagctcaaaaagccaaaaaataaaataaaggtaatgtggaagagcgagcagaaccgttgatctgacccacctacccactccttggggctcttcagtttgcctgtcctattgtcttgtaggaactctggctatttcaatagatttgacaaaatgaaaagtgtggaactttgaaaccgtgttaacttttgggggggttgttttttttgtttttgtttttgtcttgttttgttttttccagacaggatttctctgtatagccctggctgtcctggagctcactctgtagaccaggctggcctcgaactcagaaatccacccgcctctgcctcccgagtgctgggattaaaggcctgcgccaccgcgcccggctccgtgttaactttttaaagattaagtataagtgaagctttcagatttaaaataacgtattaaaactcccgctgtgttcctgagagcagagaagggtggtggtggcccctttgcttccagtcaccctgaggtcatcccagatgtagttatctgtagctcaaggcagaggaaaattgctctttggcaattaggaagcataattctttaaatgttctcagtgccgttagggcctgtgtttctcaaggcaggaagtagtcatcataagtaccatgacacacactgcacttgagctgattcatcccaggacactcttaatggtgttaatgtggcttaaaaagaaggtgacatttctgtgtgaagggtatactgtcagcgaggtctttttgtctgttccccgtgtcctcttggttcctggtcacactaatttcccacattgagtctaggggggagtttctcggttgagtcaaaggtttatagtcacaggcactattgatctatggaggcttggtctaaggagctgtaattagaacattttaatgtgcatgcttcagtgaaatttggagcgataataggtggggaacccaggctgacattcattaggtgttcctaggttagtgcccacttcataatgctgaactttattaatagtgacgctaatgatggccccttcctgggacacactgcactctggcctgtggctctgaagggccagacccactgaaataggaagtgcagaggctccattaaacgcactgcgttcttgaagcctgaatgagttccttttacaatctaaggttgttttgaaggtggtgtttacttggtgtgctccctgcttcatgtcattcattgaacatagttgaaaatagtaccttttctttactagagcagctagaacattccatcagaaccaaaccattctgatgcattttgtctgtttacttcttgccaggctaggttagtccaaataattgacctttcagcattctgtgctctgcagcatcttggtggacatatttatccagtaatttaaaataggtctttgttacaaatgtcctgtgactcttcccccttcaggacagagtaatgataaaccgattagacaacatctgtgaagctgtgttgaaaggcaaatggccagtaaatcggcgccagatgtttgatttccagggccttgtccctgggtacccaccctccgccgtggacagtcccctgcagaagaggagctttgccgagctctctatggtcagccaggccagcatcagtgcgagcgaggacatcaccacgtctcctcagttgtccaaggtaaaacacagcagtttgctttagtgggagaaaggagattgctgtgaattttaactgatcgaggagcttgtgctcactaatctgacttgattttatatgtctgtttagttgtgttgcccacattggcctcaaacaacctttctgcctgttatgtagctagaatcacaggcacacattactataaccagccaactagtcagactttaaaataagacggtagctattgccatagctgtggccaccactatcgaatggctttttttttctaatgccagcccctattgcagataaaggtctgcctcattacaactctgttctcttgggaattttcaataggatgatgccctcaacctgtctgtccctcgccagcggcggcggaggagaaggaaagttgaaatcgaggctgaaagagctgccaagaggagaaaccttatggagatggttgcccagcttcgagagtctcaggtggtctcagaaaatggacaagaaaaagttgtggacttatcaaaggcctcgagagaggcaacaagctctacctcaaatttctcatctcttacttcaaagtttatcttgcctaatgtctccacgccagtgtctgatgcctttaagtctcagatggagctgctccaagcaggcctttcacgcacacccacaaggcatatgctcaatggctccctggtggatggagagccccccatgaagaggaggcgaggcaggaggaaaaacgtggagggcctcgacctacttttcatgagccacaaacggacgccgttaagtgcagtaagtctggtgttcgctcccacagtgtctaccccggttgacagccagccctaggctcctgaccccacttctctcagcagcatcacatggaagctggcttcctccaccagagaaacagaattacagtgaatgcaatggtgctgagccagaaaactgtgttggtcactggtacagatccctcagcctgagccaaggcagcacaaggatttattcttcccaaggttctgacgtattgattgctcccgaaagaatagcataaagcagaaacgtgttcttctgagcttgcagttgttatctctgaattcttgaggagggagaagcttctgctcttagaaacactgctgttggaggccagcatcagttagactcgtgtgagtgcttggtattaggcctcagatacctagctagtagcttggaatgctctccatccctgcaactagttgttttagaaatctgagacatgtcattgctagttggaggacaagtcggtggatttttaattagaaggaaataaaatgcagtataataaattctctattatatggcctcaaccgtaccatcccaaaagggatgatgactctgacggcaagaattttaccctcaagaactctgttatgtgtgctctgtgaagagctaaggaattcatatcctgagctattgattggaaactctaatcagtggagccactttgggctaggcgactttgagagcctttctccacaggtcgtggaacaggtttggggcggggcagctatgattttaaaatagagacactagttgttttttttttttttttctggcccatcttttcttcttccaactctgttatttacaccagctctctctcttttgtgagacaggatctcactgtagcccaggctggcctccagcttagagagaccacctgcttctgccaccctgagtactgggttaaagacctgtgccacaatccccagcaccagttccttgagcctagagaaaggcttaaaatttcaaatgaagcaaaggcatacttggaaagaaacaaaacatcagtctttggacagtttagccacatagtggagtgtgagcagaagggtccatactccatacgggttaagaattgactttcatgttggcacatatctaagagagctctttcttgttgctttggatttttgctttctcaagacagggcttctctgtcttccctggctatcttggaactgctttgtagaccaggtgggtctagaactcatagatccttctgcctctgcctccccaatgctggaattaaaggtgtgtgccaacaccttccatcaggaacttcaagtagatgttggaggaaatgtatttttcaggacgtttctttaaccattagatgttgtgaattggagatctccctgtgaataaaatgcacagactgtgctgagttggcatagcagcagtagaggctaaggtgtgctgaacacagcttcgcctccttatttcaactcccactgctgtcaggaaggaggagggtgccttcactggcatcaccagtggtgactgtgttttctgtgccaggcatggggatttgaagagcaaagccctgacttgacaggacatttgtagaaagtcagtgttggggtgacttttgagtattccccaatcaaaacatgctaagtactccaaattctgaaactttggggtaccaacagaacccaataactagaaaatcccacaattgacttcatatgaagggtcacggttaaaacagctgagaacaggcagaatgactcactatgtaaaggcacttaccacccaagacagattacatcattttgatgttggaacagaagtacataaaggtagaagaagaaaagcaactcctcaaagctgccctttgacctccacatacatcatgatacatacatgtacacatttgtacacacacacacacaaatcatctatctatacagtcagttaaaaaaatttaaatcagttacattcaaatattgcataaaactgcttaaggctatgtggtgaagatgtatataaatgtaaaatgtaatgaattcatgtttagacatgaatcccagtcccagtatgtctgacagagtatgtataaatactcaaaaaatacaaaattgaaaatgaatcctggttttaggtgttgtggataggagacccaccttcagtgacatgtcacagttctgcatgtgtgctggcatcaaggcatgctcccagggctcccagggaaagcttggagtggagggaggaggttgttatctgtcactaaatgggagatattgctggagcagaagtgctggggtgcgagagtatctctccagctttgagacccgggcgttttttgctggcaagtttgatgaagtcatgaagatgtagacacggagatgaagtagggatgcaggttgtggaaagcctagagtgccgagctgaagaacatgggggtgtcctgaagacatcggggagcctacctcggggagtaacttaatggcagcttttgaactgggtggagcttactgcattttagaaagccctggggaatggagaaatggatgttggaatgttgaaagcacagcatttaaggacagtgacagggtgagcatggagtgctaacctcgggtctttccacacctgctctcccaacagggccagactgtgctcgccgagcgctgggaaaccacttactgataaactggtgcttgtcgggacagtgtctagggatccctgagcggtcacatgtcacacagctctagctcagaccaccatgtagcatggtggtgtagtcctagtggcttgcttggccctctaggctttcctactgaagaatgttgttcctaccttgtgaggagtctacaagagttgtcttctactctgaaagccatcctaacaagggcattgtttccgatcgcgtctccctttttgatgaaagatcctgtgggctgggagggtatctttcttgagtagagcgttctcagaatcttatgtgacaattcagatcactgtctgcttcctgcaggaggatgctgaggtgaccaaagcttttgaagaagatatagagaccccaccaataagaaacattccttctcctggacagctggaccccgacacccggatccctgtgataaaccttgaagatgggactaggctggtgggagaagacgctcctaaaaacaaggacttggttgactggctgaagctgcaccccacctacactgtcgatatgccgagttatgtaccagtaagtacctcagagcctgggctatgaagcctcacggggtctgcctaattgcttctcatctgagcgagtccttgacagctccctgcaccctctgtctttggcgtgaatgtgtgcaggttcacgtgtgccccatgtttctgctgtgaattcaacatgagagaaactggttgcagtctgtcctcctgaaggacaccctcagttacgtgaagatgtctgctactcatttgcccactcctccagcatgcttccctcacacggtctagctcccaggggtctaggctttgcatagtcttaagtgcgtttccctggtcttcagacaaagcctgacccagcccagagctataagctcttgtttccagagatttcttttaagcacctaacccttgtgagtgcccaatatacaactttctagctagcaacacagatctcttcctgtccttttgtgattaatatttttcaaacattttctgttttttttcactgagtttgggccatcccctctcttgctaccaacagcaacctttcagcctccctacttacaacacctcaaagacaaaggtcccatgtcgtcatttaggatatcatctctggcttcatttatatatactgattagaaataagtgaaggtactagataaagtttcttttaaaatactaggatttgtataaatatctgaagacaccctcctcccctttgttctcatttccagggactgaacccaggtgttctcagatgctgtgtaagtgctctgccgctgagtcacacctccagcctgtcacagaaactttaactgagagtctcacttaaggagactgccagacgcctggctctttagagcacttgttgctcttgcagaggacctgagttcagctcccagcacccatttataactcaagtcccaggagaaccgatgctctctgctgacctctgggggcaccaagcacatgcatacatatagacaaaacacttgtacacacacacaaataataaatcatagaataatcttgagtatcttctcagagagtgcctgttgggtagaccagtcagtgctgggagatactttctcagaaaagttcagtttctgcgaagtgcaaatgattgttaaaacttaacagcgcatgtgcctatccttaggcgtttataggaaggggccagtaccaagtacagcctcattaaatacgtccttttcttttgcagaagaacacagacgtgctgttttcctcgtttcagaaaccgaaacagaaacgacatagatgtcgaaatcctaataaattggatattaacactttgacaggagaagaaagggttcctgttgttaacaaacgaaatgggaagaaggtaaatgctggggaagggatgggcaaggatggcaaatcacacttcttctagaacctgtgtgtgttcctgcggacaccgaaaaagggagctgaggggagtggggagggaaacgtccatgatgttcagttgttcaccggatgcatattcccagatgggtggagccatggcccctccaatgaaggacctgcccaggtggctggaggagaaccctgagtttgctgtcgctccagactggaccgatatagtcaagcagtctgtaagtacacaaaagagatgcacataaaactgtgtgcctaggtgctcagtgtcccattggctagtaattattcagttgtgacttaatcccagcttacagagttgtcataaagcatcattttcttacattatttcagtgtgttgtattttacacacacatcattaattgggaatgagctgattgtcagttctgatttaaaaataccgtgtgagaacacctactcccaaccctcttagaggtggacttactccagggaaaccggtctcacagtgtcttcaagatggaacttgtgctggatgggaacgttaagattattagctgtgatagccagttttaaaatagacatagcaattctgcataaaattttatcattattagtttctttcaagacaaattagtggcatgcttactggttttgtttaaataatacaataaaattgcctctagccatgtgttaggacccagttttgtgaagtggtaccttcctaatcacctatctgaggtccttgtatatatgattccacctttgtagctctgactgctactatctagtctccattcctaatggtgtgtctttcgaaactgggtaaaatggaagtgggaactctgtaacctgagactgtggctttcactgagtgttctccagtcccaggatggagtattatcaggggtctgctgctccttgctgtacagcgtgctagtccatgctcagctaccatgtgtcattccctcacccatggaaagacctctggggtttttcacatttgtgaatttattagtgaaacaactataaatgtttacatgcaggttttagcgtgtagcttctcatggggtgggggtgggggtgggggtgttacacatgtgagtttaacttactcaatttttctacattgttaacaaatttttcttattcttagctatatttgaaatatctagaatgtcttatagtctatgcaactcttttgtgatactgttttatcatttttttcatacaaaaccttttaaaattggcatatttatttggcaattaattgacaaatgaaaggtcatttgcacttgatgcttatgttgtacacgtgcacatcacgtactgattacaccagtcaatcagccactgtctggagtgttgatccttaagttaattatgaatacagctaccttggcatttacttcagtggtggagtaaccttgaacagctttttctgcaactcagcacaattcagcaagcgaaaataatggttaaaaaaaagaaacaaaacaaaacaaaaaaaaccaggacctgtgctttcccaagttcttactttaagcttttagaatggaagcaattgcttgcatagttagaatgttggtgtggagctccaaaaggcccacgttggcagtaagtactctgacccggcctctacagctgttgtctgctttccctgtcgtccagggttttgttcccgagtcaatgtttgaccgtctcctcactggacctgtggtgcggggagaaggagccagcaggagaggacggaggcccaagagcgagatcgcccgagcagccgcggcggctgctgctgtcgcctctacttcagggatcaaccctctgttggtgaacagcctgtttgctgggatggacctgacaagccttcagaatctccagaacctccagtccctccagctggcagggctcatgggcttccctccaggactggccacagctgccaccgccggaggcgatgcgaagagccccgccgcagtgctgcccctgatgctgccagggatggcgggcctgcccaacgtgttcggcttgggcgggctgctgaacaaccctctctcagctgctactggaaacaccactactgcttcaagtcaaggagagccagaggatggcacttccaaagcggaagagaaaggaaacgacaatgaagacgagaaccgagactctgagaaaagcacagacaccgtttcggctgctgactccgcgaacggatctgttggtgctgctactgccccggctgcgttaccctccaacccgctggccttcaaccctttcctcctgtccaccatggccccaggcctcttctacccatccatgtttctacctccaggactggggggattgacactgcctggcttcccagcactggcgggactccaaaacgccgtgggtaccagcgaagaaaaggctgctgacaaggccgagggagggccctgtaaagacggagagaccctggagggcagcgatgccgaggagaacctggacaagactgtagagtcctccatcttggaagacgaggttgcacagggtgaagagctggactccctcgaaggcggggatgagatagaaaacaccggaaacgacgagtaacagcagcagcagttccactgaaagtgttgaaaactgttgacaggtggtagtcctactgtttacactcacagttaatgttcatacctagttttataagctgttctgtaacatagtgtagcaaaaaaagaagagaaaaaaaaaaagaaaagaaagaaaaaaaaaaggaaaaaagtccaagtcatgttatgcaggtgtgtccgaaggtatcttggtcataagtattgtgcagtgcattatttattatccctaggaaggatgaaatttgagaggtgatcatgtctttttaaggaaacttacataatgctctgcttttttctttgggtaccactggtattataataaagagcaatctgtaacagagcggcactagtggaaggaagtgctactcagaggacgtatgaagttatatatttaattttttaattttaattttttttgctgtgaaggtcaagatgaaatttaccatacatatcatcccttgttcattcgtctccctttctgactttatgggggttcccacatttgcatacacacatccatacactctgacaatctccacgttagtgtgaacgcctctgtcccgaggctcagcaataatcaggcagctgttgaatgtgaagggtccctttggaaaactaaccttctgggagggttcttgccagacaactgcagttccattggcttgtggtcttgtgatgcactggtaaaaactaaataaatagaagagtaaatagaagattgagagaagtgagaatcaggtacctttttttttttttaaattaaaggactttgttactttagccacaaagctaaaacagcattacctcagctctgaactagccttgaagtttacagacaggactttgtaaatgtttttctttgttgtgatgtcctttgattttttttttctctgaaaactgctatcatgtaagataaaatgtaaatttctgccaactgtagtaatgatgcttttaataaaagtgacccatgatatgcagagatgtagttatagaatgcagtgtacaggggagctggtgtccactttttttttttttaattcgtaatagctgcaaatacagcattctggcattcggactttgcttaccgtgtcttctcatgctagattagctgttagtaacacacactagttgtctccaagaccagatggacaggaaaaccttgaattaccaccttcatgtaattccacgccagatatctcagcagacacatacacacacacaaacctcttattgctcccctgaaagggcatctgagagtagggctcctgaaaatgtgtgcagcctgtgataatggggcacacagtagacaaaagggcagaagaaaaatgaggctttaataggcacactatctaggtcatttatccttggataatgggaaaaaaacacaatgtcgtagtgtcagcaagggacacaaaggcattctggtgtcctgcagaccagagcttgatatcaagagccagtgtgtggaaaaacccacgtggaactaaaatggacccatttaagtgtgtgtgtgtgtgtgtgcacacgcatgcgtgcacattcacgagcatgaactcacattcacccagtctcaaggactactagattattaaatcctttatttgttttctacaataaggtttaaattataagacctttttctatgtcatttcagcaaaccctatttccatctaagaaaggagtgatatacatggaattgtgcttgtcttttaccttcccataccccctttacacaccagtacataccagtgcacacacaggttatcctctacaggggacaggccagcctatctaaattccttttggacagtgagattccagctgacttgtgtatccaagatgaaaatatgcctatatgactggaagaggagaaacttgaagccacaagagtggcaaaatcttgaaggctaaccagcctgtgctcggttaagcaagtgccttctgaaatggcctcctttgaccatggaagtgaagctagatctgcggggagcagagaccttaaatgtttaacggaaacgcttgagtagggagagctggtttaataaactgcattaccaaagggtctcttcctaaaattctgtttactggaaagttccttgtcagcttctgtgaacagggatgagtgtgactctgtccctgacagcactgagtgtctcgagtgatgctgatcttcaaagcagaggtgtctgttgcttggcagcagtaagaactctgaacttagaaatcagcacccgttttgtattacacgaagtcatttagagttccacattggaaaatacatgttttctttcttccaatggaaagaagtcatgacatcctgaatctatctaaaaaatatttacgattcggcctaatgctaaccagtgtttcccgtgctgtaaatgaggcaccagagcaccagtactgtgtgatgcttaattccacgagggaagccgagaaacggaaagtaagtggctcacactgcattggaggatgtgtgaaccgtggtccaaccggccctcctgaaggactgcattggttttcaaaagaaaaattatatgtgtgtgggggggggtgatccaaagtttttggtgttactgtgttttatatattcctcttcataattgcatagtgtagttgaggctgaaacttgaaagaagtgctttttttttttttttttagtttctttttggggcaaggtctctatgcagcctaggctgaccatatattcactttcctgcctctgcctcccaaatgctgaggtcataggtgttgtgttagaagtgtggcttcagacagaccacaccaggccaaacagttccacgtggtttatggtaggagaaaagggcaaaggtggctgtgaaggagatgggtgggggaggggaagagggagagagaggtcagaggggtctgccttttatttaaatggagacctagtggtgggaagtgagccaaatggattctgggaatatggtggtggttgtcttggcaacaggtgtgtaggtcactgttgcctaggtgtgatgtcactgggtctggagctgaccatgacaccagcataccaccctttttatcatagaagaaaaggggggaggggcaggggaagccaaggaattaaagggtatggggagccagtcctgatcccgtaataggagtgtgttgttacacagggaaggaagcctgtgaaattagatctggaaactggaaattttcagtcccagtttgtgtgtttgaatttgagtttatgatgtgcccccctctcccccccccccccccagtatttctagtgtataaagaaaccaagttctttgaaaagatgaacttggtcctgatagaccctggtgttggaaccaagcttggccggtactctaagcccagacccttaaccgctgtgctaatgaaatcaagactcataagcaagcagtcgttggtgcagacgttagagaaatgaaaacaaaaaccagactgggcctctgctgttgtgcgtcttacctggtagagagctgggggaagaagacttactaaacgagatgagattggggaagacaaaggtctctggggggcccagccaaactcaactacactttgagaaacaggaggcacacgtggctgcaggatctcccgagagaaagaaagaacagtgcaaagaccttaaactgggactgctctggggtagggaggactatcgaacgtctgacagtgctctggggtagggaggactatcgcacatctgaccagaagagttgggaagtggggttatatcctatagagtctggatggttccagtgggaggctgggtttcatctaagcactagagaaagtcattggaaggctacagtgagatttatgcctttaaagagtctatatggcagtagcacaaaaataagggcttgcaaaagggagtaggaggtgttggaccacagcctcaggtttcagcagtgaaagactttagagttaaaactcaatgcgtaatttcaattagccctccaggactattaccacttgaagtataaccagagataaaaccaacagataaagaatattttctgatttttttttctgtaatgccacacaattagtggtttttaaaaagagaagttgaattttttttttacaatacaatgaaagttaattttgagttaactttagaatttaattttgttcattatttatttattcactttacatctgattgaagcccctcctctcctcccagtcctcccctcacatggctcctaccccacccctccctcctgttcacctctgagaaggggaccaacccaccctggcatcgaagtgagaaggtgcgcctttgcaggatgatgtatcggcgacaagtgccttgagagcacagggatattaaactgggaagcagagtgtgataccggtgtcttctgacagcacgtgagggttaggagaggtctcgttcattcgctgcgtctcttgaataagtggatttatgtgttttcttagctcaggcaggatttactacaattctatagacatagtaaactaaattgaaaactacttctggaatttaatcttaacttagactccttctgtatggcacattcaccacgtgggaatattctgtgatgctgaagatggtcgtcagacttctgaattttgtgtgaatgtagtgtcaactctcctaaaggacctgccgtaagatctagcctacaactagctgaattttactttgacctctttcatcatcttactgtgtagtttaaacaacatggaacggagcagcgatagcatcaggtatgctcctctctgacatctttctgtttagagtgatgcatggtttgtctggttcctaagccgattgaggctcccatcacgagagcaaaggaggcagtgttccacgtcagcctgctcctgggcacgccactgacctgtagccaaacctctctgcagcctcagtctcttgtgagcggtcggtcattatcccgccgccttcccagcccagagagcaatctatcatggtgactttggagttgcagcaaagcaacatcttagtgagatttctagtgtggacagcagaagtgcctgttcaaagaaccaggaaggcctccatccaggggacctcctccactgccctttcaccacctccacagtttgatctgaaagcttaatttcaaaattaccgaagaaacgtgagccttctcaccgcctgatgggagccaggtgatgctttgcaactcaaaactgccctcccttctgtcagtgtccattctaaacttccaattgggtgtgggctgggtggctgaaaacgaagcaggctgtgcatttaatggtttggaggaaggcacgtggcatctgacaatggcatgagttcctttcaacatgtcccaccatgcctccctgggaggcagtaagctctgttttgtatctctctctctctctctctctctctctctctctctctctctctctctgttactatgtagtcatgagctcaccacaccagccagttaggcacatgttgttgctactatgccttcgcatgagaagtgaggtcatcccaccagaacagtgtgtcttcctgtctcccacacggctttttctgtgctgttgtagctctgtctccctgtggtttgcacagctgtcgcttcctctgctagggttggaacctccgaggcaactccatgctgttttccctcttactgtgagaggtctggaaaatgagggcagccattgcctgcctcttgccatggacttatttcttccagtttctgatccttcatctttcccaaggggcagcggtatcagctcagagtaacccaagaggttactctgtaaaaccatccttaaaagtcttatgtcctttactctccaaaatcaaaaggtagtttctgtccttttctgtgtcaagccagtgtggtctgagccaccaaactgaggaacactgtcatagcagctcaatgacaaggcagttggcttggactccctgcccttagaccactttgagtaaaggactctatagaacgtaggaatgtgtgcccactagaggaagaatacaatttaagctgagaactgcctttcttccaaaacattccaatcaaaacacttctataaggggagggtaggtgtccgtttttctattaaaatcttggtaaggcccttgggatggttgagtgagtgaagatgctactaagcctggcaactggagttcaagcccccgacacagctggtacaggagagaaccaactcctgcaagttaccctctgagctctgcatatgtcagcatacacacctatactatcgaaattcaatgtatttttaattatgtattttaaagctttgctgaagatcattgttggcattccttctatgctccgcccagcagttacctggcaacagccaggtaggcctggcttgctataaaaggggctgtgggcccctcctcaacctcttactctatctgccttttctctctctgactctctcccctttctatgcgttcctggccagcctccacccactctctcaatctctctcaacctctctctctctcaatctctctctctccctcccttcttctctccctccctctctccatctcttactctctctctgtctgtctgtctgtctttctctgtcttctcaactcctcttcccatgtccctaaataaactctattctacactataccccttcatatggctggtgcctcggaggaaagtgatgtctcagtatgggcctgccgaggcacccctcccccgtcaccgtcaccatacgtcacctctacaaaacatatccttgtctcctttttataaagcacaacagtcatgacccctaacctgagtcacagcaaaaataacttctgttggcgttgtataatcctgctatgctttctgtgttctatgttttgtttttctcagacaatctcaccatgtactctcagttcacctgcctgagtgctggcgtcacaggtgtgttctaccatgcccagctttaaattattttctagtgtgacttagaacaggccaggtgagccataagtgtctttccaaagggattggtgtgggtctcgtgtaggaagaaagctgaccttgctgactcctgctttctacttacatttgcagctcagatgcacccatgaccaaatcccccaccccatccccacccccactcatccctgtaccccagtgccatggagaaaactatgtcaaaagcacatgacctggaagtctcacaaagccatttacaactctaccagctagcttggcacacctaggttgtaaagggtgagaacacatggacaattataacaccaggtgacactggacacacctctgtaaattagaatgctcatgaatgtgacacatttatctagcaatgatgccatgccaaatgtctctctgtgtgtgcccagggagttgctgaagcccagcagaacttgaaggttaggcaaccatactgtcttaaaagctgttacagacacaaatgaccctagctccttcgtcgtcagtcatagctaaatgtattgaattattaacaagttctgagcccagagatctgaggagacctgaggcttcatgatttttgtcttggcttcctataatttgacctcattgagcttgctttaaggcgagcttatctcggctcctcaattagtgggattaaaacaaccactcaggttaaaaaaaaaacaaaccttcagttaagtgacctacacaccaacctatcttgcatttccatggttatatgctactttaaagtgtcagctatggcccaagaatgacaccactggccagttctagaaaaccagacacttgcttggtgaatgaaatgcatccttttagatttctggttttgctttgggccttcatatatttaaggctctttaggaataaaaatcatgaagatttttttctgtatttaatgaggaaactctttttcaaaaagtattcttggccttttgggagtggttgactacaaatttttaccgtgcaactagagttaggaaataggggttgaggaaaaagagtatacaggttagtcacaggggcctcaggctattgttaagctggttaactacccaacccttgtctgcctgctgatagagatttgggggcatgtgtacacacaaacagaaacacacacacacacacacacactgtgtcagctgatagttgcagctttgaaacaggcaagatactcagtactttcaagactaaaaaaattccagggttcagtttttctcaaggttagtggtgggcttgatgcatcacataagctgatcctagaactctaaaccacatacattgtctatcttagaactaagcagggccttctacctaccactcacagcgggaacaggaacttggcctgtctcagagcactctcccgtttgtttaccagggaagaccaagtgaatcgtgttcttgcctttcttgtgacgcagtatggggattagaaacaggactctcaaaggcctatgtctgcactggcactgactaaatgctaacttcaaagccactgctgtgtgtctgatggtgagtttgaaagtggcacaagagaattgtgaggcacaccggggagattgtggtgttcccaaggcatagagctgattcctatcctgaaagaatcagctctgagcctggaggaagggccaacgctgcacagaaggcgttgtcataccacagcacgcgagagggatagctagctggggcctcatgcacattgatagttcgatagaaatgttcttaagcttcataaaatagggcaagactgtagctcagtggcacactatgtgtggtaggagcctctgagctccaggaatcggtcctcagcaccaaacacacataagatgaatgccggctaaaacttaacaaaacatatgcttactcctgctaatacgttcttttctgttaccatcttgtctactttattacagtaaggaagtgtatacatcatacgagtatacactgatgcatgactaatgacgggcatcctgaactttgaaacatctcacagaaaaccaggctttctaccctaagtttaaagtatgtgcctccaaattccctgaccttagaagcacagttgtgtgtttttatatttatggcaaaaggttcgtacatttatctggtcttcaggatgcctattgtgccctctctctgagagcaacaataagagaagatgaggcaggtgtggaggcctgcgcttgtaatcccagcacctaggaggctcagacaggaggactgtgaattccaggtaagcctgtactacatagagagatctgtctcaaagttattgtttattattattatataaattataaatatgctgatgtaaatacatttatgtctatatacataaattacattgtaaatcatgatttataaatttataattaaaattaataattgtaattgttaacaaagtaagctgacaaagggtggagatggtggagactgctttcaaagtcactgtgcaaatggaaaacagaggcaaggtcagtcctggaagaagtaaaaccatgccaagctgtcttctaccccaaatgcttgtcctgtgcatcagtcgccattctattgtgtccctgagccttgagcgcacctcctttctcctgcccaaagtggggggtagaagaagccccctgcatggcagcctgctgccagcactgaatggctcatgcttagatccacttggcacactggcacacagcatacacaatgtccgctgttgtgcctactgtccctgcttggtgacagtaccgcagggaactctgtccccattgtgtctgtccagtgctttgtgagcatgtgtttgtttaggatagaatgaagggtttttcctcactcatgagactgggagaaaatcaggcaatctaataagcctatagtctcttccctgcagcactcagacctgcaagacacaaacaagacctttcttacccgcctggcttctggcagctgccacagaacctgcatggtggccctgccaaactaacacaggttcctagatgcccaaggtgtgcctgctcctgccag

SEQ ID NO: 62 - DNA, 8969 bp, Mus musculus
ggacctatatccagacttcgcccgcccgcctgacactgcagggtccgagagaattaaggaaatctagaatgacacgaagaagattagttaaggattataggttttgaggacaagcaccccagaaaagtgaagcacagacaagctcccaggctgtgttcggaggagccgtgtgttagaagaagatggcggacccagggatgatgagtctttttggcgaggatgggagtctgttcagcgaaggcctcgaaggcctcggggaatgtggctaccccgaaaaccccgtgaaccccatgggtcagcagatgcccatagaccaaggttttccctccttacagccatccctccaccatccttcacctaatcagaatcaaaccaagttgacccattttgatcactatagtcagtatgaacagaagatgcatctgatggatcagcctaaccgaatgatgggcagcgcccccgggaacggattggcgtctccgcactcacagtatcacacccctcccgtcccccaggtgccccacggaggcggtggtggcggtcagatgggagtctatcccggcatccagaacgaaaggcacgggcaatcttttgtggatggcggctccatgtggggcccccgggccgttcaggtaccagaccagatacgagccccctaccagcagcagcagccgcagccggctccttcggggcccccggcacagggccacccccagcacatgcagcagatgggcagctatctggcacgtggggatttctccatgcagcagcacggccagccacagcagaggatgggccagttttcccaaggccaagagggcctcagtcagggaagccctttcattgccacctcaggacccggccacctgtcgcacatgccccagcagagccccagcatggccccttccctgcgccacccagtgcagcagcagttccaccatcaccccgctgctctccacggagaatccgttgcccacagtcccagattctcccccaaccctcctcaacaaggggctgtcaggccacaaacccttaactttagttctcggaaccagacagtcccctcccctactgtaaacaactcagggcagtattctcgatatccttacagtaacctaaatcagggattagttaacagtacagggatgaatcaaaatttaggccttacaaacagtactccaatgaatcagtcggtaccaagataccccaatgccgtgggattcccgtcaaacagtggtcagggactcgtgcaccagcagcctatccactccagtggctcactgaaccaaatgaacacacaaactatgcacccttcacagcctcagggaacgtacgcctctccacctcccatgtcacccatgaaagcaatgagtaacccagcaggcacgccgcctccgcaggtcaggcccggaagtgctgggatgcccatggaagttggcagttatccaaatatgccccaccctcagccatctcaccagccccctggtgccatgggaatcggacagaggaatatgggccccagaaacatgcagcagcctcgttcgtttatgggcatgtcctcggcacccagggagctgaccggacacatgagaccaaatggttgccctggtgtcggccttgcggatccacaagcaatccaggaacgactgatacctggccaacagcaccctggtcagcagccatctttccagcagttgccaacctgtcctccactacagccccacccaggcctgcaccagtcttcacctccacatccccatcaccagccttgggcacaactccacccgtcaccccagaataccccacagaaagtgcctgtgcatcagcattctccatcggagccctttctagagaagccagtgccggatatgacccaggtcagcgcacagaacgctcagctagtgaagagcgacgattacctgccgtcgatagagcagcagccacagcagaagaagaagaaaaagaaaaacaaccacattgctgcaggggattccagtaaaggttttggtaaagatgacttccctggtggggttgaaaaccaagaactgcgcaggaactcactggatgtgtcccaggaagaaaaaaagaaaaagaaaaggccgaaggtcaaaaaagatccgaaggaatcgaaggagccgaaggagaagaaagagcccaagaccccaaaagccccgaagatccccaaagagccaaaggaaaagaaagcaaaaactgtcacgccaaaacccaaatccagcaaaaagtcaagtaataagaaaccggattcagaagcaagtgctttgaagaagaaggtcaacaaaggaaaaacagaaggttctgaaaattcagacttggacaaaacacccccaccgtcccccgctcctgaagaggacgaagacccaggtgtccagaagaggcggtccagcaggcaggtgaagaggaagcgatacactgaagatttggagttcaagatttctgatgaggaggcagatgatgcagatgctgctggaagagactccccatccaacacctcgcagtcagagcagcaggaatctgttgatgcagaaggcccagtggtggagaagattatgagcagccgcctagtgaaaaagcagaaggaatctggcgaggaggtagaagttgaggaattttatgtgaagtacaaaaacttctcctatcttcattgtcagtgggcgtcagtagaagatctggaaaaagacaagagaattcagcaaaagataaaacggtttaagtcaaaacagggccagagcaaattcctctcagagattgaggatgacctttttaatccagactatgtggaagttgaccggataatggactttgcacgtagcacagatgaccggggcgagcctgtgattcactacctggtgaagtggtgctcactcccttatgaagacagcacatgggagctgaagcaggacatagatcaaacaaagatcgaagagtttgaaaaactcatgtccagggagccggaaaccgagcgtgtggagcgacctcctgctgatgactggaagaaatcggagagttccagggagtataaaaacaataacaaactcagggaataccagttggagggagtaaactggctacttttcaattggtacaacatgcgaaactgcattttagcagatgagatgggtttgggaaaaacgatccagtccattacgtttctctatgagatatacttgaaaggaatccatggcccctttttagtaattgccccattgtccacgatccccaactgggaaagggaattccgaacctggacggagttgaacgtggttgtgtaccatgggagccaagccagccgtcggaccattcagttgtatgaaatgtacttcaaagatccccagggtcgagtgataaaggggtcctataagttccacgccatcatcactacattcgagatgattctgacggactgtcctgagctgcgtaatattccttggcgctgtgtggtcatcgatgaagcccacaggctgaagaacagaaactgcaagctgctggaagggctgaagatgatggacttggaacacaaagtcctgctgaccgggaccccgctgcagaacactgtggaagagctcttcagcctgcttcatttcttggagccaagtcgcttcccttcagaaacaacctttatgcaagaatttggtgatctgaaaacggaagagcaggtgcaaaaactacaggctattctaaagccaatgatgttgagacgcctgaaagaggatgtagaaaagaacttggcccccaaagaagagactattattgaagttgagctaacaaacattcagaagaaatattaccgagccatccttgagaagaattttacatttctttccaaaggtggtggacaagctaacgtacctaaccttttaaacactatgatggaactgagaaaatgctgcaatcatccctacctaatcaatggtgctgaagagaaaattttggaagagtttaaagaaacacacaatgcagagtctccagattttcagctccaggcaatgatccaggctgctggcaagctggtgctgattgacaagctgctgccaaagctgaaggctggtggccacagggtgcttatcttctcccagatggtgcgctgcttggacatcctggaagactatctcatccagagacggtacccatacgaaaggattgatggccgggtcagaggcaacctccgccaggcagctattgacagattctccaaacctgattctgataggtttgtgttcctcctgtgcacacgggcaggagggctaggcattaacctcactgctgctgatacctgcatcatctttgattcagactggaatccccagaatgacctccaggctcaagctagatgccacagaatagggcagagcaaatctgtgaaaatctacaggctgattacaaggaactcctatgaaagggagatgtttgacaaggctagtctgaagctgggtctggataaagccgtgttgcagtccatgagtggaagagaaaatgccactaacggggtacaacagctgtccaagaaggaaatagaagacctcctgcgaaagggggcatatggtgcacttatggatgaagaagatgaagggtctaagttttgtgaagaggatattgaccagattctccttcgacgaacccacactatcaccattgagtctgaaggaaaaggctccacatttgctaaggccagctttgttgcgtctggaaataggacagacatttctttggatgacccaaatttctggcagaagtgggctaagaaggctgaattggacatcgatgccttaaacgggaggaacaacctggttattgacactcctcgagtgaggaagcagacccggctatacagcgcagtgaaggaagacgaactgatggagttctccgacctggaaagcgactccgaagaaaagccttgtgcaaagccacggcgcccccaggataagtctcagggctatgcccggagcgagtgcttcagggtagagaagaatctgctggtttacggctggggccgctggacagatatcctgtcccatggacgctacaaacgtcagctgactgagcaagatgtcgaaaccatctgcagagcgatcctggtgtactgtctcaaccactacagaggggacgagaacatcaaaagctttatctgggacctcatcacacccacggcggatggccagactcgggccctgctaaatcattccggtctgtcggcccctgtgccgaggggccggaaggggaagaaggtgaaggcccagagtacgcagccagtagtgcacgatgctcactggctggcaagctgcaacccagacgccctgttccaggaggacagctacaagaagcacctgaagcaccactgcaacaaggtcctgctgcgtgtccgcatgctgtactacctaagacaagaagtgataggagaccaggcagagaagatcctcgagggcgctgactcaagtgaagcagacgtgtggatccctgagccattccatgctgaggttcctacagattggtgggaccgagaagcagacaaatccctcctaattggagtgtttaaacatggctatgagaagtacaattccatgcgagctgaccctgcactgtgcttcctggaacgagtcggaatgcccgatgccaaggccatcgctgccgagcagagagggacagacatgctagcagatggtggcaagcacagcgagagcaatgctgagttaggtcagctctactggccgaacacgtcaaccctgactacgcgtctgcgccggctcattactgcctatcagcgcagctataaaaggcagcaaatgaggcaagaggccctaatgaagacggaccggcgcagacggaggccccgggaggaagtgagagcgctggaggcggaaagggaagctattatatctgagaaaaggcaaaagtggacgagaagagaagaagcggacttttaccgggtggtatccaccttcggggttatttttgacccagtgaaacagcagtttgattggaaccaattccgagcctttgccagactagacaaaaagtctgatgagagcctggggaagtatttcagctgctttgtggccatgtgcagacgggtgtgtcggatgcctgccaagcccgaggacgagccacctgacctcgcctcccttatcgagcccatcacggaggaacgagcatccaggacactgtaccgcattgaactgcttcgcaagatccgagagcaggtccttcatcacccacaactaagtgacaggctgaagctctgccagcccagcctagatctgcccgagtggtgggaatgtggacggcacgacagggacctgctggtgggtgctgctaagcacggggtcagccggacagactatcacatcctcaacgaccctgagttgtccttcttagatgcacacaaaagctttgctcagaaccgtggggccagtaccgtccctcctttgaatactctggccatgggctttggccagactcctccagtcatttcctctgctcacgttcacgaagaaaaggcaatggagcaggctgaaggcaaggcagaggagtgtgaacactcaccggccaaagagaggtcggatgggaaagaggaggaagaagaagcaggcggggccaaggatggcaagcaggaatgtgaggtcgaggccagctctgtgaagggtgaactcaaaggggtggagggcagtgcagaccctgggtccaagtctgtctcagagaagggctcagaagaggacgaagaagagaagctggaggacgatgataagtcggaggagtcgtcgcagccagaaggagccgtctcgagagggaagactttcgatgaagaaagcaatgcttctctgagcactgctagggatgaaacccgagatggattctacatggaggatggagatgcttcggtggctcagctccttcatgaacgaacatttgccttctccttttggcccaaggacagagtaatgataaaccgattagacaacatctgtgaagctgtgttgaaaggcaaatggccagtaaatcggcgccagatgtttgatttccagggccttgtccctgggtacccaccctccgccgtggacagtcccctgcagaagaggagctttgccgagctctctatggtcagccaggccagcatcagtgcgagcgaggacatcaccacgtctcctcagttgtccaagcggcggcggaggagaaggaaagttgaaatcgaggctgaaagagctgccaagaggagaaaccttatggagatggttgcccagcttcgagagtctcaggtggtctcagaaaatggacaagaaaaagttgtggacttatcaaaggcctcgagagaggcaacaagctctacctcaaatttctcatctcttacttcaaagtttatcttgcctaatgtctccacgccagtgtctgatgcctttaagtctcagatggagctgctccaagcaggcctttcacgcacacccacaaggcatatgctcaatggctccctggtggatggagagccccccatgaagaggaggcgaggcaggaggaaaaacgtggagggcctcgacctacttttcatgagccacaaacggacgccgttaagtgcagaggatgctgaggtgaccaaagcttttgaagaagatatagagaccccaccaataagaaacattccttctcctggacagctggaccccgacacccggatccctgtgataaaccttgaagatgggactaggctggtgggagaagacgctcctaaaaacaaggacttggttgactggctgaagctgcaccccacctacactgtcgatatgccgagttatgtaccaaagaacacagacgtgctgttttcctcgtttcagaaaccgaaacagaaacgacatagatgtcgaaatcctaataaattggatattaacactttgacaggagaagaaagggttcctgttgttaacaaacgaaatgggaagaagatgggtggagccatggcccctccaatgaaggacctgcccaggtggctggaggagaaccctgagtttgctgtcgctccagactggaccgatatagtcaagcagtctggttttgttcccgagtcaatgtttgaccgtctcctcactggacctgtggtgcggggagaaggagccagcaggagaggacggaggcccaagagcgagatcgcccgagcagccgcggcggctgctgctgtcgcctctacttcagggatcaaccctctgttggtgaacagcctgtttgctgggatggacctgacaagccttcagaatctccagaacctccagtccctccagctggcagggctcatgggcttccctccaggactggccacagctgccaccgccggaggcgatgcgaagagccccgccgcagtgctgcccctgatgctgccagggatggcgggcctgcccaacgtgttcggcttgggcgggctgctgaacaaccctctctcagctgctactggaaacaccactactgcttcaagtcaaggagagccagaggatggcacttccaaagcggaagagaaaggaaacgacaatgaagacgagaaccgagactctgagaaaagcacagacaccgtttcggctgctgactccgcgaacggatctgttggtgctgctactgccccggctgcgttaccctccaacccgctggccttcaaccctttcctcctgtccaccatggccccaggcctcttctacccatccatgtttctacctccaggactggggggattgacactgcctggcttcccagcactggcgggactccaaaacgccgtgggtaccagcgaagaaaaggctgctgacaaggccgagggagggccctgtaaagacggagagaccctggagggcagcgatgccgaggagaacctggacaagactgtagagtcctccatcttggaagacgaggttgcacagggtgaagagctggactccctcgaaggcggggatgagatagaaaacaccggaaacgacgagtaa

SEQ ID NO: 63 - protein, 2910 aa, Mus musculus
KKMADPGMMSLFGEDGSLFSEGLEGLGECGYPENPVNPMGQQMPIDQGFPSLQPSLHHPSPNQNQTKLTHFDHYSQYEQKMHLMDQPNRMMGSAPGNGLDHSQYHTPPVPQVPHGGGGGGQMGVYPGIQNERHGQSFVDGGSMWGPRAVQVPDQIRAPYQQQQPQPAPSGPPAQGHPQHMQQMGSYLRDFSMQQHGQPQQRMGQFSQGQEGLSQGSPFIATSGPGHLSHMPQQSPSMAPSLRHPVQQQFHHHPAALHGESVAHSPRFSPNPPQQGAVRPQTLNFSSRNQTVPSPTVNNSGQYSRYPYSNLNQGLVNSTGMNQNLGLTNSTPMNQSVPRYPNAVGFPSNSGQGLVHQQPIHSSGSLNQMNTQTMHPSQPQGTYDPPMSPMKAMSNPAGTPPPQVRPGSAGMPMEVGSYPNMPHPQPSHQPPGAMGIGQRNMGPRNMQQPRSFMGMSSAPRELTGHMRPNGCPGVGLADPQAIQERLIPGQQHPGQQPSFQQLPTCPPLQPHPGLHQSSPPHPHHQPWAQLHPSPQNTPQKVPVHQHSPSEPFLEKPVPDMTQVSAQNAQLVKSDDYLPSIEQQPQQKKKKKKNNHIAAGDSSKGFGKDDFPGGVENQELRRNSLDVSQEEKKKKKRPKVKKDPKESKEPKEKKEPKTPKAPKIPKEPKEKKAKTVTPKPKSSKKSSNKKPDSEASALKKKVNKGKTEGSENSDLDKTPPPSPAPEEDEDPGVQKRRSSRQVKRKRYTEDLEFKISDEEADDADAAGRDSPSNTSQSEQQESVDAEGPVVEKIMSSRLVKKQKESGEEVEVEEFYVKYKNFSYLHCQWASVEDLEKDKRIQQKIKRFKSKQGQSKFLSEIEDDLFNPDYVEVDRIMDFARSTDDRGEPVIHYLVKWCSLPYEDSTWELKQDIDQTKIEEFEKLMSREPETERVERPPADDWKKSESSREYKNNNKLREYQLEGVNWLLFNWYNMRNCILADEMGLGKTIQSITFLYEIYLKGIHGPFLVIAPLSTIPNWEREFRTWTELNVVVYHGSQASRRTIQLYEMYFKDPQGRVIKGSYKFHAIITTFEMILTDCPELRNIPWRCVVIDEAHRLKNRNCKLLEGLKMMDLEHKVLLTGTPLQNTVEELFSLLHFLEPSRFPSETTFMQEFGDLKTEEQVQKLQAILKPMMLRRLKEDVEKNLAPKEETIIEVELTNIQKKYYRAIKNFTFLSKGGGQANVPNLLNTMMELRKCCNHPYLINGAEEKIEFKETHNAESPDFQLQAMIQAAGKLVLIDKLLPKLKAGGHRVLIFSQMVRCLDIDYLIQRRYPYERIDGRVRGNLRQAAIDRFSKPDSDRFVFLLCTRAGGLGINLTAADTCIIFDSDWNPQNDLQAQARCHRIGQSKSVKIYRLITRNSYEREMFDKASLKLGLDKAVLQSMSGRENATNGVQQLSKKEIEDLLRKGAYGALMDEEDEGSKFCEEDIDQILLRRTHTITIESEGKGSTFAKASFVASGNRTDISLDDPNFWQKWAKKAELDIDALNGRNNLVIDTPRVRKQTRKAVKEDELMEFSDLESDSEEKPCAKPRRPQDKSQGYARSECFRVEKNLLVYGWGRWTDILSHGRYKRQLTEQDVETICRAILVYCLNHYRGDENIKSFIWDLITPTADGQTRALLNHSGLSAPVPRGRKGKKVKAQSTQPVVHDAHWLASCNPDALFQEDSYKKHLKHHCNKVLLRVRMLYYLRQEVIGDQAEKIGADSSEADVWIPEPFHAEVPTDWWDREADKSLLIGVFKHGYEKYNSMRADPALCFLERVGMPDAKAIAAEQRGTDMLADGGKHSESNAELGQLYWPNTSTLTTRLRRLITAYQRSYKRQQMRQEALMKTDRRRRRPREEVRALEAEREAIISEKRQKWTRREEADFYRVVSTFGVIFDPVKQQFDWNQFRAFARLDKKSDESLGKYFSCFVAMCRRVCRMPAKPEDEPPDLASLIEPITEERASRTLYRIELLRKIREQVLHHPQLSDRLKLCQPSLDLPEWWECGRHDRDLLVGAAKHGVSRTDYHILNDPELSFLDAHKSFAQNRGASTVPPLNTLAMGFGQTPPVISSAHVHEEKAMEQAEGKAEECEHSPAKERSDGKEEEEEAGGAKDGKQECEVEASSVKGELKGVEGSADPGSKSVSEKGSEEDEEEKLEDDDKSEESSQPEGAVSRGKTFDEESNASLSTARDETRDGFYMEDGDASVAQLLHERTFAFSFWPKDRVMINRLDNICEAVLKGKWPVNRRQMFDFQGLVPGYPPSAVDSPLQKRSFAELSMVSQASISASEDITTSPQLSKRRRRRRKVEIEAERAAKRRNLMEMVAQLRESQVVSENGQEKVVDLSKASREATSSTSNFSSLTSKFILPNVSTPVSDAFKSQMELLQAGLSRTPTRHMLNGSLVDGEPPMKRRRGRRKNVEGLDLLFMSHKRTPLSAEDAEVTKAFEEDIETPPIRNIPSPGQLDPDTRIPVINLEDGTRLVGEDAPKNKDLVDWLKLHPTYTVDMPSYVPKNTDVLFSSFQKPKQKRHRCRNPNKLDINTLTGEERVPVVNKRNGKKMGGAMAPPMKDLPRWLEENPEFAVAPDWTDIVKQSGFVPESMFDRLLTGPVVRGEGASRRGRRPKSEIARAAAAAAAVASTSGINPLLVNSLFAGMDLTSLQNLQNLQSLQLAGLMGFPPGLATAATAGGDAKSPAAVLPLMLPGMAGLPNVFGLGGLLNNPLSAATGNTTTASSQGEPEDGTSKAEEKGNDNEDENRDSEKSTDTVSAADSANGSVGAATAPAALPSNPLAFNPFLLSTMAPGLFYPSMFLPPGLGGLTLPGFPAGLQNAVGTSEEKAADKAEGGPCKDGETLEGSDAEENLDKTVESSIDEVAQGEELDSLEGGDEIENTGNDE

SEQ ID NO: 64 - DNA, 208209 bp, Homo sapiens
  misc_feature (1)...(208209): n = A,T,C or G
gtatttgtgcagtgtcacctgtgtgtcagactctgtgctaggtgttggctgaactaacttcttacaaatctgagaaatgtgttgagcatgtgggtacccatgactgctgtatttcagtgtggagcagttagccagagaaaagtcagtgtttctacccaagagaaggaattaatcacagttggatgcataattctcaagtcagtcttatctagagttgcagtgtatggtaacatcttgtgggaatcacagtgcagacttgcccatcacatgtgacttttcccctttcacaacagaggaaagtataaacaattggaagtaaaggagctcagctcaaagtggatcaccagaaaggcaagccatcttctggcagttattagatttccatttggggaaaagcattgatcagggggttagaagatctgggtttggatcccatccttgtctttcacagcagggtgaccttgggcaacctctctgagcctcacattcctctcctgtaaaatgacagttgtatgtacatgatctgcaaagaccaagttcaatattctatctaccatgcatattttgaccaagggggaagaagagaaagaggactggagtaccatgtgtgaggaaaagttattggaaaatatttaaccagttaaatgaggagtattctgaggtctgacacacaagacaggatattaggcaactttaaattatgacctattctcactttacgtattaaagtacaactttaagtttggcataggttggtctacaattatccaaaaacttgcagtgataatattaatgtcccactatatgatattggcactaccgagatcatcagagcaaaaacagttgttggcctgattaacaccagccatccggggacttaatggaatagaagaaagaggagacatgcttagttatttgttgttgctaacacatttatttccaaaaaaaggatttgagatgaccaggaatccctacctatcttatgtatattcatatacaactcatgttctatattttaacaaaggaccatgataatggcagcttcatagctccaagtaacaattcaagctgatcttgcctggtccctggagactctaccctggcattggctatgtggccaaccatccctctgggtctctctctgaagaagggaatgactccctgggtgaatctggtaattcactgtgtatactcctccccccaaggggtgaaccacacctaagaaagttgcataacaacttgttgccattacagtctcagctcaggactcaagaagagtctttttactttcttcctatagcttctttcttccctgtagtggctactgcaagacttgaacactctcctagggtctcttgaccacctgtgaacattacaatctcagcaggtgattaaccactgaattggtaagaaaaatagaagatattataaatgaatttgctaagcattcttccacctctctgcactccaacctacaaacttactgccattttaaccaatctttctttgatttcagaaaaacaggtataactgctcccatcaaccctgaacttgatctcctctccctgcccccaaaaccttactctcctatgtagttgtttccttcctacccctggctcctgtattttagtctagaagaatgtctatcactttgatattaaaacagcaacaaaacaaaaacaaaaaactactagcctctctttaatgtaagttctttctagatactaccccaggtctcttcattttataaccaagcttctaataaaagagctgtctatatgtcctcaactcccactaacttctcacccctttgcaatctaccttctactctcaacacttgaaactgaaaaggttaacaataaccaaatccaatggaggcttttcattcgtttcctacttgatctctctgtgacctttgacacaattgctccttcccttctagaaacacttttacctcgaggtctcatttttcctttcagaccgatctctgttaatttttcttcattggcttatcttttaatatcttcttttactgggttttctgcccatctctcagcatatgttttacatgaataagcagtgttccccagtgaatctcacctctaggggtttcctattccactccacattgattctgggcttgaccatgggattgctttggccagtagaacatcagcaaacccgaagcaggcagaggactggtaagtgcttgtgtattggggcttgccttattggaagagagactgccatgtcatcaggatgaccaagatgaaaaagcaagtggagagagacagagatagagataggtagagagagagagaggctcaactaccccagctttttcaattgagttcaacccccaggtaacccaccagatggatcataatttgttttaagccgctaaattttggagtggttctatatacagtaatagataaataaaaacgatccctgtcatcagcctgatttcctcacctgtcacatgtgttcccatgcaatcccatccatttcagtggacttaagtactgttcatacctcataattcttacccctatatctctaggccagataaaccttctaagttcccgtttcttacttaacagacatccccatttcaatattcacaaaccacctctaaaggaattcccacaccaaagccctgtgtttttccacaagctgctctcgcctccatttcttatcttggttagtgatgcaaggcaggtggaaacctaaaagggaatcttcacccttccctttcattcacttcccaacatcagtcattcatcaaatcttaccaaacatgtcacctaagcatctctcacatctattccttgatctctcccacctcaaatgctgccctggtccaggaccccatcacatgctgggcctgtcactgatgtttactcaccctcagcctaccctgtggtttggttctctgtccccatcgttttcctgctcactatctttttgtgcctccttatgacctagaggataaggtaaacatttcttcatatgctacaaaaccctttctcacttggcccttccatcctcactttttccccctgtgtgtgctgtgctctaactgagccaaattacttgcagtgctgacactagcctggtgctgtcccatctgtcccatgcatgtctctgccggctttcctgcctggtgggcctccccacactctgccatctgcagagtccagccaggctcggctcagtttaaatgtcatctcctctgttgaagcctctcctgctcagacttagtcatcccatcttctgagctatcactgtacccaacaataccacaattacacacattttagttgtaaagacatgcttaaatgcctgccctccccccaatagatgcacagagccccctccagggtggggtttgcttcattattgtgtttacagcacccagcacagtgtacaatgcacagcaagtgccaataaccattggtgaatcatatgctatactttttcagtttaaatgctttgtaaaattattttataattagttaagttagcactacaaacgtccacttattagactagaaatggagacaatgagtggcccaatattacttagattaaggtgggtaacagcaagtcatggaacattggagctggtaactgaagagagaagagccaaaggggcacagtccaggtgggaggcagcgccactttagaactgttgcccccagagctccctatcactgctccttctagacagagcactgccgtcctctaccacagggcggagtgggcctttgcttctgttttctcttcccccatcagaagtcagcccacatgacaagcacttagtaacaatcttgagtctagacagtgcaaagaaataggtggtagcttttatgtcttcccttttcttgtcttaggaggtcttcctcacttttctccctgcttccagtctagttttccacattcttcaccctaccaaagagatatttcgaagtacagatctgacttgttactctctcacatgaagactctccaatggctgtccataacctttggggagaaatctagagctctccttggacctttctacttatctagtctaatctactacctccttacccctgccacttaaacaaatgtgtaaacatttattgagttctttctacatggaaggctctatgggacctgggggtactaaaagacaaggcacagtcattgttccccagaagcttacagaccaatgataagacagaacaagaattaattatagttcaacataagtgtgtattgatggagacgggcatccttgggagaacaaaggaagaacagccaacccatcctgggaggatcagagaacactgtggaggaagactggctcaacctccatgttccactcctaatagatccacttgcagtggcctggactcactgggctatgaaaccactgttgtcttcttgggaatccctcctcccctgcttgttctgatgaatctccctattctgatgaattactgtgcctactcaagacacagtgcaaggctctcatcttctaggaaggcttccctgatatcccaggtagcaaaaatcactccctgctttttttttttttttctgatgcaggagatgaacctggaatctcgtaaaaatgagtattattattattttttagagactcacaggctggcctcaaactcctgcactcaggagtgcaggtcctcccacctcagccttccagtagctgggactacaggcacatgccaccaccatgcccagcctcacttattactttatgctgccacacagcatgagctccttgaggacaggaccttaccatgtctccagtgctattttagagtctggcacactgtaagcattcaacaaatgtttgctgaaacaatggctcaaactcagctgaacatgttgtctttaggagccaacaatggcctaattctagcccatagtggttttcttttcatctgatatgttgaccttaccaaccttgaccattgccagcaaaagctcctagcagtgttctgggctaatagagataaaatgggaattggagctaatggtttttcaaccaatatactatctgcttaattaaaagatactatactatgggctgattactacaaagttttacaacatatatacccaataaatgaaatagtccggaaggtactacaagtatagtatatgaaaatattttgaaaaataatggaatcaattcatactcatatactctctatgtggaaaacgcgggagcataaatctaacaaataattttttttttctttttttgcagaggaaccaaagccaggtactcttcaattagcataagaggaaataaatagtaactttaaagcagtacaactaataaggaaaaaggcaacatcacacaggcaactataattttagactatatgaaatgatagatttttttttttttttaagatggggtcttgctctgtcacccaggctggagtgcagtagtgtgatcttgactcactgcagtctcaacctcctgggctcaagtgatcctcctgccttagcctcccaggtagctgggactacacctggaatgggccaccacacctggctaatttttatttttactttttatagaggcaaggtctcactatgttgcccaggctggtctcaaactcctgagctcaagcgactcttctgcctcggcctcccaaagtgctgggattacaggtgcgagccactgtgtctggcctcataatagaactttttaatgaaaaggcaagtgaccaattttctaacaaatacagcagcacttacatagccaactggtttcttatttatttttatttattattactactttttgagacagagtttcacttttgttgcccaggctggagtgcaatggtgtgatcttggctcattgcaacctctacctcccggttcaagtgactctcctgcctcagtctcccgagtagctcggattacaggcaactgccatcacactcggttaatttctttgtgtttttagtgagatgggttttcaccatgttggccaggctggtctcaaactcctgannnnnnnnnnnnnnnnnnnnnnnnnnnnnnnnnnnnnnnnnnnnnnnnnnnnnnnnnnnnnnnnnnnnnnnnnnnnnnnnnnnnnnnnnnnnnnnnnnnnnnnnnnnnnnnnnnnnnnnnnnnnnnnnnnnnnnnnnnnnnnnnnnnnnnnnnnnnnnnnnnnnnnnnnnnnnnnnnnnnnnnnnnnnnnnnnnnnnnnnnnnnnnnnnnnnnnnnnnnnnnnnnnnnnnnnnnnnnnnnnnnnnnnnnnnnnnnnnnnnnnnnnnnnnnnnnnnnnnnnnnnnnnnnnnnnnnnnnnnnnnnnnnnnnnnnnnnnnnnnnnnnnnnnnnnnnnnnnnnnnnnnnnnnnnnnnnnnnnnnnnnnnnnnnnnnnnnnnnnnnnnnnnnnnnnnnnnnnnnnnnnnnnnnnnnnnnnnnnnnnnnnnnnnnnnnnnnnnnnnnnnnnnnnnnnnnnnnnnnnnnnnnnnnnnnnnnnnnnnnnnnnnnnnnnnnnnnnnnnnnnnnnnnnnnnnnnnnnnnnnnnnnnnnnnnnnnnnnnnnnnnnnnnnnnnnnnnnnnnnnnnnnnnnnnnnnnnnnnnnnnnnnnnnnnnnnnnnnnnnnnnnnnnnnnnnnnnnnnnnnnnnnnnnnnnnnnnnnnnnnnnnnnnnnnnnnnnnnnnnnnnnnnnnnnnnnnnnnnnnnnnnnnnnnnnnnnnnnnnnnnnnnnnnnnnnnnnnnnnnnnnnnnnnnnnnnnnnnnnnnnnnnnnnnnnnnnnnnnnnnnnnnnnnnnnnnnnnnnnnnnnnnnnnnnnnnnnnnnnnnnnnnnnnnnnnnnnnnnnnnnnnnnnnnnnnnnnnnnnnnnnnnnnnnnnnnnnnnnnnnnnnnnnnnnnnnnnnnnnnnnnnnnnnnnnnnnnnnnnnnnnnnnnnnnnnnnnnnnnnnnnnnnnnnnnnnnnnnnnnnnnnnnnnnnnnnnnnnnnnnnnnnnnnnnnnnnnnnnnnnnnnnnnnnnnnnnnnnnnnnnnnnnnnnnnnnnnnnnnnnnnnnnnnnnnnnnnnnnnnnnnnnnnnnnnnnnnnnnnnnnnnnnnnnnnnnnnnnnnnnnnnnnnnnnnnnnnnnnnnnnnnnnnnnnnnnnnnnnnnnnnnnnnnnnnnnnnnnttggtgtttttctcaactgactttctgcttggcccgctccattcttcaatgccctccttcccaggtccttagtacctttccactgtcctctggctacacggaactcaggtctgtcctattcctccagggctcagactccaaaattaacattctcccttatcaccagatcaaaactaccaatccactagattgtaaactccatgagggcaggacgttttgtctgttttgttcactactatatctccagtacctagaaccaatcctggaaactcttaggcactcgaagttgaatgaatggctaagtctctaaatttgttactctggctagctgttgggaggaaagcaacccattgaaccaatttacactcatctgtgaaagaccagtagccccttatctcaccctaaggtatttgcatacttaaagagaaagcttgtgaattcaaattactctcattgggaaaacttcaatagtgaagcaaatggagaaaaaacatttcaggctaaaggggagtgttgggggatggtggtggtgtggtgagagctatgactcaggtaggccagatctgcctaggagtttgcccctgagggcctctactttttaaggccccttacgttccacaccaccacaacatctaaaagcttagagacttcttcatgatggctcagggcagtgatcaggataaggagactataagtcagaggacttatattctgtaggactgtttttacattgggtactggtatatatcaaaaggaagtttcctagctttcgagttaaatgtacaagagcacagggaatctcctcatagtcatatttgttgataacaagttaattgcaatattgtaatttcactatatgtagatgtcattttttttctcctgtgaattgccttgaaatagatgcacatctgatatcgagctgtggcacactgtaaaagataagacataattttttatggcacattattttaaaaatgtgttctaatatagtcaggtactagcgattttttttctagacattgtgtcctgtttttgacccccccgccccacacacccctaaagcacctttcatatactttcattgggaaatataaacttaatggaaacagtagcctaacctcagagttgtgattcttggtttgtgataccgggtttaaaacagatggaagttgattttagtggtttcaactttttaaatgccagaattctttctgtactgtcttctatgttctttttgatgatctgtaagctccttaaacattaaaacatttatttcttttagaacaaaactcaaatacatgatgaaagcaagctaaaagcagtgcatttaacaaaccacaatataatgtgatatatttatagaattattactaaaatcagaaaatcaatgtcttagtgattaagtctaggataatcaaacttattgaatagttgcagtagttacttaatgagatagttttgattaatcttttgtccaaataacaatattgtgattacaggcttagcactacaggtagtgtaaccatcagtgagtgagattagtacattttacatagttttgctattttctcagtttattttggagtccagtaataaccagtcagtctgtacctgccatagggcaatctttggttgatatgagttcctttcctgattttaaaataagtgcaatctttaacctaataaaattatcttaaagtttacaattgatggtttaaacacattataattgctccgtattttgcagatagaagaggcttaatccatgtttgtagatctatttcctaaaataaaaattagtaaaaaaaagttttttttcttcaggtttaacattcattttgtaccgggaagagaaatggaataagaggctcggatttttaagactatgcaatcagatacaagtgccattttggccaaagaatgagtaaaacattctagtcccgacacgtttaataatgggcatacatcctatttctttgtttcataatcattgagctctctgccttctctctcttttttggtatggtaacaaattcgacaaaatcaatgccatctagttaaactttttgattaagtagtggatccggtgtcctatccacgaagaggtgggaaaagcgatgtggagaagcaggcacgaacccatctggaatggaacatgtcccttccgaataatttcatgtgggaaaataatttcaagttgaaggataattactgcagagactgccagtcacccccggccgccgccggccgcgcagcgtcggaaacccttcgcggcagccaggagggtcgcagccctcccggagccccgcttcctgccccggggcggcgcacccggctccgggaaggtgccgcgcgggagacgtggcagcagcccctccagtccgcgcccgggcgcagcggccgagcgctccgtgcagccgggcaaggaagactccgcggcagcagcgcaccggccggcggggagacccgcctgaagcgccggcgcccgccaggggacgggaagtggcgcccggcccgcccttgcggcccgcggcccgcggcccagcagctccgcgccgccccttttctctcggcctctccctcggcctccgccaccccggccgaattcttgcataaattatgccaggcgcgcctgacgtcaggtggcggcgcgcgggcgcgggcgcgggcgcggcgcggcccggagggagctggcggcgggcgcgcgcggccccgcggcttcgggtgcgcgcggcgtgccggacgcgcgcaggcgctggcgtgctggggccgcggcggcggcggcggcggcggcggcagcggcggcggcggcggcggcgcgggggttgagtcgtggtggtgcggacgcgctcgtgctcgggaactatcggattaaacttgaatcgagtgaaattacacaaaggagcgccgcggaggaggcggcccggggacccggacaccctgaaactcaccagagacccgttcgcccccggccaactccgtgcccgtggattcagccccctggccgcagctgccgagccaactccggagcccgctctgcgttttgttttcccctcggcactaggcagcggaggagcccgaccgacccggtgagcgcgagagttcgcccggcgcccccgggaggggcggcggcggcggcggcggcaggaaatcgctccgggccggggccggggccgcgctaggagttgggagcgaggagttgggcgtgtgcggggcgaggggcgaggggcgagggcgggagggggccggggccagcgcaggagcgcagcgccgcccgcgtagtgtcgccggcgtcgccgcccgcggggcccgaacccgcgccccgagcgccgcccggcgccccaacttttgcctgcgtccgccgggccggcggcggcgggggcgcgcggtgcggccgagggtcacttcctcgcatgtaaatggctttttgttgtgctgccggcgtggggggggggtacgggggacaggagggagcgtgtctgcgcgcgggggagcgcgagcgcgtttcctcccgccggcgccgagcacgagttgccggctccattcgagagaaaaaggaaggaggaaaagttgggctccaactcaagtgcgagcgggcgatgggcgcgcgggcgcggggcggctgagcagcggcggcggcggctcggggacggcggcgacccccgcctcccgcccccgccccccgctccggaccgaccacgccgcgctcgccgggagctgcggccgcaccggcgcgaacaaagtgcgttcctcccggcgcggcggcgccagcccgcgcggggaccgccaccgagcgaggtgggtcggcggcggggaaagtgcgcggggcgccgcgtggggcgggggcagcgcgaacacgcggcgcgggaggcgtcccgagctcagccagtgccggtcgcgggcgcggagttgcgagcccggagttgggggctcctggggctccccggcggctcccaagtgcgctaggaggagaagaaagggagcggggccggggcgagcgccgggaggcgcggcgaggaggggaccccaccttgtcgagctggccgggccgccggcggcggcagctgcataatagcgactttaaccttccaacgcaactcggctcccccgccccccaacccgccgggggtcagcgccggtggggggtggtcaccaggtggcccccgaggtgacccgggtgcgctctgccctcgcagagagccgcggcttggagcgtgaacggccgaggtggctggaggccaagcggtcagcggggagaggaaaggagggcggtgggggacgcgttgtttgtttggttcnnnnnnnnnnnnnnnnnnnnaagatgttccttctccatcctttttgggtgattttagctatgtgactatgtgcttactttttacatgtagaaatcatttactgaaaaagaatcactgtcttacaaagttgaagttttaagagccatttgctcagacctgactaaacatttttattcttgcaatgccacatttatattcgatgtttgtaagatggccatggtgtctgctatcaaacccaaaaggttgtatttagttaatgaaagatgaaagatatctattacttataagtttatcttaaaagtcaaatgtgaatatttgcttacctatagaggtggtgtctattagacgggggtgggggcgctggtcgggaggctctggggaaggagccgccggccccgagcagccatcattaccgagccgcctttctccggatggctctgcctcgaggagcccggagccgtgggagcgcaccccaaactcccggccggccgcccgctttgtgagcgcccccgtgaagcgagcggcgcggagagtgctcctgctatgggtcggactcttttcctggaggtcacttttagagactgctcacgccttggtttaaactagtttttttccccctcttctgaacagacaatggacaaaagaaaagtagcaacccacatggagagagtttccttttgaattgctagaattagatacactatccagcgctccacttgctaagtatactttttagtttcccattgtatattatctagcaatcgatttaaataacttatcttaaaaagtgtcccttttgggggcttaatttctggaatacattacatgtcttaatttatttttaaaggattttgtgaggccctgattttttattttctaaaaattttaatttaagccgtctttgcagtgggcgatacctttctaaggggttaagtgttatttcaccccagttctctctcggtaagggagggagtactcagtatacgtagtaatcgaagaggaaacaaaatacgtgtctttatttcttcactgatcttgtctgacgatgacaaaaaatatcttagtgactgtgaccttagcagcatggctacctgatttatcccagttataattatatttagattgcagtaatgtctaagtacaaggtaattcctatttcagaaataacttgagcagtgattttacgaagttgaatccttctcccagcccccagagtacatctgtcgcgcagtgtttttgtcttgctgttgcacaacagaagccctccagtctttaccctaaaatggcagctttcatttgactgaggcccattcattgacaatgataataaagaggctgaaagctagatgcttggggcatggagtaggacttggtttgcctttctaggtgataagtaggagacattttatgtcttccagtttgctcaggaaaagtttattttccctgaaaaatctgtcttgtagaaaaaagttatagtaaaataatttggaaatgggtaaaggcttgagcagcaaattttagaagctaaattttcttattttgcccaatagtggaaatatggcattctcttttttggtaatctgctgataaaaggacataatggatttttgtcaggcttgtaacaggtgaatttcctcatgctggtactcaagaattgggattgttttctagcactgtgggtttttttctctttatattttctaattttttctcctgttcgagtcactaaattgaaccatgatgaattgtatcctgggtctatgctttcgcgattgaaatgagttttcagataagaaatgaattataattttaaaagactggtatatgaattttaaattattatattcatttaatcaatggccttatttttaaattagtttttttaaaaagttactttcttttatatgtcttaacatggaaggcacaatacaggaatggtagagtggttgtaccggtgatgtttaaaaacccaaatattattttcctctttcaaggaaagaaataactttttttcccaagttgaaaatatggaagtcaaatttataacaacgtattcagtaacttagttttaaaatagtacttttatagattcaccagtatttggtctagtttttaatcagttcaacttacaggaacatttcctaaacttttttcataatgagccttctttctaggttagccttacttttattgagttaaaatgaataccatgaagagtacctttataatacagtaacatcaaggaaatgttacaaccgtttttcatacagatgcgaagtcaataatatgttatagtttttaagcagttaggtcaaaataacagaaatattttgttatgagaaaatacactgtaaatgcttctgtgtgcctgctgtgtaacccataaaagccatgtaagtgccaagttagtgtagttctttcaaacctaagattacagcattgtattccatatgcttgaaaaagtttgcttgccacacagtcaccatgcctttagttaactttgattcagcaaaccttggcaagccttccatggttaaaacaataaaaggcagtactttcctttagggagtgtaccatctaatagagagcagttctataggtaagcaaatattcacatttgacttttaagataaacttataagtaatagttatctttcatctttcattaactaaatacaaccttttgggtttgatagcagacaccatggccatcttagaaacatcgaatataaatgtggcattgcaagaataaaaatgtttagtcaggtctgagcaaatggctcttaaaacttcaactttgtaagacagtgattctttttcagtaaatgatttctacatgtaaaaagtaagcacatagtcacatagctaaaatcaccaaaaaggatggagaaggaacatcttaggtgatattaagatgatgtcagcaatatattggctctgtgggaccctttcaattgtcttgttcactcatgtgggcatatttgtgtatcttaaaaaaatctgttcttttcatgcgattggaaattcagaatttagcatttttctagacaggtttccaaaaccattatggtttcattagttcaggagatactattttcccctttctctataaaactttattatttagtctttaaaaaaattgttgacattcaaaggtgactaatgttaaaatataaaagaaattgagatcaataatcgcttggtttttctacaaaaaatacaaagatggaatgatttatttcaatttgggtatcactcaggttgcagtgatggcagaggtccatagctgattatggtggttgttaagagctaggaaggtaatttaaaacatcatgactatgtgtccatattttacttttgtcaatagattaaaaattgtaaatgaaatcacatctgcatgataaaaagaagaaatagaaacaggaagttgtaatgatgttgtcaaataaaaattcattttatccttattagagaatgattggatatttagagtgtgaggaccttagagagctagttgaactttctcattttacagattaagaaactaaagtccagagagattaattaaatgaactgcctctgactggccacccactgttgcagagcttatctcagttacagttgtgttcctggtgcctagcatcgtgccagtgcaggaggggtgctggtcttgtctttgttggctctggaagagtacagctcttgctcatgttctgactcaaaggtacctttaggctttagaatcctacagcataggacaacataactcttaaagatgttcctaaaccaacaataatttgcttctgtttttggaggtttttttttttttaactatgattatccatttaggaaaaatgcagagataattatttcaagatttgacaactgttttcactttagatgcatgtattgatcaccatagctagattcctgttgcattttaactaatgttaggtgactgactgcaaacatgattgttttttcagagaaggatttttttggggtttctgttctgcttttactttgaaaattagaaatgtctttttaaaagtaaaaaataacgtaggtatttatgaagaaacttaacttgtcagtaaaggctggttcactctcaggcttgtttacctatgctaatgtggaatctaaggcactttttaaagtgaccctttgagccttgcttcctctgtgcatgtcaggattggctttcacggccacagaatctggactgtgattagtcttcctgtttcatctgtggttttgctcattgattcggctgtttgttgggtacctgctacctgaaagatgcaatgctatgaattgtcaatatagtgatgacatgagaagacatggtaaactcacacaaaaactagagctactgtaaggtcataggtgtgatgcagtcggtgccaggaggagtgagagcttaggacttggggattccgtcagttgggtggggtattaccccttaggaagtggctttagcattaccatctgaatgatggtagaagaaggggtgagggcacttcaggcagtgcccctcacctgcagggaggctgtgtgtttgaggcattcaactgcaagatgagactcgaggcaggcagtatccaacttggtcagggctttcaggatatcaaatttgggatttttgaaaaaagcagtaggaaccactgatgagtgttaagcagcctttgacacgagcagagtagtgttttgaagaagattgaattggtgggtgcagagaggacaataggttgtagacaatatcctgcctgcttttgttgtggtctgtgggatggggaaatcacaatgatttggactagattggtggtggccatggggatggagagaaatggacagatttgagagatatttaacagtttcaacgaataggacttggggatagatgcgctctcaagagggagatctcagggcatataggtttctagcatgttccctgcttggctggttggctactgatcctattcacagaggcaagaatcagatctgctgaagatttgagaaggaagctcatgagttcttgtagcatatgactgaggtagctgataatggaccatgatgacattgttttatcctttgcattgctagtggcattccagaactttaaaaaaagtaatctgctagctttaaccaaaagatgttggacgtggggagttcatcaaggaatgtgaatgggttcagtgaaatgggagaggggagggaagccttacttgctgaatacatagcactttgcttgttacttgcctgatacatagcactttgtaggagtttgctcattccaggttgagcgtagaatcctgtggtaaccagaccttggcacattttgttcttctgtatctccccttacggaggctgctttctgttgctagtcacatattagggcaaggtctttgggttcccggcacgtgggtggcaggtcccccatgttctcggggctgcagtctccctcggagagagttgtattttagaagttggttgtagtcatacagaagcaaggaaggagtgaatacattatttaaataaatgtggagaagaataccaatgtttatcagaatacttacctggtttttagtggagtatgtataaaccagtttaataagtaaattaccttcaaagttactttgttcagttattatgaaaagtagattgtaaagcatggttgccggtggcagatgagcgatgctgttacacccagaaaagcttctgaattgctgactttaatattatataagaaaaattatgaaaatacaggacagtaattttggagcttttttagggaagtgtttgtatttttgtgtttgccagctaatatgggtgattgccagccaatatgggtgatagaactttttgttatagatcaaattttgttcttgtgtgcataaagataaccttcctgggactcagtgtctttaattaggggtctgtttcaaagatacttttattgtcattgtgtgttcctcatgggcctttctggtggccattgtgactcagtcaagtcttctgggttccttcctgtcttgtgttgtttgtagggacatgcttcatgtgaaagtttaccttcacctgcaatagttttgagtgattatttgaataagcttaaattcaggagaagtaatgtttccacgtgtggaatggcaggaaaacttggtgcactaacttcagcttcagatgggcttgtgccaactactctgtggcaatttatatctaatactatttcttcaacttgccagtttttcttaaaaaaaaaaaaaaaaaactctttaaaatacattctgtcattaggtccagccagcagtgtattcttagggtgtaagagatcatttctaagaggtgtagacatcgaatggaaaggcgcatgcaggcccctgtggatgtggctttaatggaagaatagaggggatgcttctttggggcctgccttctctcctggcatctgcagtggctgaggaggcagcagaggtcatgtggtggatttgagttttccaccatgtatttcatcaggatgaggttgggcaaatagccatctgctgctgagcagggaccgcgtgcgacctgggtttccacacccaccctttgtgtagggaaaggtgtgcaattagacacatgtgttaggttggacacatcacctcctttccctagtatcctcagtgtaaaacagtcagatttctataccatatttgcagtatgtctaaaaaagggtacatggcaccttactagttaattttctttctagttctgcagcaagtttggggaactactttaactttttagaggccactgtgtcctcttttcatcattttgaaagaaaccacaaacattttatttgttatccatttttgttttgtttcgttttcgagatggggtctcacaatactgtccaggctggattctaattcctgagctcaaaggcttttcctgcctcagcctcccaagtagctgggattactggcatgcaccactgtgccctgttatatcaacattttagaaatctgtctgttgatatttaaaacataattagcaaatgtgcatattatttcaacacacctaaaaactattaaacatctttaacataatactaagcagtcatagtgagaagtccctcgaagaattataagcatgcctttagtttccaaggcagtgcttgctagcatactaagtgaataataaaatcagtttgagcacaggaatatgataaaaaaaaataccccagttggtgaagtattttgaagtgtatgagcctagcaattatttatggttagaactggcactatattgaaattgttgagcccatatccttaaataattttttaaaagtctctgttaaagtgttttatgttcttgtatacttggccttgtttgtgcttgaaattttgctttcattaatctcaagtgtaccgatcttgcaagaaaaatcatacatattcatcttgagaatttcaaaatcttgattaacagtgtaccccacccttaagtatatgttgggccaatcaagtaaaatagtgcagaaataataaaacaatattaaaaataacagtaataaccataatgaccggctgttatttccagttgggtagttactcagctgagtgttgtcatggatcatttcatttcctcatcagagcaactctaggtaataggtagaactattatccccattttacagatgaggagactaaaagggatgagaagttaaattacccagggccatacatttctagcacgtggtggaggaggaatttgaatccagatgagctagactccacaatctgtgtacataagcatggtgctgctgttgccacgtagaccagctctggagcttgcattgttgccgtcttaatagacaaaggtgtgttaaaaatacccatgccatgctgtgatgctacctattgctgtgtcttaccagcccaggctatttttttctgtacttcctctgttggtgcctgctgtagttgtggggccatatgtcatgggatgtcttcgtacctaaaacgaccaggtccttgcctttcacacttaaggcccttctgctcacatggagatgaggagaagagttgttcttgtggaggttgccttctgaggcggctgagaatttgagttttgatgtcggacagatacgggtgtgaatcataaaaatggacataatacattctcctaactgcccagggttatggtgaaggttaagtgaggcactccagctaacatacttggtatagcatatggcatattcattgagtggttactatttttattagttcagtttaatcatggaacttatcaaatcatatgtattgcttttacttttgttttaaaaagtccctcaaaccataatcctacagatgactggacaagaatgagtggcctaaaatggtgactggctacacaattttcatttttcttcaggagaagacatttgaaaataacatctttatgtcctttgtccatcagtgcaaccagatgttatttgcctaattctcttgttgattatatagagttgattcagatatcccaggtactaaaagtgacaggtttgagggagtgcttatctcttgtcctgaagatgttcatctcctaccagagttatggctgtccttctagtgaaacagtcatttcttctttgtcccaaatctgcaattctccaaacatggtgggtgatgttatcctagatgatcagtggtgtaggcatgtttgatcagctctgggatattacggttttctgatttagaccagaggtcacagggtgttctcaaaatctataggagctccagatcctcaaatctcagaagctttgattcctcagtcccttcctcccaagttctctttaccatgtaaagaggagacaagatggtatctgaaatgggagtaggcttgggttggggtcagggatgtgagtagcaactagaacataaggaggttcttaggagagggaaggctctggggtagcctacttagaatctcactgctacccagattggcagggaaatggaagagatggagtatagacaattttcattttattctattctatttctttacttgaaaatgacttggaataacaaaataagtgagtcaaaaagtaaataactggtaacgtgtggatttatgggagatccttgtactattctaactttactgcaagtttgcaaatgtatcaatatcaaaagttttaaaagaacagtaactccaaggggttgatgtcagtagctaacatttatggagcataaagtttgtgtcagttagcattttgctaagctatttacatgaactatttctgctgaatcctaaagtaggattagtcaaaatgctgaggtaggaataataattgctattttacaggtgaagaggttgtttaataaatttgtctaagatcatagtttttaatgagtagtgttgggactcaaagcaggacaggctcatttaacagcctgtagcattaactgctctgcagaaattgctttggatagtcccatcaaaataacctaggtcttagaaggataggaacaacaaacatcatgatcttacacacctgcactttctagcaccagctcctggagaaaaatcgagaggctgaatggtgtctgttaacagattatagtcagtgaggcctctttcctcagatgttgtatcttatcaatggcagacattttcaacctgaaagacacatgctcattacaagacttagtagtgctctaaccctgttttcacttatcagtccaagacgtagccgacatcaaagtattcagcttattacagaattgacttcctcaaagtttctctcagtgtttatccaagatgtaattcacttagcatctttatctcgctgcacaggactagagttgccttcgaaaaaactcaggataccacttggctatagatcacagtacttgttcctcgtatttgcgttaacttgtgtgaatatgcagcctccgtgagatatttgcatactgcttctgtgaacacacaggacaacagactgtcttccgcagtcatacactcagtcatattctcaaataggtatacagttcaaatgtataaatcagtagtcttacatgttacagagtgggtggatgttcctttgccaggggattaaaaaaaaaaaaatcccaagtcttaatactgctttctcccacacgaatagtctatgatggtgtatttttggattttgtacatgtttatagtttttttcttttcacaattttgaataaactgttgactagcttgagtatggtaagcctctacttaaaatgtaaattttgctatttttggtgcatttaatattttaatatttgtcttaattgtgttaattttcagagctgtgtttatcaccagatttagtatgttaacttttcaatgttcccacttattaaaaaaaataaaaaaaataaacatctgggctggtgtatgaagcaaacctccagttttatagggaactttgtggctactctggggtgctgagagccttccatttagctgctaaaggccagcaggataaggaaaactgtcttatatgctgtcaaatacattaataaggacacaattcaaggacataagtaatttccccacactgtggagcacacaggtggtgatactgctgtagctgaattgctggctggcagtcagtgccactgccatagcaccacaattttcatttttgttgttgttttactgttgtctcggtatggtgaatggttgggctatgggagtggcacagaaacccaggccgtacctagcagaatggttgacagtcgccgactccctgtcattttctgcagctcagtattttcaggtcagggagctgcccatgtcatttgcatctttctttctttctttctttttgacggagtcctgctctgtctcacaggctggagtgcagtggcgtgatctcggctcactgcccacctccacctcctgggttcaagcaattcttgtgcctcagcctcctgagtagctgggattacaggtgtgtgccaccactcctggctaatttttatatttttagtagagatggggtttcgccatgttggccaggctggtctcgaactcctcacctcagctgatccacctcggcctcccacagtgctgggattacaggtgtctgtgcccagctgacattattctttatggatcactaccataataatatcaacaataatagtgtctttatttggcaaacctgtaacatgactctttacttctttataacactgcttcagcctgctattgatctagtgagtgatttgacttgtttcacctaatactaggcgagaggtaagaaaaacgagtctttttattcaaggcattaaagcattaattcatatatttatacagtttacttgtgcatcttttactctcctgatacactacttcgtgtaaggaacccccatcctccttttctcactgttttgagacaggtgcttagaaggtgcttgtccattatcctccaggcagaaaaagtaaagtcgtagttggtacttgagttgcatggggaggaggaaatgattgtctctgagcctgggcttctgcctcagtcctgcagctaatgttcttacccactcctcccttccacctcaccaggattaagaaggtacagagttgttttgcggaaataatgcatccattggtctttaaggaagattagaatagtgagctggaccgaggtaactttcttacctgttttctccaagaaactcgtaaagtgtgtttgttttagattattttaaagaccctgtggaatttgtaaaaagtttatctggtaagcttagaatgcctgaaaaaatagatatttattgggagttagaattagacagtcgcttagggtgcttgttaaaaatgcagattcctcaactccacacgagatttattgaattaaatctccctgggtcatctagaatctgaatttttatcaaggtgcttctgatgtactctgaaacttacgaagcaatgtggttagaccaatatgttatgcaatgaatgtactttggaaatacgaaaaatttagaaaatggcaaggaatatgcttgtccatcattcatattataagaattgcaaaaattcttacagtgtattttggaatattgcaagttatgttattctcttgcatgtaactgaatgaatgtggctgctgtttgacacactaattactataaaggtgaagatggatgactgattaagcgtttgaaaccatagtctttaaaggtggtgctaaaagggtagaagatagattgctttgtatttatttgttaaattttattttcatttctaccactgagtaattaaaagcttgttttgtatatagttctggtttaaatggtacatgtctgccaaactaatacatttgttaagctacagtaactattttggggcaaccatttcaagccagtgttatttccacgggcatataatacatttaaaatgagaatcatcttaaaaggtaatttagtgagtgggttagtgctttcttggaggacttgttagcataatttcgtgtaagacaggatgcttatatgaaaggcataaaggaagcacataaggcagcttttttcctggcccttcccccattcccctcccttttggatagaggccatactgaccacccctcttcctgacacttcaggttatcctggaccttggccgaaggcgtcattagggtcctgagctttcccttccatgctgcctcagttgcttattctttttcttcctaccccctcaatatagcctgttctcaggggtttgatcctggcatcctctgggtctagttcaggcccacagcaaccttatttgctactaactcctacgtctgtattcttatttctcgtatctcccccaaactcctatccttaatgttcccaatctgtttaaaccgaagtcatcataacaactccttcttcctgcaaaagcatgaaacaaaagtgtgaaacttcaagcccagccctttctcttgaacttaggctctgcactgcaagtctgcgctggtggtgtcaggtcctggcaacccagctgatgggctgctccagactccacttcctgtgtcctggcctgttggcatctttgttccctccactatgttgtgccctccgcgacacccccttggcggtcagagcgcagtcccaggcctgctaggtcattatggtcactgtcaacttgcacggttggggagagtacagcaaagacccatgttagggggaccctttccttgcttccttcctgctcccctgtggaacaagtccctgtctgtctgctgcaccctttagaccttgccaccccattgctcctgccgctcagccttccttggggcacctgcagagagagggtcccccctccagctctgctcctctggcagggcttgtggggtgccttccacaggcaagacctctgttgctgctgagccccaacagtttagtgtccaggctccctgtcttgggcagggcaaggttgccctgtgcctgtggcctgtccttccctggcctcctcagctatcgagtccctgctcagccctctcccagctggattagaatgtgggtgggaagaggaggtgagttattctggcctccccaaacccattaccacattcctgacatctgattggaacacattttcccatggtagctttattatggttaggcactggcgggacaccgtgggttagcctagtgcttttgtaggttaacacaacaatgtcaatagtataatgttatatccgagggaaagtgatccaactagcagctgaaggccttttggggaggagctgctttctcctgtgagcccccatggggaactgtcctgtagagtgtcatgccagcaccatggaaccatttggtggcacaagcatcagagcagtcacctgccttgccagtgggccctcaggtgggtttcagaaagctgggtctatccagactcataagcgtgaacttttacataaagaaccatgactgtggcaattctaagaaggactttaatgaatgcaaaggcatggccactaaagacaaggaaggaattcaataatgttttcagattgacatctctaaagagcgaatggcaatttcggtgtgaggcttataacagaatctttttggcttttggaaatgtagatgtgcctggtgaaaaatgttattaacttttttcaaagataaataagaaccatgagcaggcagatctttagtctgttgctactaacttgtcggtataactttaatgtttgtgaaggtgtgcagatgtgagattatggctttgctaagctctgtgggagatactaaaaatgttacttctagctaggtagagcaggttaacacacttatgaccctgtggaacaggatagcacagtctgtaattaagtgctaagaaggcgtgatgtgttgtagtcattgtatagtggagaaagaaatcagaaagcgtgacttgccctctcctttgataagttagaggaactgagtgataatgtgaaaaaaatcacggagaggctgtcagccaagggtcctggcagggagcaggtggccagcccagaacatcctgcaaggaccagggcaagagccctttgtctctggtgtcctcctgggagggcagctttgcaggagctatggcccccagggagagcaacacagccactgccaccccctgttgccctccccacctcaaccttcaattcaaggaccagtcttctgggactcagggaagatcagttagcctgccctgagggagaggggcagcaggttggatagatagggagaggttgagcagtggtgaaattggaagcttagactgagtgagattctgacttatattacgtgatggaaatggagttgaaaggttagtttggcagcatgtgatggattgcggttgaagagagactagaggcaaaaagtcagaggctgttgaaatagcccaaccaggaggtggtagagctttggctaggcggggaaaatggactgagagaggaaaagacacagccatggacattcagggtggggggaagagggactaggagcctggcatggagcggagaatagcttagaaagcctcctttcgagagaagtaaggttgacatttggaacttagatttgatccaaaatagaaaacatttgagcagggagaggtgtaaaaagatcaccttagaaaggtttagaaataaagctactccattgataaaggtctgcaacttacagttcaagaaaataggtatctaacatttaaaaacaagttttaaaataaacttcttataaaaatgattttggaacatataatttgacattgtttttataaatatccttataacattgggtacagtcagaataataggacagaatttgatattagtattatactttcagaatcaaaatagcacagtgataatagcacaagagggctacagaaatgcaggtactagaaattgaagtttatcatcttagcatacttgacctttcttttggaggtgtgtgttgtagcgttgggaagcattgtctcatgtttgatgctttagcaactctaatacttgtgtatgggtctactaaaaaggcgcatcagcatgttctgtgagagaatacaacagagaagcaattgcagtctgaaagaaaagcagtcaaggatataagcaggtaatgtgtggaaagcaaacttaattgtcaataaacacaaaaatttccaaattatggaataatttaaaaatgcaaattaaattaaaatgatatacttctcctcattaaattagccaagacttaaaaatattctttatgctgctagaatatggtgagacctgcacactcactgttgcctgaagtttcataagtataaacttctttttttgtgaagaaagtagagactgtgtgtataaagatctttacaaatggccattcctgtggtatcagtcatctatcccaaggaaaaatctaaaatccagtcaactgttataagccacagcatttctttttgacattgaaaaattgagaatggtgaaatttatgctgtagtcatgttagaatatcatgcaggcactgaaaatcatgtttttgaaaaatgtgaagcttgaaagagtacaaaagaacatactaactgtatcatgattagttttatacaaattaaatttttactttttaattttttaaatatttctatgaccaggtgtctacaacaatacaaattaaattataaacataagaaaagactaggggaaatacatcaatttaaaaaattattagtttcagggattggcagtttcacttaattaaaagctacaattccacagttaaacagatgtggtttgaatctgcctgaccgcttaactgtgtgaccttggatagtgacttactagttctatgtgacttactaactccatgaccacaggccaattacttaattgatctaagacgcagtttcttcagctgtgacatgggagcagtaacagtacttactagttcacaggcttatgtggattaatgcaacagtgcatctaaaatgctccagcagtgcttgttgcatcattagcacacaactaatgttaattatttggattgcaggtagtttttttttttttaattcagtctttctactttttaaatattctaaattttatactgcaaggattgtaaaactcaagaaactctctgatactgtatatggaaggaaggactctgacagtttttcagtaattttgtggtatagacaggaaaatctttttttaggtaccataattttccataattttaaccagcgatatatctgaaacaatactttcaaattttgcatgttttttttttttcttttctagattgcttggcagttttggctttttttaatctcaaagaaattttgttttacagtaagttacgtttaattggaacctcccccactttttttttaaagtttcctgaaatcaaggaacataagaataatttttaaaaattttctgtaggtgagatctgaatttgattaatattaactgcacatttagctctcagatttcagaccgatttagtgttagcttctgtgcatctcacctaattgttaaaatatgtgagcatgattttgatatttgggaggtggaagagaagcctcttgagacttttgaactaaagttaaacagtttattctgtcttggagttagttggtgtaggttagtaggaagactttaacatctggagctctttcaccttggaattgtatctttctcatggaagaaacacatttgagctgcagacagcctggaaaagctttcaggctatattttcttcacaggagggcaatagctttgcacttataataaaatagcttcaaagtttttgtctccttgacattatgttacctttaatttaccctcaaacattattatatcttctatagcaaacagaggaggataagaaaaggaaaaacagagacaaattgttaacattatccccaaaataataaatgggttgttggtaacataagacttgaaaaccatagaatccagaatatatgcaacttcattttattactgtattgcattaaatttaagatggtgtcagttgtaagatgtattctatttctgatacattgaaatgccaaaaaaaagtcgtggaattgatgaaatctagtagttaaataaaaaaccacaaaaacctcagtttgcagtcacctgtatttttcaatttggtgtatggaacaaaaaggacactcacctgaatgcatctgaaattggaacttaaatctctaatctttagcaaaaatatgtcccagctatgtatatcactttaatcacacgtggtgccacctctgatcttgctccttatgttgtgcacagcacgtagagtacagcataggtggactcatgagttaggtgtttgaacatgaccctcctcagctactggaccaaatgtaaacagtggtcaactttttatagtgttaatctgtcagactgctgtcaacacactgggtaccataaaacagtgtcaccaagactgttccacaggagtgatgccaaaaatctattaaaactcacagtaaaacaagaaatgtactgctaaccacttacagcctgacttgacaattatcaagtatttgagtatacattctaagcttcactaggccagtgcttaccttgtacataagcaaaagtaggaaaatgaatggttcctgtttgtcagaagtttaaaatcaaattactcagcaatacaaagcagggaaggaccccctttacctttctgtatcgaggataatttgagaggatttttgcgtcagttagggtgaggccaatacaggaagaatatagggtaggtggaccaattataatgatgtcagagaatcctcctccaccagccataggaaagaataatttcatataaaatgatagcaatttaaagatttctcaaatatataattagaggttggaggaggtaatatggcataaaggttagaggcaagggctctagagttagactgcctgggttcaaagcttagttgcagtactctctgcctttgggatcttgggcagataacctgttcctgttttcttgcttataaataaggtagctgatagtcccttcctcaatgcctggcatattttataccaaacattcattgaattgaactatagttaatattgttaaggcttgctttgtttcttagtaaagagaacatggaaatgagcagtgtaaagatttgcagagccttgatgtctagtggtatgacttgacttttcttctcttctctttctctttttcttttctttttgaggtagggtcttggtctgtcacccaggctggagtgcagtggcacagtcacagttcactgcaacctctgcctcctgggctcaagtcatcctcccacctcagcctccagagtagctgggactacaggcacataccaccatgcctggctagtttgtatatttggagagatggggtttcaccatgtggctcaggtgatcctcccaaagaggtgggactacaggtgtgggccactgccctggctgactctggagctttcaaataaacatggtacataacacatttcttggtgttatagtgaacagtatgcaacttgagagcaattagatattagcatatttaaataaaagattgtgaaagtatgattgtggcaactacctatagaacattttgctggtggtatcttggtcagagttttctagattttcccatgtgtcatgtggttaaatatgtagtggttttaacatggcagtgtggatttaagatgaagtgtaggagctgtgctttgtatgagatgacaagggcatatctattttgttccatagatttatttgtctgaggtgatataacccaatatcttaatgtcaccaacaaattatgtgatcatccagaagaactgaaatgatttcaaacattgatgatttaactgttttgtttctaatcacctagagggagccagcgtaatgtgataggtcttattttattacatttcacttaaaaaaaattttttttttttttaaagcctggggtagcctgttctggagccagctctgtctgtcccattgctatggaatatactgtagctcctctatttccttccctagagcctctcagtactcttggatgaggtgggagaagctgtagaaaattataataaatagggcaagaccttaaggagtttctagtccatctccatttctaccccatgctcccagacttcacgtgtcatccgtcacattctgctctcacctgcataacaggttagatggcattgttttttcttgtttattgtttgataacttgatattatttcttttttttttttctttttcgagatagagttttgcttttgttgcccaggctggtgtgcaatggcgtgatttcagctcaccacaaccctccctggttcaagcaattctcctgcctcagcctcccgagtagctgggattacaggcatgcaccaccatgcctggctaattttgtatttttagtagggagggggtttctccatgttggtttggctgctaggctgctctcgaactcccgacctcaggtgatctgccctcctcggcctcccaaagtgctgggattataggtgtgagccaccgtgcctggcaacttgagattctttctatggaaatattttaaattccaaacaaccaaattttagaagatcattatgaatgaaactagatactaaattagtacttggtgattgcttgccttaggctctttctaaccatattggctgcttttcaccttcacaaaatgttagaagcttaccatcttagagtaattataactgctgatgattgttctggagtaggtgtatgttacttaacaggttgtggagcttgccagttgatgctatgttgagagtgtgctgacctcacaagaactaagatttcatatatatctcagtccaaactagaagataaagacaatattaagccccaaggcatcagcaccacggaagattactacatttggcctaacacaatgagacgatgccatgatgttaggtgactgaatagttggtagcaactattacgttgctcattttaggcagcaacctaaaagtcctgcctggttgggtgccggctggtgcccatttagccagtcacatggtctgtcaacatgcagctttctaatgccaggtctgctgttggcagccattggaggcagtataacctaacagttaagagtgggtcctgcagttagaacctggttctaatttagactcctcactgtaccatagtattttgggaaagcgacttaagttctgaagagggcccagtgccggacacacacactgtaagtgcaacgaggacgatgatggcagtgagacgtcaggggtacagctttggcaggttgtcactgcctcagagcacggtgcttctcacaagtggcacgctgctcacagagcacaggctgctcatttgaattctgtctcaggttttgagctgagtgaggttgtgataacgttatgtttgagttggaaagtgaatacaagatacatgctgacttatacttgatgcaattcagaatctgttatgtgaaagtaacaggtagcaacaatctgaccaactcagcagactgtaggtacaatttttaaaaaaagattcacaactgatacatcttcgtgagcagcagcaacagtttagtcactgtttccaagagagagctgtgtgtaaaatgttcacaggttatgtagtactgagtgtgcagtaaatggtcatcatggtagaagagatcccggctcagatcaccagtcttttcagtcacatggattcattcatttgtggaaagtcttataatcagtatctttatttgcggactgtcccttttgtttcccaaaataagtgtaagtccttaaggttaggtggattatttttgcctctgtttttctagctagttatacttggatggttggttaggacagatgggatctgctagttttaatggaaaggggattccttacctgaagattaattgtggcctctccacttacacagtcattagagtgtggattactttattgtatcatagttctttcttttatgtaactgtctaccttatataatgggaatatttcctgatattcttttcttggacacctttttatcagacaattacaatttttaaagagtgaattttatttggaaaggtaggtttgggtaaggaaaaaacactgttggtttgaaaggtatctggtttagtaacagttccatgtgaacttatgaaatatttttaaccttcctggagatcttgaaaagtttatcctgcactttttttggggagaggcagccatcatcattttggcttgtttaatttttctgtagggcacatgtgtcttgatgtagggttgttttctgcacccagtgccaatccttaagttctggtgttgtgctctgcagagtcatgaggagtggaggctgtgcctccctgcagtggtgttttctggaggtattatagaacaaaatagagaaaaaacatggactttaaaagtagtgggacctataatcaaataccagctcctccactcactagctttgtgatttgggaagactcacttaattgctttcagtttcctcatttacaaaatataggcagataatattcaggcatagttgtgaggattatatgggggcaggtggtgtgtgggtgggtgagagggtgtatgatgcaaagcccctagcgcagtgctctttccacagggagcacttactaaatgttaattactttttcttctactttaatactaattttctaaatgtggtgggtatataatctggaaaatataggatattcttattttagatgttctttcttgttagactaggtatcccccctactttttactttggtgtaaatatagttattgtattcatatcacatgttgtgtcttatagctcttgttttggttttctctgactgtcctttccgactttacagaacaactggaatctatgtagtcccttaagtaaataaagcttttaatgctaagactgtcaagcaataagcctgtgagaaggtggagactgtgatcttggttgtaaacttaaaaacgaaatctcttacaccagtcttttccctgttacagctttctagttgctggtgaataaaatgcaaaagtgacaaagaatttgcatatattcttagggaccaatagcttcgttttcatagtgaatcttattatcttttgctgtgtaacaaactacactgaaacttggtggcttaaaagagaagccatctatttagcacatacttttgtgggttggcagtttggattggtttcagctggactcacccctgcatctctggtcagctggtggctgatagttagctggggccatatgtttgcatgtgagagagagtgagcgagagagcgccacatattccagcagattggcccaggcttgttgacatggtggcagaaaagaaggccgctctggtgctcaagcacttttcatatctgtttgcctgaagtttgctattgtctctctggccaaagcaagttacatggccaggcagtgtagaagggaatacttcagggaggcccaacatatttggccaccactgcgaccatcttctacagagaatgtacgtcactctctctttctcctcctccttcctttttcttattgtggtaaaatacacatcttaactatttttaagtgtacagttcagtgatactaaatgcatattcataatgttacgcatccatcaccagcatccatctccataactcttgtaaaactgaaattttatacacatttcacttccccacatgtgcatatctcttaattcttctgtagaatgcctttgaccagtgattggtcatatagcaccagaatgaaaggcctggggaagaacatgttaaaattcatcgctttctcttcctcttattggtcaaggtagggttatggataggaaatgagagaagaaaacaaaacaaaaacagaagactacttgtgctttcattttccactctccccccaccacccaactgaaaaaccaaattcgtgatacttcagtaactggaaccatgaaacgctcccattttgtttagccacattataaaattaatgttacatttctgtctgtgagtacaagctgatccatgatcttgtcccacccctttatggaaggactgtcccgccaacaaacagccctcccatcctgggatcatgttggcagctgctttggattttaattgactaaactggccaccttccctctattgagccagctaccaagcctggtctgttattctgctgcatctctgaaacagctcataaactcctacctctccctgagcgaagtcagatataacttcactctgccaagtgaatcttgatttaaccatgcctcagttcctggatccacaatgtaaaactttctcttaatctttcaaggccctctgcttgcaccccctctttcatccagttcttttgttcctctccagtgttgcccagctccacttgtgccattctctgacttatgccatcttagggcttttttcccctgatgcttcccctgcccctttaaaaaaacactcctgttgttaaacctactcatagaaaaatttctcccttgtttgagtttcctcagtactcatgtcatatattttgtcttactcttcccaagttattggctatagaatttatcgttttgtgtttattaatccaaaaaagtattcatgtatatctgtgggctgggcaccatgatgagtgttggggatgcaggggcgaacacagttataccatgtgcccaaggctggtggacagtgggccaaatgaccacacaaacctgtgtaagtacaactgtaataattgcttgaaaaaaaggagcagtgatgtcatggagtgggtaacagaggcatttaacttagttcagaagatgtagaaagactcacctgaggaaggcaagcttgggctggggtcttcttgcccaaaggttctgcggctacactgggagagcttggtctgtaccccaagagcaatgggaaggagttactctggttgcaccatgtgcatagattggaaggcctggaaggggaagaccattgcatagtccaggtgagaggtggtagtgatttgatctagtgtggtgtggtccggctgtaagcagaagtgggtgggtctgagaaagatttagcaggtaaaataaaaaagatttgatgatgagttgggtgtgggaaaccacaggggcagaatgtgtcctaggtgacacatggattactgctttgcctaaatggctgatattcatggggccacccctaacccatatggtgcctttgcaacttaacaagaggtaccctttctcttgagcacatggcttggctggtggaatactggctggaattttacactcacttgcttcctctagtcccttgtgtagtgaagggactgttcaatcacatgccttactccggcagcccctggccagtcaccaacatgtaggctttctagctttctttctcacctggttaggataggaatctcatctgcataggagctctgaatgtgatataaaatctgatccaattgagaggtgagctataaaggaatatataggaaggagagagtaaagggtagttgatggtataagagtcctgaaaggtagataagtgtggagtctaaaagtgagggaataggtctcggcctggaagagcatagttgtcctggaaacaaggaggcaggaggaatggatgggtacagatgttagtgaacttgcgcgtttggctttaggaactcccacagttagctatcagaggggctcctattttctctgcaaagtaggaaatgaaattacttgtttatgtcttgcttctttaaccaaagtataaattcactgaggacaaaaaggtatgaatgcataaacatgcttatttgttctttcacagtactcgtttgatacttaatgttggatttcattgaaaattggactcattgaaaaatcagacttgttacttagggttaaataagacattgcatctaaaaaatgactcacccagtttgtaaaaatattaaacactgtaaataggtgccatattaaattattgctaactacttcctgaatgttaccagtttaatttatgattagatatccataaataaatcttattgagtaaaaatggcagaatttgtgctaacagtttggtgcctgggctttagagaaatgcacaccacctgtactttgagatttaaaaataaagtataaagataatggtgatgcatgtagaagagaaacagggagaaaagtgaactacttggaataatagatttttatatcaactcctatgaattgattaacattatataatagaataagtcacatttatactgtgttttattgcttaccaggcattttaatacatgctggcacaaataatccatatagaaaaggtggcattttataaaagaagaaactttggatttccccaagcacatgcatatagtagatggatgaaacatccttgattctaggtcttaggacctcaaaggaaagtcaagagcctttcaccctgggcattctaaaaggatacattttttttttttaatggtcctgagctatgcagttccaaaggacatggagaatctaatggaaacacacagacccttttacaccgtggtgattacattcattggatctgattgctgttgagtgatgtagcaagcttgctgattcatattttttttgtgtgaaattatttaaagtttgaatttgggttaggtagttgaacgattatgaattgcttaagttgataatgttcaggaagtagttaggaataatttcatatggcacatcttggtagtatttagcatttttacacagttgataaaatagcgagttttatgataccgtgaaatatttttgtgcttgactagaattttgcatatagtttaataaaaataatttaaacaatatcctggaacaatgtctgaacagtgtaggtgatgaaagaacaaggggtaatactagactacttgttatataattacgtattatgaaacttctttttaatagaggattttgctctaattattgaatactcagaagtaggaattagagctgtagcatataaaaagacaaatttgagattatcacatttatcttcaaattataaggacaaaactatagtaatttatgatttggtgatttaagaagtttgaaacccctcagtggaaatattttgctatttaaaaaagttgacatgctggaagttagttttcatatatgaaaaaaggaagttattttaacattgcttagtaatctacaaagatctttttaaaatatatatatatttattatactttaagttctaggatacatgtgcacaacgtgcaggtttgttacatatgtatacatgtgccatgttggtgtgccgcacccattaactcgtcatttacattaggtatatctcctaatgctattcctccctgctccccccaccccacgacaggccccggtgtgtgatgttccccttcctgtgtccaagtgttcccattgttcatttcccacctatgagtgagaacatgcagtaatctacaaagatcttttaaaataacatattaagttaacataaaatgacactattaagattctgtgtagaagctctgaatatgatataaaatctgataaatattagtaagaaacaccttttgatgctgtctggtatggtcttggaacttgcttattcatgcatccacagaggctgaaatatgcaaatattgacaaaactagatttattgatagtgatttcaattacagtagtgtgatcctctacatccagcagtctcccttgactggcagctcttctgtggaaaggaatttgcttgctttccctgagtgctcttctgtggtcctgctagatttggagattgtcatttactgtctgacctagttcacacacgtgttccctgtgaaccaacttagatgtctgtcttaatgtaactgatagctcatttacttactaatggattggataaataaaaagtttacaagttacccttgtataagaacctactttgagggattttaatagtaactgggaagaattgatgaccagaattgggtaactattaatagatgaccagcacttgtttacttttaatttatagcatcaagtccaatctgacacatcctatgtacatttaagtttttaaatagaaatttaaactgtatttgagggtaaaagaaatctttagttataatttattcatatctcaaaaaaagggaaactatttgagatgactgagattttaatttgctggactatatggtagccatttcactataagtatatggaagcatcacgttgtaccttaaatacaattttcaaaacccagttttatggcaaagcaggatgccaggtacatgcaagtttgaataaaatgccgtgtatgtctgtcaaagcattaagacctcaagtgtttattgtatgtggccagttaaagtgtgggtgagggttcctggaggaattagcttttgtgcaggatttaaagaatctactataaccagagagagcggtgataaaggtcgaagggtggtgcgtaaagcagccaagttttgtatttaggaaccaggaagaatttggtctaggagaaatagagaagacatgaagatgcccaaggagggctttttgaatgaatctgggattatttttacactgggaatggtgacagctgagctgtgctttaagtatgaggtattcgaaatcacacctggctttctccccaaccattctgcaagtcacccaggaatacaatcgccatttcatctctgactttctctcctgttgcaatcctccgtatccagaatgttggcaaagtctgtagattttatctcccctcattgcctctcacatcctgcctgcatttcagtgtctactgccttctcttctggactcctgcagagacttctcagtctctctggtgcctgcatcttatcggctcacacttctggacaaccagctttgcatttaacccttgaaaacagattgcttcccttcacctgggatgcaggcctcccctactgcctgcctacatttctaactgtaggatctgctcttctttaaatatagtccacaacaggcctacctggattattcgtgatccctaaacactcagtcgtttccctcttccatgcctcttgcttttgcttcgccctatttcaagtacgattttgtccactcaaactcagctttgcctgtcgaaattctgcttgttttcaggttctgtttcaaatactacctcttctgtaaagccatttctgactcttttcaaccgaatgcaacttccttaccttatattgtcctttcattctagttatatgggggcacatgtccctatgtacataggctgtgcagccagtaaacacacaagtgaggtgcagaggtaaataaggcagcatcttacgatgccctagtggctcgcctgtctctgtggagacgttgctggcccttcctttcctggggtgactcattgctctgtttctcctctctctgactgaggctctttccttttgcggaattcctaagattttattgcacttcattatctacgttcctgttttcttcttttacattataagctctttgaaggcagcctagggctattttagtattttcctattaaagggttaaggtctgatttctaaaataggtagcttcattgtaatgttacctaagcaataacccaggtgcatttgtgtagcttgtaatattttgataacttgataaaatggtggattcccttaaaaagggaatcttgtgtatgcttgactggaactcagctaagttagaggaaggtggagatgataaacagtgtaaaaatcaccaacgtttattcactttatttttgtattcctgtagcagccagcaaacagcttagaatagtaggtttacaggttttggttgaattgaaaattaataaaaactcttaggtaaaagttacttgcaactaaagtatgctgaatgagtgtcattgttgctttcttttttgcttttctgactagattgagttcatgaagaatttcttgtttacttttaatttatagcatcaagtccaatctgacacatcctatgtacatttaagtttttaaatagaaatttaaactgtatttgagggtaaaataaatctttagttataatttattcatatctcaaaaaagggaaactatttgagatgattgatattttaatttgctggactatatagtagccatttcactataactatatggaagcatcatgttgtactttaaatacaattttcaaaacccaatttaatcttcaatagcaatggtaatagaaaatgccatttaaagatagctattctcctacagagtttaaaatgtgtcttatagtaataatttgtataaatttatgtatacctgatttgttagtaatggagtatttaagattagagatcataaatatgggttgctgggaatacttttatttttttaaatttcagatttttattcccttagtattgcttataatacaaaaatccactccattttgggggagagaattctcccaatgtcacttttttttttttacaccttgtttagatgaaatgttctcttctgttcacaacagtgggaggaggcagtggggaagagggtattcaagaaagacattttagatttcaaaatacacgctcttagttgatcataattcttgtgcaaactttgaaatgaaaacttttttttttttttttggtcatactcatggtgatagtccaagtagctgtattcggtttggcaacacagaaggcactcatcctggaagcactagccagcccatagagggcagatgccatgcctgcaatgcacacagttatgtacggtgtcgattcactcaagacaccccatttagctttgtctctgactgtggaagatggacatctttccttcttcactgtaccatctgtatcaaagttggtaaattgcctttctaacgtgcaattgatttcaggattcaaaaactcagtgtcttttctgttgttaagaacccagattcatttttatctgctttccactgccccttgacattgttttccatacccaaatccttaatcttgaggtattttaaatgcaaatatttgtcatggatgactagcctgaaacctgttggatttaaaaatggtgcattttaaaagaagagaatacaatgtgtacctcagagagcagtgtgattgtttaagagggcaacaccaagacttcacttaggagcagctccagctgcaatggcgatgcatggctgtgatggccagctcctagtgtcctgcgtaaaaaagagctggaaaatgcatactatgtgcagacacctatctgcacaagatcacctaggcaggaagggatgcacaggaaactattgagtttgttagctttggaaagttacactaggcgatgaaagagggtaataaaacatatttttttaaattcctagtcttctttactgtttgtttttgtccttttttatatcataagttacttttacactaagtaaaatagaccagttgacatttggtgagcgtgaggctgtgataacctgtgttccctacatttctgctccatgtacaagtacctctaagatcttgtggacaaggagggctattaaaaggctgtgactgtccagctttaaagtgtaaacattgaataactttattttgtacttaaggacttttagtagtaggcttaattatagtcccacatcacaattttaaaggaaaaagtgataactcctggggaaagcatctctatggcctgcagaattccatttcttgtggaggagatgaggttataatggagtccagagtttcaaaccaaactgtagcagcctcatcagatacagcttggcggcctactgacttataatgagggtggcatgtaattagaaattgtccctgtcttttctgagtactgatgaaaaccatggctcagaggttaattcaaataataattaatattggtctctgtcagtacagggtggtaatgaaatctttcgttatttgatgactttgactttagatgttgagcgaggaatagaaatggtgttattcctcttgctaattgtggggcagctccaacaactgaacactgtggtaaagcatacgatttggaagatgtcaagtacaaaatttctttgtagcctataattgtctaccatagaagttataacatgacacagacatattagcgttattttattttctagagtgataattatttagagtgaggtattaggaaggcaattgatcctgccattgtagattgagacgcttttgttggtctcccatttttcctactgtatgtgatacatagtagccagaacaaaattacccattcaaccttaacagattgcatgtgcacattaatctgaaaacaaaaccaccaaatggctggttgattatagagagccttgactatccttttcaaccttgaaagtcattgattctgtaagttggtgcaccacatttgatgaacatcttccatatgcagaggtgggtgttccaaatgatgtagaagatacatagttggtttaagaaggttatttggaaatacataggtatctgttaacacagattaactgtagcttttaaagctgcaaatggcaactacagttgtttcattaaaataattttggtggaagggagatgtttaggcaggacagtttttaaaaaataattacagatgcttcattacataacttgctttaaaattattattattattttttgaaatgtttgttgactgaacttctacagcttaatcacggagggtggtgtttggtatcattctaagcaacatcatattttatagggaaaaataataggaaaaaagaagaatttttacaatgtttgaggactctgagatgcttcagatacccaaacagcagaacctttctaacatgtaaaagtagacacgagcagaatcggccctcctgcatcggatgcctcatcaggtccattaactcaggcctgccttgtttattcacattctcactggtgtttcccatgtcctgtattatttagcagcaaatcccaggtagtatagtattttattttaaaatacttcaagtagtatcactaaaagggaagctggccgggtgcagtggctcatgcctgtaatgccagcactttgggaggctgaggcgggcagatcacttgaggtcaggagttcgagaccagcctggccaacatggtgaaaccccatctctactaaaaatataaaaatggctgggtgcagtggctcacccctgtatcccagcactttgggaggctgagtggggaggatcacccgaggtcaggagttcgagaccagcctggctaatatggtgaaactccttctccactaaaaatacaaaaaagtagctgggtgtggtggtgtgtggctgtaatcccagctacctggggggctgagacaggagaatcgcttgaaccctggagggggagttacgctgagccgagattgcgccactgcactccagcctgggcaacagagtgaaactctgtctcaaaaaaaaaaaaaaaaaagaattctttccagattaaattgctatagagatttttgtggacattttgttttttgttgttgttgggacagagtctcactctgtcgcccaggctggactcagtggcgccatctccactcactgcaacctctgcctcctgggttcaagcgattctcctgcttcagcctcactagtagctgggattacaggcgtgcgccaccacgcttggctaatttttgtattttttagtagagacggggtttcgccatattggccaggctgttctcgactccttacctcgtgacccgcctgcgttggcctcccaaagtgctgggattacaggcgtgagccactgcgcccggccagaaatttttttttttaattgaaaggcagtactatatttgagaagggattcgtaagcatgctttcttagctagaatatagagggtgataggcaattgttggacagttaggatcagtatttgatttcaatactgattttaatttgattttagcagcaatcctagaattctgaaatgagaatgacagggtcaaaacattattttattcacaaaagcaacgttctctctagggtgtcagtgttaagattgtttggaggccagaggtttggaggaggtggtgggcgttcacgaggagctcttctagagctgttgctgcctggggtaaaccagcacagattccaggagaagccagggaaaacgcatcccactgggatctaagtgacctttcccacaagaccaggtcttgtcacttctcagcttaacatcttagatcggcttctcattgcctgcctgaatatgagccaggaatttcgatgtgatttttttccttctttttcttattttgcttcctcctcccgctcccactcccaatccccgttttctttctttgtagaaagatagcagacgtaaataatcttcaataaaaaggcagttaagaaaaaaggcatgccttcattccaaaaccccagattcagactcccagggctgcttagggggagcgctggggcagagccaggcctcggcgggcggggtgggccgggctgggccgcgcttccgggatgggtcagcgcccggagcccgcgcgaggacatgaggacggcgagcgggccccccggggggcggggcatcccctgggccagacgcagggcggagcggggtcatcgctggcacgcggaaggccctcataaggccctcgctgccggcaccgtggcctcccacccactcggggcgctcgcttcacctcatgcccgcctcagtggctcggggccggagctgcggccacttcctgaccggaaggccgagccccacctggcctgacaacatggcggccgggagaaggccccccccccccccccgccccgcacaccgccaggcctctggacgctgagactgggagcgaagtgggcaggagtcagcgaggccatctcgcgcccgtgcgcaccgctgtagggtcatctccagcgctggcacctggctcagccctcagccctcctggcccctgggcttctcgaaatggccacactgccccccacttcgcggcctggttccgccctttcttggcctcaggtgctgcacaggccacgccctctgttccgagcccttcttgccacctgccctccctcatggctcccgctcctcctcactctggtcgtctcgggaggccttctctggatggagacctggctaggtccccgtaacttgacctcagcagcctgttttgccttcgtagcccacagcccacttgtaattctgtgttccaggtctgcccaggggaaaaggggatggtaatgcctgttgctgacatagctctatcagaaaggtgctcagcggctgaatgaatgaatgaatgcggtggagcatgagggcgcaggcgccatagtggggaggggcaggagggaatattctgccggcagccacaagaataggaaagagaaatactctgtccgaatggtttgtttttttgtgttggtgggattgctcaatgcatggctcttcttgatcagtgagaaatgtgattggagaaagacattagagttttatagctgatgttaaaaaatgagagccgccacattgacactatttgcttccggagaccgatgagagtgaagaactaacagctttgggctaaactttggagtgcatttttattaataaggctagatgaaccatcgctggctttccagttgtatgtatccctcatagaatcagacaccaactcagggaggggcctttccagcacacagagggctctgcctttttttttttttttttttgggagtcttgctttgtcgcccaggctggagtgcagtggccgatctcacctcactgcaaactccgcctgctgggttcaaggaattctgcatcagcctccggagtagctgggattacaggcacctgccaccacgcccagctaatttttgtgttttagtagagacagattttcaccatgttggccaggctggtctcaaactcctgatctcaggggatccgcctgccttggcctcctaaaatgctgggattacaggcgtgagccaccgcgcccagccccttcctctttttggcttccacttggccaaaggagcttccctttggggccgcgtctgagtcatgttagccgctggttcaagggagccatctgaaactccttggagcagggtttctcctgtatatggcaatactctaccttagaaaaacaaaacaaaacaaaacaaaacgtcaagttacatggtataatggaaaaaaaccctaaacttgggctagaaaatataggccactattttgtttctaataccactatgtatatggacagaacagttaactgtccacgccctgtgtcttccttcgtgaaaggtggtgacactgtaccttcacagcctacttcataggactttggtgtaaaatgagacagcagatgttaaagtaccttccgagaccattgttttcagaaccttcatcacattgtggtattagaaaccttggagtcctccttgactctttcacaagctacattgaatttgttctcaaagcctctggctctgcctttaaagtatatgcagagtctgataccttttctctccacttctaccacccgggtccaagtggccttttttccttgccggtgttactgcagtagctcccctactgctctccctgctgttgcctgtgttgcctgcagtctttccaatgttagcagtcaaagtcatctctcagagccagagctggatcatgtccctcctctgctgaaagcagttcgtgattcatcctcttgaggcaaaacctcagccctcacagaagtaccctctgctccagcctcccccatccagaatctcatgggacaccacactttgtccttgctgtcctttagatgctcaggtgccagttcccctctcagtcttccacagttgctctgatctcctcagacactgtcagggcctcgtagggcctgctgggctgactcctcagttccttcccgatcatacataactatcttccctgtgaggcagtcccttaccacccaatttaaaattgcacctccttcctccaaccggtccctctgctgtgatttggtttttctctcttactttccttttagttatttacttatttattttgtttgactctctccacaaacaaagcttaattaagctgcatgaaggaatcgttgtccataatgtttactgatgcatctccagtgcctagaacagtgtttgacagatgataggtgcacaatacatatttgttgcttaaaattatatgggagctaatcattagagggaaaaatgtctttggttctctgtagcacactttttggcatagtatagccgatgaaactttgtaagcaagatagcaaatattgttacactatagtggctttcagaaattgaagacagtgtttctctttgagacagtcctgattagcaaattacacatttttcccctcttgttacatctaccttaagccttttttttttttttttcctggagtaatgcatgaatggtggtatgtcttccctcaggtcattgcatctgggtacgtaatgttcatttgtcccgtttactggtgatacgtactttgatcacttggtaaaggtgagttattccatttgaaaagaaaattattagaataacattagtttactgtcaagttggaattatagtgatttgcttccttgtaaatgaaagatagtgtatcattgtggtgttttccatttagttatacttgttggctgcagagtaaacactttggttattagacttagcaataactttgtgtagaacttttctgagggcacaaagttatttcacatttttcatttcagagtatttctagcactatgtattttgtttatctagagagaaagtaactgtgttcttgatataggtcaggccttgcagtggcacagtatgtgaccctagtttctttactgttactttccttttggtcatgctacaactcaggtggttatgtagttaaaccttatgggtgtaggggaagggcaggtggcatgagctgaaaagtgtaaggtaactacccctgaaagttgattgattgaaggttcattatacagtcatgtgccatataatgatgttttggtcagcgatgggccacatatacaacagtggtctcatgagattataatggagctgaaaaattccattgtccactgacattgtagtcatcataatgtagagcaacacattacccatgggtttgtggtgatggtggtataaacaaacctactgtattgctggtcttataaaagtacaccatgtaaaattatgcacaatacataatatttgataatgacagtaaactgtgttactggttcttgtatttgctatactatactttttattgttattttggagtataccccttctaccatttttttttaaatttaactgtaaaacatcttcaggcaggtccttcaggggatattccagaaggcattgttatcataggagatgacagttccatgcctgtgatggcctccgaagaccttccagtcttcagagtggcacagaatgtggagatggaagacagtgatattgatgatcccaacctgtgtaggtctaggctaatgtgtatgtctgtcttagtttttaacaagaaagtttgaagttggtcgcggtagctcacacctgtaatcccagcactttgggaggctaaggtgggtggatcacctgaggtcaggagttggagaccagcctggccaacatggcaaaaccccatctctactaaaaaatacaaaaattagctgggtgtggtggcaggcgctaatctcagatactcgggaggctgaggcaggagaatctcttgaacccggtaggtggaggttgcagtgagccaagattgtgccattgcactccagcatgggagacagagtgagactccatctcaaaagaaaaaaaaaaagaaagtttgaaaagtaaaaaactaaactaaattaaacatttaaaaatatgaaaaagcttttggaataaagatataaagaaagaaaatacttttgtatggctgtacaatgtgttcgtcttttaagttgtaaaagtcaaaaggttaaagtctataaaataaaaaagttacagtaaacagataaatttattgaagaaagaaaaattaattttcataaattcattatagcctaggtgtacaatgtttataaagtctacagcagtgtgcagtaacatcctaggccttcatattcattcaccactcactcactcactcactcacccagagcaacttctagtttacaagctccattcatggtaagtgccctatgcaagtgtatcatttttaatcttttatattgtatttttgctgtaccttttctatgcttagataccattgtgttgcagttgcctacagtattctgtaacatgctgcacaggtttgcagcctaggagcaataggctgtatcatgttgcctaggtgtgcaggaggctgtaccatcttggtttgtgtaagtgcactctgtgatgtttgcacaaagataaaatcacttagcgacacatttctcagactgtgtcctcatcattaggtgacacatgactatgtttacaggtagcctcttgccttctaaactgacacttgagtgatgcatgacactatttggatatgggaaaggatttgtcacccacagggtaggaaactttggagattggcagacttccttttttgattcaagtaagtctaaattatgatttcagatgagtaggctgaaaatattttgtaaagttccagagcaggaatatgaaaaatttggacacttttcattttgaagttccacaattgttagatttagatagatagattgattttatgtctttaaaatatttgaaacgtgtgggggctcaaaggtttataaacttttttttcagaattttcttgaaatggatatcagtctcagactgacacattcttacattattattattgattaaatatgttaggggctagtttgtcttgccatgaattattaattggtcaaacctttgtactgggcactctgggagccctggggtaataaataaagccctggggtaataaaagtgtacaaagtacattctgcacctgccctcagggagctccagcactgggggaccctcctcattcggcaggcagtgaagctcagctccagtgagcgctgtgaaggagcagagagtccattgtgagatgagaaaatccggcaaccaacttctcatccccacaggtcttcctgcttacctgaaaggaaactgaggccttgtgagggttatcagctagcagaacttggatggacaccagatctgtttgacaaaggcaaaaaaatcataataaattatttttctaacatctggctgattgtaagtatgcttattccaaaatattcaagccataaaacatgcatgaagtaggaagtgaaagcccccacccctgataaattcaggtacattaattaatcttctaggtttttaatgggagaaaggttgcagagtgtgagcatattatagatacacaactccttttttcctgaaatactgtggctcatcttttcataccaacacacagagctctgatttttttcagcgaggtcaaatgactgtgtcctgttccatataacttcacttatctgtcctctttcaatggccggttgggtcatttcagtgtttcactattgaaaatggcacggctgtaaagatcatcagccttttatgtacctctctttgcacattgggataaattcctagacaggggtattacagggtcacagactatgttcattttaaatatggtaaatgttcctggattggccccagaaaggctgtatcagttcacattcctttcagtggtgtatgagttacttttttttgtgcactcaccaactgtggaccttactgtcttttgccaatttgataggtgcctttcttttattaccagtgaagtcaagtatcattccatgtgtgtttttggccttcttcgtttccttaaagcctgtcctctgcaccattgtgctgttgagcctccagcttctgtgatcgccttctgtgactgaatatcatctccgtgagcctgtgcacccttctccgttctggtagagagagagtaaaggctaagacggctgtctctgaaagcagtctcagggattattcccattgctgccgcttaccagcagtggctccttggcaggctacttaacctttgagccttcagtttcctttcctctaatgggggtaacaaggattaaatgaacgagtgcatctgaagccttagcacagggcctggcatgtgagtaaatgtccaggaaatgcttgccaccatcagcagcagcacctgtgtgggaaattactttcccttctcccttttctatgggagtcccttagagccctgctcagcagcctggatcctcatcagttctgggattccgttggcggctgctgcttttccaagtggacacttttctctttgtcattccatgtcaagggctgtgaagtgaggtcccggaccagcaacatcaacttaggcatggagcctgggcattttccttctggttggtcttatggattgaattgtgtcactctctcccacccaaactcatatgttgaagcccctaatccccaaggcaattgtatttggagatagggcctttagggaggtaattaagattacatgaggttataaagtggtcataaggtaggatcctgatctgacaggactagtggtcttaatacgaagaggaaaagagagagctggctctcccagttgacaaaaaagaggccatgtgtgcacacagtgagatggtggctgcctataagccaagagaagaggcctcagaatgaatcctgccttgccagcaccttcgtcttggacttccagtctccagaactgtgaaaaataagtttccgtttaagccacccaggctgtagagtttgttatggaactctggcagactgagattgttggagaaccacagtcctggtggttgagtgcctgcctcaggcattattgtttttaggccagtggtttgtgcgtcaaaatgcttggtaaagcagactgccagggcttactccaagaatttcagatttaggattgacatgagaagtcacatttctaaccagttccccagcggtgctgatgctgccgatgctgccaatgctgccaatgctggtccatgttcggagaaccactggtttagatggtgtgtcggagaggcttcaggcaagcgctgggagacttgaggtagggatagtggctctcccgcccaactaggaagttgtttaaactcagagcctcagttgcattatctgtataagggtgataatatttattctgcttatttcatgggattattgaagtcagatgcatgaatgaaactttttaggtcctcctgctcttcatacaaagtagttgggttggggtcggggatgttgcattctttttgcaaaaagagaaggacaaatgaaatgctgaagtattctaatagtaaattataaagcaaaagtaaggtatttccttccttttcttcaccagatacggcctggtcatctgatttgctggctgcttggacattggtctttacccacttcttttctctgcaatccccacagcaacttctcttaaaagccaggcagtttagctaagaagcctttattacagtatctgtggctcctttttctggccctgccctgtcaaggatgcctgtggcttttttggtgattgagacagtggaaattactgagtttctagttctactccatgggtacgattgtggtcatgcttttcatatccagggtattgtagttgaaaggtctttttttggatttcttttgccatgcttaaaatgttttgtgttgtacaagttttaaatatataattactggcatattgtattttcaacaatgttatcaaccagtaataaggttgcaaatcatttagagctatggttttcacatgagaaccccaaagagctttggtttatgttggttagatctatggataattactacatttgaaattaaatctaagaagtataaaaatacttagtttatttaatatcaacataaatccagtacaagttaatataaatagcgtaacttttgttttttaaaacaaaagttgttgacaatgagtgagattccttcctatttttataaatctctttaatgcctggtttgagaaaacagctagattctcatagctacttctgcattcagtctgttacaatatgttatttcagttgaagaacatgaagaaaatctggtctcatgtggacatgtattaaaaagagaggaatttttgcatagccttctcagataatttgatattacatcaaaactctacaaggggtagcttcttaaaggttagtttcaatgtggaatctgaaattgtatgattgaaatttttgtgcttgagttcattaaactctattggtctatcttgcactttgaatggatcttttcaccattcatggttttataacattgttcattggtagtttggaaaatattggtttaatgagttacataaatctttcaaatgctggcatattttattttttttaaatttgtatttgttaatattaccacctatctaatcagaaagcctttaagtatcagaaaactgtcaaattcttggtggtagttacaggttttccaaaattcctattttattcgaatacttattttattttatcattggcaacaaaactgtcaattgttttcttggaagtaacaggcttattttgttcatttttgaaatgtttgccaaatactcaagtctgtataaccgtagtttttcagttgtttttttctcccctaggtaaaactggtggtctttgaaaaaagcctgcacctcagttatacctcagttatgcaatctgcttctcctctacctcgaatggaatggttactgacatttaaccactatctagaaggaatgtaggaatgatggcatagagaacacatctctgtatagacgggctactcagagccatttgggggaagcaagtactctgctggttaaatgcaaaaaacctaatatagttgacaatatgccagaaattatgtaaatgaatgttgtttccttcaacatagtgaccttggagacaggacaccacattcagtgataacgcgaatggttagaacgtttttagaatgccaccttatttggagttgcttcaagttatgactttaagtttactccatagattgtgtttggatgtactgttttaaagttgtaaggcctcaaatgcttgttaagttttcccaattatatctaaatatagttgactagtctgcgaagaccctgttgcatagtggagaaattgtggacacattttttagcaatttaggatatttatcacacaggacccagcaccatgcagagcaagcataattctcagagtcagacctgggtcctcacctccgctctgccactgactggctgggtggccttgaacaaagcatttgccttttcactatttctctgtgaggttaagtagttggcttaggtctcaagtcttttagccctcatgttcaatgattcagagattctagaggcatgacagcaggattcccttcattatctggggaggtagttcgtcgggggtttgctccacagccttcctgtccctttcagccagcctgtttctggcctaggaagacagcagacttcgtgtggttgtgattttttaaaggcagtgtttaattcttattacagcacaagagttcagaacttgggtaacagcatttgagtattgtagatcatcagctcctacagagataccctgtatgtttgaggttaaactgggagcaaggaaagttgggtgactagattaaggttggtgcaggatagcagggagaacaactgacatttgctgactgctgcatgcaaggcattttgttaaaagccacttgtgacagttgaatgaatcgcttccaagtagccttgtgagggaggtggtggaggtgatggaatgcaaattttcatagatgaggaagctgaagtttagagaactgctttaatttgcctgatgtaaagagagtgtttgagccagatctagttggctttttacaactggtttcccccaaatttctccttttttctgcatgccttcccagccattatattccatttttcatttttctctatgacttaagctgttctaaagtgttggagagatgtcacaattggacatcaataatctttgagaagtgctgattttataaactttaacatttataaacttaatttttaataaaggccaataaaaacttaaagaagagaaaatgctgatgttaagtcataggcctgtgttgaaatagatggcccagggctattagatatatgaaattgagggcagataagctttgggacaagcaaggacagaatgtgcaaatctggcattgaggtgtttacaatttgcctttccatattgagaacagaaattcaaattttggtggattatttgtttaaaagaactgttatcttttactccttcaacaagtgcattcatgtacctcctttatcctagtcacagcgataagccctggggataaagaggggcgggaacacctagcccagggcctctcagagccacagggctcccagctagcagcttgagttcctaaactctggattccagatgtgtggaaatgcactgatggcaggttgttagggatggagatgtcttaaaggaatgttcggttatctctcctgaagggttttaaaaattgtggaagtcaagatcaaggatgaagatgaaatttcttgtggtttcttcatgagagatctcttctatctgtatagtccggaattctgagtagtatcccaaagtgtaccatcaagacagatgatagcagagagttgaatttttatatatattttatattgctaagcatattttttgttagggatttgaagtagttaagtcatcctcacagcatccctgggaatgacagttgacattaagctattttattgttggaaaaggaaattatggaggttacttctcactcatattttttcagcaaggaattgggaaatggaaagaatatattaagcatctgcattataggatgcccttgcagttacattctgaacccttgaattgttattttgatggaagggttacagttgtgtggcagagagcttatattgttggtgattagggagagattgtgtgctgccagacctgtttaggagtaaagggtagtgagagatttcactcttctgagaaatttgcttcagctgactcgcttgttttaggaccaacacactccaggcttatgggactggatctgggaggtacctgagccgttttcctggaggtggtgctggcaggcatcccagtgccaacttcacttcctttaggtggggagcagggggatttcctccaatgagaacaagcaaatgtgttctgagaagtgatggtttacaacagttggcatcagaagtacacaagtttactaccaaaaccagggaggagcagttactttccgattactaatagtttcctggtaaatatcccataaaatgtaattttgcatttaaaactgaaacttcactgaatcatttacataacatatatgtattcgatttatttatataattatgttttatcacttatctgtgcttcttgaaatttggaatatttttctttcaccagaagtgtggatttcagaagaagacagctatacttagcatatttccaattgtgaagctagtaaagttagcctcttagagtgaagggacttttgccattctcttcagctccctttccacttccccattctggagataaaccaagaatcagagaggttaagtaactggatcaaggccatgtagcctagtttaatattttgtgtatttaaaattttcataaaatatgaaaaaatgaaaaagaatgctttcgaaattaagataacaaagtttattttaacttttaggtttgggggtacaggttaaaacaggaaatgtgtgatcgtctgcactgagtgctaattatctacaaagtactgcgttaagtgcattatatcacacaatctaatttggcctgatgaattaaaggtaggtggtatcgtatgtatttgacaaatgagaaaagaaatttctttgtagtgcaggttcagttatagttcagaatcagtctcagaccttcagtgggcccagagtgttttgttggttctttttttaacacaagcacctcatgaccaccaccccctgcataactcgttgagccagttgtagccatcagagtggaagcacatccactgctgatttccttcagccatctgcacccaccttcctgtgtgtcccagggggttctgcctctcctatctcatctcttcagagagatttccttaatttccctctttgtatctttgccccttcttacttgtctctgtccctctgtgcctacttctattagtgtttaattgtatattttatgtagcaaatgcttacatagtgctttctaagtggcagacgttgtaaatgctttacaaatgctaatgtacttatgctcctaatagctctctgaaataaatactattattatccccattttattttattatttatttatttattttgagacagggtctttctctgttgcccaggctgtggtgcagtggtatgatcatggctcattgcagcctcgacctccaaggctcaagggatcctcccacctcagcctccccagtagctgggactacaggcatttgccacccctgcccggctaatttttgtatttttagtagagacggggtttccccatgttgaccaggctggtcttgaactcctgatctcaagtgatcccccccaccttggcctcccaaagtgttgagattacaggcatgagccactgcacctggcccatagtaactactcttaacagagttaataacagagttagtcttaagagagttaatatccaacttgttgaatctgatgggcacttgtcttaccttccctctttctctgtagcatttgaactggttggttggtcacttccttcttctcttggtgtttgcccctaccttgttggctgactcctctgcctgccctctgagtgttgatattcttcaggattctgtccttgctcttttctcttgtcattctaaatatgcttttgggttgacctcatctgctgcaactttgtcttccttctgtttgtcaatgacttaaacggccatatctcagctcagcattctctcttgagctctctgctttcatattgtactgtctcctggagagctctgtgtgaatttttttctacacctctcttccataccaaataaataaatcctgcttctcttctgttccccacatttcagtgagtggtttttaccatctgctcagttacccaagccacaggcctcgttgtcatcccagactctccatccagaaacaagtctctctcttgagtatgtctgtctccttctttgtagcaccattgtctcttacctgaactcctgtgtgagctcttgaactggtcttccaggctccagtcttgtacctttctcttccagtctgtgctccacagtttagtaaaatgcacaactctcttaaaaagcgtagcttaaaaactgtggattatttgactctgttgatgggaaatttgccaggccatgttaccttggagggtctactctgaaagctggaacagatcattacacaaacaaggaattgtaaagctgaaaaggtgtcatcagtgtgcagttcttttgaatggtatagtattagcggagagatggaagatgctttaattccctaccccaacccaaaacccacccctcacttatgtgaataaagtcttaaggagcctatacaatcattgactcttccatgtttttgtggcaggaggaaggagtgttagtgatatactgagatgttaggtaatggctaattccacacctattttaaggcaccgtgtctggcattgggggtacaagtgagagacataaaaggcaaggtctttctttcttttttttgagacagtctcgctctgtcgcccaggctggagagcaatggcgcgatctcggctcactgcaacgagcaaggtctttcttgatgtgcccgcctagctggggacactgtgcacatttatagagttataatggggacattgaaatggtttatgatgaaagaaatattgaaatatagtctatatttacaggttgacctttaaacaggatatcattttttcaaagaaaaatatgaagaaatgaaaaagaattctttcaaaattaagataacaaagtttatttattttaacttgtaggtttgggggtacatgtgaaggtttgttacataggtaaacttatgttataggggtttgttgtacagattatttcatcacccaggaattaagcccagtacccaatagttatcttttctgttcctctccctcctcccaccctccaccctcaagtagaccccagtgtcaataacagaaaaattagatttattctacaagtgttatacatgattctgaaaggttaaaagctactaaataaccagtttgtatgtagccaataaaagttatttggatatggtgatctaagcaattttgagtacaaagtggtatttaagaacttttgccataagttatttcactgtcttaggatggcaggattttggggctgaggaaatttggcatttgaatgtgtagagctccagacaggtgcccagccaaagcacagagtgcttgtgactgtgcttttgaagtagaagagtgagatatgtggtctgtcagaacattttttgccaaacctttatttatattctttaggtttgtttaataggatagtgattttttcaaatgatttctgagtaattggcataaagtagggaatttgctatgtttagagatgcagcagatatgggggaggaaacttgaaaatgtgggtaggtatagtatgatgcaagtattatccctgatgaaacctaattatttagatttccttatctggatcataattttattatcagctgatttatagtagttaaactcattaagaccatatagatgggtgggtgcagcagtcttaggccttagtaaacactgtattttgaaactgagtaggtgcctggttctgtttgtaatctttgattaaaccaagcacaaaattcgaagcttcataggtaaacttaaattattttcatcattctcattatgcaaaacaaatgtcatgtctggtagtagcttgtcttctcactgcacttactttttcttatattacagtctctttgctaacttgacatgtacttattgatctgtgatcaaaatggacacaatgtagaaatttatgactacttaaagtgtgatcttttttcaaactgaaatatgaagtttacttacaagttagattgctgtcctaatatcaagagtcttgtacactcatatgtatgaagtacttaaaattagaattggttagtcaaatgatttttagggaaaatatgtgagccagaagcatgtcattacagtcaatgctcaatgatgtagaatagcatggtggtgcaaaaaaagtaataaaagaatttgttacaaaatgctttgtattgtagttttaaaaaaagcaaatgtaacttgtaagttaattactgatagtattataaaagatgtttcttgaagttagttttcccccagtacatgactctctggaggaaggaaacccagatgactgctggggaataaggagagaggccagtttggggttgaacctttgttgaagatgtaggaagatgttaagttaaatatacagagtttgtggataaaactttgtcttttatcatatgctaatatgaatgaagacatttaatttggctaaaagatggcatgtttcgctgtgtgatatttatagttttgattatggtggcattgtagaacctacttgcattaatgataaatgtaggtacagtagaccccctgccccaccccagtccaagtttttgctttccaaggtttcagtttcagtggtttcagttacctgcggtcaactttggtatagaaatattaaatggaggccgggcgtggtggctcacgcctgtaatcccagtactttgggaggccgaggcgggtggatcacgaggtcaggagatcaagaccatcctggctaacatggtgaaaccctgtctctactaaaaatacaaaaaattagccggtcatagtggcgggcgcctgtaatcccagctacttgggaggctgaggcaggagaatggcgtgaacccgggaggtggagctttcagttagctgagatcgcgccactgcactccagcctgggcgacagagcgagactctgtctcaaaaaaaaaaaaggaaatattaaatggaaaattccagaaataactcctaagtttttaattgtgtacccttctgagtagcatgatgaagtattgcattgacctgcactgtcccatccaggacataaattattcctctgtccagcatacccacactgtagatgctacctgcccattcagtcactttgtagccatcttgtggttatcaggtcaactgtggcagtgtcaacgtgcttgtgttccagtcacccttattttacttcagaatggccccagagtgcaagagtagtgatgctggtgatttggatatgccaaagataagcaggaaaatgcttcctttaaatgaaaaggtaaaagctcataaagaaagaaaaaagtttgtgtattgagatatacatcttataaataaatcataagtattatttatggtaagaatgaatcttctatcagttaaattgtggggaaggaaaaacaaatttgtgctaattttgctgttgtatctcaaactgcaaaagttacagtcacagtgcctgataaatgcttagttaagatggaaaatacattaaatttgtgggtggaagacatggatagaaatgtgttccaactgacggcaatggggtttggtactgtgcatggttttgagtgtccactagaggtcttggtacgtatccccaggatgaagggggactactgcatagaaaaaatgtttcccaaatttgttataagttgaaatgactgtgaaatattggatatgcaactgttaactctgtatttcagccttaattccatctcctttgtcaaatataacttgatttgaaaccaaaatttagtgtcatagtcactgaataagttacatttgttttcttcattttttttcttcctgtaggtttacctttttgagattgggtgcagttttccaaaatactttttctaatactcttccaaagatctcaaccttcctttacagtttgaactcctgtttgtattgcttgcttccctaatggaaatctgaatttttataattcctgtgtatttcttttttgcattgccttaacaggcatgggtcttcgaaagccctggagctccctgtgtggcccctgccattggtatgctgtgatgctttgcctgtcctgtgctcaggtttattcatgatggataagactcccttcctatcacatgtgcactgttctagcaaagagaatagacaaattcttttcagttgtgatgttgcccagggttttgttttgtttttttccctttaaggaaaagaatgtcagtggtgtatatcagaaaagactgtttacaccctttctatcccttgcctttcaaaccaggcaggattcagtacacttttaaactcccccagaatatgaaaaaagatcccttttcagctttccagaaattttttaaaatgtagaagaatgtaggaaattgccaaatcagttagttaatcagtgacaactgcagtcagtacacgaagagcacgcttcttacaagagcagctagctgtttgctgctttctcagcccctctgcatgcttgcccttgcctcacctctgcatcctcctccagaggttcagtgtcagccttataggagctggtgattgccacggggtccccagacagagcatggccacagggcagctccttccttcccttccttctgttccaccctcactttttgtaggcttgacatcacctggagcttctgtgtgtcaagtcagtagcttgaaataagtctagaataagtgggaaaatctttcctaatggtgatttttttaaaatcaggctaataaacatggtgttactagcctttatacaccaccctgggctttacaaaacccaggatattttataatattaagcaagatacatactagcaatcagcaaattttgtaaaatatacattactcttccataagtctgcactgtaagcattcttgccaggtgggttgaaatacatttctgaaatttaatttttttcctatccaaaataaattacttaaaaagttttcatttacttatttctagacctgtctcttcatttgattttcttctctaccatattacaattaattaggataacattcaaaagatatgagacctggtgcagtggctcatacctgtaaccccagcactttaagaggctgaggcaggaggattccctgagcctaggagttcaagaccagtttgggcaacatagtgagactttgtttcccaggaaaaaaaaaaatttagctgggtgtggtggtacacaactatagtcccaactacttgggagcccgcactgggaggattacttgagcccaggagttgggagactgcagtgagctatgattgtgccactgcactccagcttgggtgacagagcgagaccctgtctcttaaaaaaaaaaaaagatatgggatagatacacatattttatgtagctacatatgtgatctacacctaggtatggtatatatagatacatgtttgtcttcatttctcttttgccatacaatgttgagtacttcaggtgctattagaatgtgtgcccatctgttcctaggacatgttgtgtacatggaatgaagaccctgctggacatattttcttagtgtctgcactgcggcagcaggtcagctgtctccacgttagggtcaaggtgctggccaccttctcagtgggcttagcctttaggagttagcttcagagaggtatttgaattttgaattgcagggtgtaaaggacacaaattttcatgatccttgtgcttttgtggcataatttatgtatggggtaatatactccttttgaccactttggaaaaagctagtgctgtgggcatgcacttagtataagctgttagccaagtgctatttcattagttgccttgaaaggaaacgttagcctcaatactgcatgaaggaacaaaagaacagctttttttttttatcataaaggctactcagaatatccagagtcttcaaagttatgtagaaataactgaaagatttctgcaagaaacctgtgaaatagtatgttatgtaacatagcattagatattaatgttaactgcatttttttgacttgcacaaatgattggcaaacagatgggcatatctttaaaattaaaccatctttagatacccactccttgtaaactgttacagattaaatttgtcactaagggctgttcataattctttgaatgaagtcagtattgtttatttgtcagacacaaatgtcaagactactttctttaagtgacatatctttgtattgctttataatattctttgtaacatgtgccatttgttgttgatccattatattaactgagtggtcagtgtgctatcctgtaggaggagctcagagtctgagggcaggacttcccaaactttcacatgcacaggaatcacttggggcctttgttaataaaggcagattctggtgcaggaggtctgaggtgagcctgagagtctgcgtctcttaccagctcccgggggtgccaggggtcctgtctctcaggattccacttcacatggcaaggctccagtcgccagaaagagagggaggtgaacacataagaatagtagcgtgcttggcacttttgtagcttctgcccatgttgatgtggtggtactgctagcgagggctttgaaatcagcctgaagagggagggttgagggtcaggaagcttccgaagatgggtgataacaaaggaactgagatgaaaaagaggccagcctctacagtgaggggataaggaggccagggaagagaccatgggtgtgaaggcgaggaaggtatgagatagctgatggatggttggtaaactttgagtagtttgatatacctaatgggggtgtttgtgagtgcttcaggggatagagggaagggagttaagggagttgagaatggacaggtcaataaggatttgattattagtgccttcaagcatgctggagcatttggactggaacctgaaagctatgggaggtcctttaaggattttaatcagggagaggtatgatgtaatctgtgttttataagatcattcaatcagtagtgtgaaagcgttgagaccagaattaggagaactgattagatttctaattttttgtggttcactaaaccatgaaggtctgattacttcagagctagtgtaaacagggaggaggagttagacccataaatatctgggagagagcattagcaggttgggaaatgcactgaatatgtgggatgtactggggcgtttattcaaactgcaagctgcacgaggacagggccacatctgcttcgttcaacactgtatacacagtgtctgttaaccttgaatattttttaaatgaatgatgacaggaaggatctaggcttatttcccattgtttggctaggttgaagaggtggatggagatggtgttactgtcatagcgaatgctaacataaggcgtagcgttgccctatacgatgtcagtggttttccttattaaaaatgtgtctcttctgttaatatcagcaaaatgggaggtaacctagtaatatgaatggaggttaccagtacaatccttattactatttatggttttatttttaatatgatgcttggggacaaacagaccttagaaggacttcacatacttcttttttttctaaatctttttctgaattgtgtatagttgagaattattcctaacatactgaaaattatttatgaagaaataagaatatatgttgggagataatacagaaaggagacataggttgtaagtatagttaacataaaatatgatatatggaaaaaataacatatatttcatcccaaagggtagatatggacctttaaaagaatactaatctctgaaagaggagaaaatattttttatgaaagaggattgctgctatttaatatggtctttgtttaaacatgttacctctaagaagaaatacataggagtgctttccatgtaattttctgcagtgatggaaatgttcattataggcactgtcgagtaggtagccaccaaccacatgtggcttttgagcacttgaatgtggcttgtgcgactaaggaactgaattttaagttttatttagtttaagtagtttaaatagcaacatgtggctggtggcttctggattacacagcatcgtcatagagtattggcaatgccctagcatactaatgaggaagaaaatgtggtcttggccaggaagaaaatgtggtcttggcccccttggccaacccagggggttcaggaagggcatcatttgacccatgaagcaaatacggaaaatactttgtggtgaactgataagctggtgttggtgacttggggggcacttcctgattctttatccaggttcttgtcagttggatagatgtctccttcatcagcaagcattggtcctgctagatgttcccaagtggctgttgggggctgggttgtgggtggggcagtgggaggagattcctgttaaccggattcaggatctagctgaaaggactttcactttgagtggaagctcagcagtgtgagccctttgtcttcggtctgtccacctaccagtgtgtggattctttgcctctcttgatatgttttgcagccttgatgattgagaggtgtctccatgggttatgatgagggtggtgatgtgctgtttttttagctgcaaaatgcttccttggaaattctgattcatgctccaccctcatccccagaatcattatcacagtgatgttctatacctcacgctctttggaggtggaagagagaaatttaaatagaacaactcaaaatcaaaccataagcagcaaaatagtcttcagtatccaataggcaaatgtcctatgatttcactcttgcccacgtgttggctgtttatcaaaaaagtttcccttggatgacattttacttacacaataggacaaatagtgtttgagctataggagatactttgcatgtgaaaggtgttacgtattcacctatctccttgctaggtttctagtccacacctgtgacgctaaaaggttctgcgtcactacaaaattaaaactcagctatacaaatgccattctactttgagaagagtgtagtaaataattgtttatattgttttggaaggtcagaaaatcactatatataaaataaatttaataagtaaaaatttaacatgtgttataattaagaaattttatatatacatatatttttcaaaatattaatattttcagtgacatttctttcatcttggtttcttgcgcacccgttgcttttatcattgattctgtctgtgcttggatctgcccgtttttcatttgactatttcccaataaaatttaccaatagctccaatttggtgttgatatatgcttgtttcctaaaagttatatatagtatgatttaaaaacatttttggaaaggaaattcacttctatttgctgatggcagcagcagttttagtgattctctgaataaaacagacttgatgcaggcctttaatattttgtcctcactagtaagctgctgtttcattcattcattcatttctttcatctttgggaactgtcactaaaatgttttgtagaagaagtttactcctctcagtctataaaaggatttttttcatctgttaaatgaggaggggtttggattagaaggtcttcagagtgcttcctaactctgaaatgtttgtaattggtttcacagtgtgcctctaatgttgatgattctgttagttgagtggtctcgttgtgacccctcctcacccccaaacacatgcatcttctgaactgtcctttagttcacatctcagaaaatgctggccaatagggcactgagtagaaacttgaattactatgtctccattatatgcataggtaccgtttgctacatattctcacatttagttagactattcctcatcagaagttaccgaggagtattttgtaaaatggcaacctatatttttaataacataagccctgaatcttagttcttatttaagagatgcatcatttacagatatataagctccatgaggacaagagggaattttgttttattcacagatctctctccagctcttagactagtgcctggatcatagtaggtgctcagtaaatacattttgaataaataattgtgatttgagagttaatttttatgtaacaccaaataaaacataaatgcaacttgaatgtttattacccaggtgataattatgagactttaaaaaatttcattgctaatttgttatttctgtttcttctttttaaatactttatgctgtccagtatggaagccacagccccatatgtccattttttcacttgaaatgtagctaataggaattgagatgtactgtaagtgtaaattacatactgggtttcaaagactcaataccaaaatacgtaaactagcttattcttttttttatattgattacctgttgaaatgacagtattatgcatttattggtttaaatagaaattggtaaaatggatttcactcttttggtctactattaaaatgtagctactagaaaactaaaaattacatgtaatagctcgcatttgtggcccattgaacagtgttcatctagacacagaaaatctagatattgagtgtagacgagagggaagctttcaaaatagggctttgaatgaatatcttttatagaaacacaaaattatacaatgcagctgcgacttgggaaagtgggcattcagatggtcttgatcaaatttaaaaaaaggaccaaaacaaattaattagattatctcaaatcagaaatatgaaatgcagctaccagatggattcctggcatagttgccagctgggtcttgaggtcagaaaaggggcaggaaggcgttggtggctgtcccagtgagcggtcactaatggcagactgcaaagccagtttttgaacttctctgcctggaccttacctgagcatggttgtagttgtgccgagcgacatgcttagttgataccatataatgctggcgtttttcaagcgtctgggagatggacacttagtagaagggcgtagggaacaggaagaggagcacagccaaggatcagtatgggtactctcaggcagggctgtttttccctactcatgcgcataggcaacttgtccctcttctgaatcttaagctgataaaaagttagcaccaacttcatcgccacttctccaagcttgatctggctctgcctctgcctctgagctcagtgggcttgcaagagaaggtcaccagtgggctaagccatccactccctctgggctcacttttacctggagctggcctggagccccatcgagtcagtagcatttcttcccataacagttggcggaccctggaggatgaagctgctccccaggacacatatgtagacgttactttccttaagctaatttgaaaggttattttggtaagtggttgggctgcatggctggtttaagctattatcaagtccattccagtatttatttctttgaaagttagaatgagccttgaataaatgatgactgactgcttagccttcttaggagtgtatttaagaatatttgttgcaactggcactggagatgtctacttctctttattttggattttaaaatagttgtatagtaaagcagcgtgttttcagtaaaatagctttcatgctcaccttattttcacccatctgacctctgtatttggagaaagtagatcagaaaattcatggcagttagcggcagagtgaagagacctttgactttagttgacagctgtcacctgaaaactacaggcctggagaccctctcaggtgttatgtctgtagttctgacagtgaacaggaatgttgtttacattttctgtaagcaaaattctccccttgttaggaatgtgttagaatacggcaggcagaaacagaatttttatgtgtcttactggtaagttctcaggagtgttggttagcccattgttcattcccatgctcttatggaagggtgtcagtagaatttatgactgagcctgtttttatcatcactttggaaattcttcaacaagatattgtttttttcaagtgagctagtatcacacaatgcttaatgtccttataaaagagaaaaaaatgagttaaattccaaagatgtttaagatttcagtcattttctctatatgaattaggtctttattaggccgttgatttaattagtgttcaacaaaaacactttcctgtttagattgtcaacgcattctttaaattagttattttaatctgacacaggatctgttaggaagagtttgaataagatgcagcatgttacatagtgtacacagtgcgctggaagcacgtagggtgcgaacacaagtgcctgccaacttgtctcccttcctgcttaggtcctgccttgtcccaaaaggacttaaggcaatggtgaggagagcatattttgaactttattctgtaaaaataattttcagttttggagaaagttgtatttctagttatgagaatagttggtgtccacaaagtatccactcaactagttttctctgagtggtcacgtgggattctggtccaccagagcccagcatgcctgcgggtgaataatgagcctggtgattgggctgctctgtgtcagtgcagactgggaccatggtaggctcagagccatgagtgaaattggtcgtcttggacaatgaaagcttttcttttagtttctttctgaatcttgtatatttctgccattaaacataatgaaattatgaatttattgtactgttctcaaggttgcttttcaacatcattatgaacactttcttgttagatgcctctgttgcagttacatagttgtatgtgggctgtaaatatctaatttgtatgaaatgaccgattttggtatttgtataatcctctagtcaatttaactaacttgagcttttcacagcccttggtgctgctgttgctcatctgattacaccgctcaggggaataaggttaagggcgggctgttggtaaccagagcatttccagggctttagttcagcagatgagctgcttggctatattcatacatctgcttgcctgctgtggcagctgctgctgcttcacgttgtgttcttttgttctgtttcatccaagaatggaacgctaggaagtgtagtgaatggattaatttaaggttaaggttagtgttttgcttgctttctaagtaaccgatcataatgatgcttctggtagaagctaatgagtttctcttaaagtgaactaaatttataaaatacagctcagcgagggagctagattcgtattgttgatggggaccaaattcagatgtacaaaatactggcagtttttatcattggatcctaattctttgttttcttccttcttctcccccaccccaaactcccttccaggacctatatccagactttgcctgacactgcagggtccaagagaattaaagaaatatggaatgacatgaagaagattagttaaggattataggctttgagggcaaacacctcagtgaagtgaagcacaggcaagctcctgagctgtggtttggaggagccgtgtgttggaagaagatggcagatccaggaatgatgagtctttttggcgaggatgggaatattttcagtgaaggtcttgaaggcctcggagaatgtggttacccggaaaatccagtaaatcctatgggtcagcaaatgccaatagaccaaggctttgcctctttacagccatcccttcatcatccttcaactaatcaaaatcaaacaaagctgacacattttgatcactataatcagtatgaacaacaaaagatgcatctgatggatcagccgaacagaatgatgagcaacacccctgggaacggactcgcgtctccgcactcgcagtatcacacccctcccgttcctcaggtgccccatggtggcagtggtggcggtcagatgggtgtctaccctggcatgcagaatgagaggcatgggcaatcctttgtggacagcagctccatgtggggccccagggctgttcaggtaccagaccagatacgagccccctaccagcagcagcagccacagccgcagccaccgcagccggctccgtcggggccccctgcacagggccaccctcagcacatgcagcagatgggcagctatatggcacgtggggatttttccatgcagcagcatggtcagccacagcagaggatgagccagttttcccaaggccaagagggcctcaatcagggaaatccttttattgccacctcaggacctggccacttgtcccacgtgccccagcagagtcccagcatggcaccttccttgcgtcactcggtgcagcagttccatcaccacccctctactgctctccatggagaatccgttgcccacagtcccagattctccccgaatcctccccaacaaggggctgttaggccgcaaacccttaactttagttctcggagccagacagtcccctctcctactataaacaactcagggcagtattctcgatatccttacagtaacctaaatcagggattagttaacaatacagggatgaatcaaaatttaggccttacaaataatactccaatgaatcagtccgtaccaagataccccaatgctgtaggattcccatcaaacagtggtcaaggactaatgcaccagcagcccatccaccccagtggctcacttaaccaaatgaacacacaaactatgcatccttcacagcctcagggaacttatgcctctccacctcccatgtcacccatgaaagcaatgagtaatccagcaggcactcctcctccacaagtcaggccgggaagtgctgggataccaatggaagttggcagttatccaaatatgccccatcctcagccatctcaccagccccctggtgccatgggaatcggacagaggaatatgggccccagaaacatgcagcagtctcgtccatttataggcatgtcctcggcaccaagggaattgactgggcacatgaggccaaatggttgtcctggtgttggccttggagacccacaagcaatccaggaacgactgatacctggccaacaacatcctggtcaacagccatcttttcagcagttgccaacctgtcctccactgcagcctcacccgggcttgcaccaccagtcttcacctccacaccctcatcaccagccttgggcacagctccacccatcaccccagaacaccccgcagaaagtgcctgtgcatcaggtaaggggacacagagcctacctctgcattgcaatgtgaaattcaacatggctaacttgtctgatcgaatttttctttaaactctatgaaaagctttttcattatgagtgccttaatttttatttgttattggcttatgcatttattttattcaggcatcaatctccctgtcccagggattgtgctagatgttaaggatatgtagataactaagactgggtccctgctgacaaggagctgggtcaccgctagcagggagatggacagaggactcagaatgctcacaagacaaacgcttttgtttccttctctcaattcttctttattctttctctttctttgtgtgtgtgtgttttaaaaatacactgacacttggtttctagcaaagatttatgcgtgtgtggtagtctcctccatctctccttttatattgtgatatttttcttgggaagctgcaaatcgtatacttctgtgatacttattttactaactgttgactttgttagtgtgagttttaattgcaaactgtagaaaatcacagtaaatgataattcacagaagatgtttggtctctaaaagatttggatacccagcactgaagtagggaatcttccttttttgtaagctgacgtttttgttatcattcagaatttataaaagaacagatttaagtttatcatattcacaaagacatctttccattataaattttgttgtttatgccctaggtctgtgaaagataaattaatgcctgtgtatacagattattcttagtgctattcaaaaatatatactgattatctaccagaattgcagctctgtttttggggtgcacagtagctgattttagagctataaagcatagtgcttgttttgatggacttattatcaattttggggaaataagacttgcatgtgaaaatacagaggagtgagagaccaggcatgattatgtgacaaatgtccagagagaggaaataacctgtagttgagagtgcttggaatttggctaggccttaccccggggaggtgaacccaggtcagcagttgagactgggggatggtttgctaaacaagggcacgggaagtcaagcttgctgcagggaataggttggaaagtatcagtcagggccagattgttgtgatctgggattcctttttaaggaatttggacttaaacggggagggagccagtgatattgattagacagtccacaggacagatggagaaggagaagatgaagtgtgaacctgttttctaggcctttgaggacagtttggaccagaagggtcaaagtgggagcagaaggcattgaagcagtgttgaaagtaaaagggtttagtcagtaaacaaagccactcagggcatctcagagcagcattttttttttttttttttttttttagtggtgatgattgtcttctatgctttttgtcagttcattaaaaaaaagaaaaaaaaagtattttaggccaggcacagtggctcatgcctgcaatcccagcactctgggaggccgaggcaggcagatcatctgagatcaggagttcaatgccaaactggccaacatggtgaaaccccgtctctattaaaaaatacaaaaaattagttgggcatggtggtgcatgcctgtagtcccagctgcttgggaggctgaggcaagagagtcgcttgaacctgggaggtggatgttgcagtgagctgagattgtgccactgcactccagcctgggcaacagagcgagactccatctaaaaaaaaaaaatttttttttttttaattttagattcacgcaggcatttaatacagaggctctgaagcttcgtcctaagctgggctgagggagtggaggtcaggaagactcctgggaccacaggacaagtagtggcttcagggaagctgccctcagccggtgggcagggcagcttccctgaagaccttggtgatcctcatataaccacccttggtgattcttatataacctcagggcagaacgcctctcctcaaagcggaccaaaagtactgtctctgaggccagcagacctgggtggcttttaggacagaaatgaatgtgacttagtttttaggaattattattttcttattccctggaaagtttcttactaagcaagggatattttagagcagtggtttctcagacttctcattccggcatcctctgtcttcaccggagggtgagcacagtttggaagacaccctgtgattataatctgatccctggatgagaattgttgctctcctccagctttcctgggttttaagagtacagatgcctcagtgggcatttcagaggacatgtgtgagtctgtggcgtttgaatccttgaccagtggaggctccatgcctgctgtgtccggtgctagacttcaggagagcccacatgcattccctccttctttgaatgtatcattataggcaaactcaggacctttacagggatgtaaactaggacatttgaggtattttcattctaagtacaattatgttttccattttgctcattgattatttgctttcttatttctgcttaactttgcatcctcttcagattttgaaacactcagttttgaacataaggctagggaggtgtgaagtctcaggcacagaacatagactttaaagttagaaagatatgtggaccccagctctattgcttattaacctggtgatcttaggcaaaagatttaacttctctttacctcagatttttcattagttaagcaggaaaaatagcacccagcacaaagggtgttagattaagtgggcttaacatataccgagtgcctagtataatgtccactccatggtatatatgttaattctcctctaattttagcttctgatctcctgaagtgcaaaccttgctacataattatgtcatttcccatgtagatacaatgtaaaattaactttatttatttattattttttgagatgaagtctcactctgttgccaggctggagtcagtggcgcaatcttggctcactgcaacctctgcctcccaggttcaagcgattctcctgcctcagcctcctgagtggctgggactacaggcgcgcaccaccgtgcctggctaatttttgtatttttagtggaaacgaggtttcaccaaaattaactttatttttaaggataggttaaatattatgtaatacagccttagttatgaaataactaaatttgatttgtgcaaatattatcccccttttagactgtgttgccacatgtgaggaggataataatatgggtaattcaaaatactatcctatacctttaaaatctctctctctgaatgattgacattctaccctaggaaatatttttatttaattatgttttgctttagagctactaaaattattttgcattttatatatgatggagtagtggctcaatactataccaggtatcagggaagataccagattaggttgaaatgtccatttaacttgataatgaaaatatcactttcaggtagacttaactcttcttgagtttttcgctttttaaaaatagaaattatgttctttatgtgtttcctggcttctgaatggatattttctagattatggaacacatttaagtatctttaaagataagtttaactttatattgaaaagtcaacaaagaaaaatgttagaacaaaaaggccacagttcatcagatcacaatgtgaaaaattacacattttggtatatggacatttctttaatggaagtgctagacttttcgattatttgataagatttacagggaagggaaaaaccctagcttatatttctttttcaatagctaattagaacagtttttctcaaacttttcatctcagacctctacacattcttaaaaattactggggactccaaagagtgtgtgttagctatgtgagttatatgtattgatatttactgtctcagaaagttttaagttttttattgtttacctatgtatttatgtctttctttatttttgagacggagtcttactctttcgcccaggctagagggcagtggtgcgttcttggctcactgcaacctccttctcccaggttcaagcaattctcctgctcatactccctagtagttgggattacaggcacccgccaccacgcccagcttttttttttgtatttttagtagagatggggtttcaccatgttggccaggctggtctcaaactcctgacctcagatgatccacccgctgtggcctcccaaagtgctgggattacaggcatgagccaccctgcctggctaaaatattgatgaaagtttaaaatattgatttgttaattatttaaaaataataaaccattatgtgttaacatacataatactttttaaatgaaagataactttttaaaaaatgaaagataagttttcgcaagacaaaattagtggcattgttttatatttatcaaatattgattttcacatctgcttctgaatgtagtctatgtgctagtcataagcctctggacaagtttacagcttatttggaaaaaatgaggatgaaaaagcaaataacatctcaggatcatgtagaaatagttctggtctcacagaccctacagaaaccctggcccacaattttagaaccactggtatgaaggaaagagtacaggctttggagtctgagtttttgaataggagcaccaccgcttaacgtcaccacctgacgttagtaagggtgtcaggacttcatttcattatctctgaagtgagggatcatatgccttcctggttagaggctcagtgagattagtagtaatgtcttttaagtgcttaacagtggggactcaaaaacaatacatctagcaagtgttcagaattgcctgttgcagagctttaagaagaatcttacatatttcaatgtcaaacattttcatagttgtttgactttacatccttggttttagtgaacacttatcaaatattgaggcttcgtatgtgcttttctttgagggagggagaacaatcttgctgtgtgagcaggaagatgcaggcaagaatatgccatgaaaagcacactgtagagatcagcactgatctttaaagtcattcttaaagtgggcgaggtgggggtctgggagggctttctgggggcagtgatgtctttgctgagatgtgaaggatcagtctaagttgagagaaggatggataaaggagggaaaagagtttaagatttaggaaacaatgagtgcaaagatcagaaagccctttgggccttgagtgtccctagtattgctggaatgtaggtctggggcttagtggacagaaagctgcatggtcctgggcccatggcactggagggcactaggaggtgttttcagcatggacacagcaccatggggctctttgcagcacccaggagtacgaagagggtggagagggggtggaaccaaaaatgaaaggtttatcagtacactgtgaacatggatgagaacaatctgcaaggaaggcacagagcaacattttgttcatttgaagagcttatctaaagaaagactaattaagtggattgttcttaaggttacaggcaagtccctgagtttctggatagaatttacactgcacagtccatagacgtgtcccagatcatggattatgctcttaaatggaaagttctagttgaatttttaggatctgcaacaaggtgtccttaaaataagtttattttggatacatttgtacctttttcattaatttggtcctgaaataacagtcatcatgaaacggaagtagaaaaaaaatttaaaggctactaagattgaggtgataggtaataatttcccatctcctcattttcccttgagattaaaaaaaacctggaagaatcagtggtacaatttttttttttttttaaaaaaaaatagcctttcagggaaaaccttttattggtaaatctcaagtagcatcaatcttatactgagattctttaagtttacccagtaaataaagaattacaaggccgggcgtggtggctcacgcctgtaatcccagcactttgggaggtcgaggtgggtggatcacaagatcaggagttcgagactagtctggccaacatagtgaaaccccgtctctactaaagatacaaaaattagccaggcgtggtggtgcatgcctgaaatcccagctacttgggaggctgaagcaggagaatcgcttgaacccgtgaggcggaggttgtggtgagccaagatcatgccactgcactccagcctggtcaacagagcaagactctgtatcaaaaaaaaaaaaaaaaaaaaaaaaaaggaattacaaattacagacatgggcagagtaattggcaactaagtaaatttatggaaaaaggtggctgtgtttcttaaggattatgtatgcaggttgtaatcagaaatagacaaaaatacctttttaatggagagcagatgtatcttgtcaatactacctttctcacttctaaagacatctgggaaagatgggaaaacaaaatgtctctaaaaaaaaatcagcttttacctaagtggtattcaggggcttttgcaggtatatgcaccttcagaaaacaggcacccaggctggacctcattggagcaggttgccccatctggtgctcacagaaggaaggcaaaagaaatcactgctttctcacttgctgtggcccactgctagttcttcatgacatctttagttaaagcaaaccatccagcctttactggtctctctttcctgggccataggttgctctcaacagcctgtggtttctcacgaagactcttaaagtatttcttttgactacttcaatttatatatactacagcttattgagtaacctgtctgcgtttttcctcaacatccaacaagctggtttatcccagaggtcagaattataccaggtgtcaagttaaagcacagggaaaaatctactccatctgtcctttcaccccatagtctgaaagcatgaatggctgatagcctcgctccttagatggcttttattttgtaaaagagtattgttttatgtgacatcaaaaattttgtaggtgataagaatttagtttgttagtttacctttgaagcctggatattaggcctctgctaggtgtcccaattgatattcttaaaagaagccacttttggtgctgcattttcatcttggtgtcttaggtaccttcatgaaaggcagtaccacatgaaagaaatacttatttagtgcctgttatgtgccaaggactgtgttaaggagagattgctggtatggtggaaggcagggaggagacagcaacctccaccgaggtggaaagggaattttgttatttaagtataacatttctggctgtcctatctttgtgtacttactatgttctagaccagaactgtccagttatatgatgggagctacaaatacaacgcatttatgttgatacagattttctggtaaccacattttaccattaaagaaactggtaaaactaattttagtaatacatttaattaaaccaacatatccaagacatttcaacatgtagtcagtataaaaaattgcttgtgagatattttacgcaagaatttaaaacctgatatgtattttacacagattgcgtgagctgcatctcagttgctcagtgaccacacatggctggtggctgcatattaaacagcacatgctagactctttccctatcagttgctgcaaattctttttaaaaacaagtcagagtataaataattttattcacatgtaaataaatgtaaaattgttagtgtaattatgacagtcatcctccaagacaggtgttacccacctttgctgtaaggttaaggaagtagtagcggtgtttttaggtataatgaataaatgcagtactagggggtgtgcctgtgttagggatattagtatcagttcttgacaagatacgttattgaagtttgatttcatttgtttgagtttcaaagaaggctacataaatggtgtttgtcctgtgggaaaaaatagcgtgtttgtctgaaaggtggattacagacattttcaagattttagttttgagtggcgtttggatacttttggtagttaattcctcacctctatcccctagctttttgcctgtctctaatacaattgcttgtttcttcatgaaattgactctccaggataagggaaaaagccttcatttttattaatatgcatgatcccccctccccatttctttcacttttttcttctgtgctgcctttttcttccctgttataataatctttcagaacggcagtctctggtacagcagagcaatagttggctgaggaagaagaattgggaagtgggttagggggacaattaagggaacagcattgtgagaactaatctggagaatttaccctagccttgacatcttaatgttattttctattctctgtagttacagctgtaaatctatagataatccttaagtagccatgcagagatggccctggtatttcctttgttgctgaatgcagctcttgtatcagtgaagaaagtcagtagcaaacttgtacttgtccttttgccttgtaaaactttagtagtttatggtgtgtcaccaggagtgaggttttattttgtttttccttcacttagtgtaaaaaatggaggagaaccttcgagggctaggacatgactgcaggagtggtggagggctaggacatgattacaggtgatggagaacttgaagttggcaaaatgccaagaaattgacagcgttgcatttaaaaaagtcaacgtagatacaggactacctgcatcatcttgcttgttttttatcctggacaatttccaggacgatgggagtgatggccagggaaggctgcaaggcacttccttacctcttattttaaagattggatcaaaaacatgcctttttgatgctgtttaatattaatgaagactataatatttgtgatattctttaaagtgtatttgtcctgttttcctctactgctttctgtgtttagttctaaatcattctgtaccataggtttcgggagtcctagacgttaaccttaactatgttaactgtgtaacttggctcactgtgtgaaagcaaaaaaacaattgttttagggtgtaagcaagtgttattaatcttaaagagtctttttgtttgttttggccatgggtagaaagcattggagaatattgaggaggtgcaagcagtggtgctgggagactgtgtggagggtttttcgaatggcaagtgttctagcttaacttatgcctttcctgtctaatctattcatagactggctgaaacaggtttgcaatattagcataggaattccactctcacccatttggtgggctgtgaagtgttctggcctcttgccagcggctgctcagtttaggcagttgggaggttgcagggtgcatatcctttcttgtgaacaggcaaagaactttagatcattctttttctgaaaactttttgttttttgaaggtatgtatctaaatgtgctctttaatgaaaggggagggtatagacttaaaattcttattgaatatagaaatacttgacattaaagtttgatttttagatcatgtttcttgatggactcttgtaacttgaagattttcttccattaaaaaacaataatagaaaattgtgggatttttgcaatttgtgatgtgtttgttttcactgttatttttaaaaacaagtctagcatgaagagataccaagtttaaccactttggagtgtgctagaaataaactgtggggaactaacttggagaatttaccttgatcttgacatcttaatgttactctccattctctggagttacagctgtaaatctatagataatatctaagtaaccacagggagaaatggaactgggacaataaataagtagaatatgctgactttgctttaaattggcccattactaagctaactccatttttggctgctcaaatatgtcagagacatttccctgaatgagagctattgaaatgcatgaagacatcccttggattaaaggagataagtcagagttttttagggaaagtgttttatttaagtaagatgctaagtagtatttcatttttgtcatcgatttctctgaatgtttttttctgttcactttaaatatatttatccagacagtggaacatgtcaagggagtagtcatcttcatactggaataaggcgctgtgggaacccctgtgctcagtgtcctgcctaacctgacctctgatgcaacaacgtgtctttcttacttgaaaatcatggtagaagacttagatcaaagaaggaaataattcagtctaattttggaaaacatctttccttagatgtgagcttaaggcttgcagttttactttttgcaagaaagttcaaaaccaatattcacacataaataaggtctctaagctaggatatcattgatgaagaaaacaaacaacaacagtaagagactagccattcatagaataaaaatgagcccaataataagatcagttttttgttttgttttcttttgttttgttttcttttgagatggagtcttgctctgtcgcccaggagatggagtttgcagtggtgcgatcttggctcactgcagactccatctcctgggctcaagtgatcctcccacctcatcctccagagtacctggggctacagtcgcccaccaccgcacctggctgatttttgtatttttagtagagacggggtttcaccatgttggccaggctggtctcgaactcctttcctcgggtgatccacctgcctcagcctcccaaagtgctgggtttacaggtgtgagccaccgcgccctgctgcaaatcattaaatcagttttaataagctccccacgtcaaagagccatgttagatgctagagtggtatttcatactgaatataaatttaattccaaagtaagtaaatgcaaagagacaagtgtcagtttatttctttcatttaatgttttctctgtcattttttaagcctctcacccctccactattctgtgtagtggtcacacactaggtggagctgccaggactctgcccctcactgctagcacaggttgctgggcaggcaagagcacagagttgtgaagaccacaggcttcatatacactgagaactccatttaaatgtggctcttccatttttttcttaagtcatcttaaatgatacatacttaacttccctaaacctcagtttcttgatacagtgattgtaccgattatacagaattatgagaattaaatgagataatgactgtaaaatttttagcacagcatgtggtatatgcccaataaatgttaaatattttttattttaactactgttgtagtgattatcaaaatgagcttttggaattctttctttttttactttctactctttcactttgaagtagactgactttcccttattttggaaaacaggacatcatctatcagtgccttaaaaatcaacttactagattctccataaggcagacaaaaattcataatgttttgtaggggggagcaaaaattaccatcacactactgtatttcttttcagttgaatctctaggaaatattactgtatataaaatactagctgctttctaagtgtttctttctaacttcaaccaaggtgaaaaccatcacttagttttcagaaacttcaaatggcaggttaagttgacgtcctgtttcatattgctagggatggtcgctggtattccctctagcatgcaagaagttcatccactgacctataatatatatagttctacatagagaaagttcagtagtactaagtctttgttaagtataattttaaacttacaagtaccttaaatccagtgatccacttcatgcccttgttgttactagcatcttaccatgttttcatggtgtgctctccaaaaccctgagatgaacttatactttagtggatgggttcctgttgactggcactgaaggccctgttgtgaactcagttgatttatgaaggctatcccacttaagatttttataatgcttctttatcctaatctgtttttttttcttaaaaagtaacttcataggttttaaagtgtggaagacacaaaagaattgaaaggttggctgcagtgtaatttagtagctaaattttaaaaaataagaaggcagttcacattttttcaaataagtaaggaaggtttacatttttggagacagtttttatccataaaaaacatttatgggcagcactgtaacaccattgccatttttttttagaatttactatttagagcgagaagagacttgtgtaagaattgagcttggagccaggttttctctgcaagaaagagtggttctgtctttgctcaaatttaaatatagggagaagacccttttgtttattatcttccaactttatacactatagtttttaaatatttttaacaatattttaatgtatttttaaataaaaatattggtaaaaatgagattgaaaaaagtaaacagaaaacctatttatctaatgtccatcagttgtaatatgtttactaaatattgtgtatatttttatatgtattttattgaattgtaatctatatacaatctgtgtattaaatgaaatgtttcctgaattttatactatagagtggttgcaatccaggctgtcatatatgttcagtcaactcaaggtttaaggaaagaaaacccttttaaatataaccgtgtactgaaatgtatcagaaagtatctaggattttccaagttattttttaaagaaggtttgccgtgtactttgatatcatgctaataatgagtgtttgtagaaaatatataacctagtactgtccgtgatctttctgtcatgatgaaaatgttctatatttgctcagtccaatatggtagccactagccacaaatggctactgtacccttgaaatggggctagtgaggctgaagaactgaaattttaattttatttgattttaatttaaatagccatgaggctagtgactttcatataggaccactgaagtataaccacacaagccaaattatttcaagtatcagaaaataagatgtagagcacaattaaaaatagaaaggagagttttttgttgcatatgtagccagtgtaagctttgtgtttccacttttattctctctcacctcttaataggtggccctgaaaccatgggtatctcgtgtctttggccttgtgatgtagtgataggatatagtcatctatacatggtaatgctgacataagtcacttcatgattttttggaataaatttttgctgggtatcagccaattgttaaacacagcatattgttttaactaatgcaagtatagcatcttgttttatggtataagtgatattttagaaagttgttaatcccaaaaaagtccctgtcacaaatgcttcatataaaatatttaaggccaggcacggtggtgtgcacctgtagcccagctatctggggggctgaggcaggaggattgcttgagcccaggagtttgaggaggttacagtgtgccataattgcacctgtgaatagccactgcactccagcctgggcagcatagtgagactgtctcttttaaatgcacacacacatacgcgcatacacacacacacatttaaaatggatggggtgggtgcattgcatatcttagttaatatccactagatttttggtttattaattaggtcatgggtaggaccttgatagaaaataatttgccaaatcctttaagtcatcaagtctaagcaaatatattaaatgccattgaagtgctcactttaaaatgcttaattttatgttacatgaatctcaacttgatttttaaaaagggtctaaagtactaattttacatcttattgctggagagaagagctccattctttgaaaaccagaaaagaggatcgtaggatgaatattctatattgagtctctaacatttgtcctcacctggatggaaatttcccacattctgctgggattggggccttaaaaaatgactgtaggaaatccagccctttattaaatgaagattccagagagctctgtccagtggaattttctgggatgatagaagtcttctttttggtgtccagtatggtagcctgtaggcccttgtggttaggaagcacttgaaatggggctagtatgacagaggaactgaattttaaattttaattttaaccaacttaaacagccatatttggctactgactactattggacagtgcaattctagaatcataattggtagagaagtagtcttcaaacttttttgtctcctaagagaattttaaaaaaaattctctttttcagtttgaatacatgcattaaaatgtgtttgtcttcatgacaattatctcactaaacaggcatttgtcacctggatgaaatgaaggactgccctcttgatatttattaactctctgctttgctgccaagtgactcttcctaaagaggttggtgtcccagaggtttttatactccagggcaacacactgtaataatatttgggatgagtgaaagccattttggtaaagagaagtgattgtaaaaaggaaggtggaaagggggacttttagaaaatagataccaaagatgacagtgttagttctgatagaatgtattttgagccattctggtttgatacttagataccagaactattctagttaataaaatgaggcatgattagtataagaaagaacacttaaccttcctgctactaaggcaggtgggggcattcatccagattatttaatatgtgagacaaatatgttcaggtaactgcttgtctgtttataattgttttatttaaagtaatagttctcaaatgttttagttttgaaatcctgatgctcttaaatattgagaaccccaaagagcttttgtttattctggttttatctgttgttatttaccatatcagaaatgaaaactaggaaatttaaaaaatacatttattcatttaaaaataataataacccccttattggttcattgaattatgccaatcttctgatttttgtatacatttttttttgaggtggtcttactctgtcacccaggctggagtgcagtggcatgatcatggctcactgcgtcctctacctcccaggctcaagcaatcctcctacctcagcctccttagtagatgagactacccacctggctaatttttttgtatcttttgtggagatggggtttcaccgtgttgcccaggctggtctcaaactcctgagctcaactgatccgcaccccttggccttcctgagtgctgggattacagggatgagccactgcgcccagtctacaatattttttaaaaatcacatttgttggtattaccactgacttctcagaaaagtctttaaagattgagaagttgttgagctcatgggtgttttcaaaattctcacttttgtttgagagctcatattttattattgtaaataaacaccatgagttactttcgttgaagtgattggctcactttatttcaagagaattactgccaaatacttgagtctgaatatctgtggcttgtctttcagttggactttcaagtaaaaacaatattccttaaaaaaacaaaaagggtggcccattcaactcacaactctaggcagttgcgcgagcgctcttcttggtgatagccttccttggtgctttggtgagcagcagatatccttcatgtgcacttccagtttcctcacagaaaagattaaaaaggggcaggaataacaaatatcaagttttactgttttgtcaaggacatctttaaatgagttggcttactttttttcctaatgtgagttggtggccattgcaagaataacaattaccagcgtatttttctgtcactgccttgattgtgcttgcaccactgatgtaaatgtcaacacagtgaaaagggcagcgatgtcttagtatattatgaaaaagtgctgattttgtgaatgtcctgaaagagtctcagggacccctgagggtccacagaacacactttgaacactgctggtttaaagggaagttacaaacagtaactttttcttacaaaattgaaaacccatttttatctagaaaaaaaatctaactgtgtttgggagtgggaaggtaaagtgcagctggggtgctggccaccactgccaggtcatgtcttgagcaggaatgagtcagatagcctgtgagagaaggcagcgaatggattggtttttgctcttaagcaaacctattgtttctgatgctgtttgcttctctccctctccatctccctctccctctctctctctccgcctccctttctccctctccctctctcccgctctctgtctccctctctctctccctccctctctccctctctccctctctccctctccctctccctctccctccctctctccctctttctctcagtctctctcactctcaccttctggtgagagagcatttatggtaaacaactcactttaaattgaggcctggtactccgtaattgagaggtattcctgttgctctgcagaggtaagcccccgtcagtcatgcctagactctgctgtcccagggaagtagaacccaccatgtaagcctcttcttactcatgtctctagtatgggatttaaaaattctcttagtgaaaatcatgtgttaaataatgagtttaagctggagtgtgaaaaataaggttgttgagaacggaggacagctatgtagggtgagtcttggaggacggctgggtcttattgaggtcattcattcattcattcatccatctattcatcggatgtttagtgactgcctagtatgtgatacgtgctgagaatataatgttaaatgctatctttttcttgctgccaggaagctcagctgtggctcccactgagtggtaagcatgcatttggattgctgtgtagtaatgttggtgagaatgagcacaagtttagttcagggaagaggtagactgttcagtttggggtcagacaaggcttcacagaggttttcagctttggaaatctgaaatatacatatactcagagttgatgaggctttgggattgacttcataagatggtcctaggagttggtatctgaagacggtggaggccagttagtactttatagaccttaaaaatattccctatttaataaatggtgctgggaaaactggctagccatatgtagaaagctgaaactggatcccttccttacaccttatacaaaaatcaattcaagatggattaaagacttaaacgttagacctaaaaccataaaaaccctagaagaaaacctaggcattaccattcaggacataggcatgggcaaggacttcatgtctaaaacaccaaaagcaatggcaacaaaagccaaaattgacaaatgggatctaattaaactaaagagcttctgcacagcaaaagaaactaccatcagagtgaacaggcaacctacaaaatgggagaaaattttcacaacctactcatctgacaaagggctaatatccagaatctacaatgaactcaaacaaatttacaagaaaaaaacaaacaaccccatcaaaaagtggacaaaggacatgaacagacacttctcaaaagaagacatttatgcagccaaaaaacacatgaaaaaatgctcaccatcactggccatcagagaaatgcaaatcaaaaccacaatgagataccatctcacaccagttagaatggcaatcattaaaaagtcaggaaacaggtgctggagaggatgtggagaaataggaacacttttacactgttggtggggctgtcaactagttcaaccattgtggaaggtcagtgtggcgattcctcagggatctagaactagaaataccatttgacccagccatcccattactggatatatacccaaaggactataaatcatgctgctataaagacacatgcacacgtatgtttactgcggcattattcacaatagcaaagacttggaaccaacccaaatgtccgacagtgatagattggattaagaaaatgtggcacatatacaccatggaatactatgcagccataaaaaatgatgagttcatgtcctttgtagggacatggatgaaattggaaatcatcattctcagtaaactatcgcaagaacaaaaaaccaaacaccgcatattctcactcataggtgggaattgaacaatgagaacgcatggacacaggaaggggaacatcacactctggggactgttgtggggtggggggaggggggagggatagcactgggagatatacctaatgctaaatgacaagttaatgggtgcagcgcaccagcatggcacatgtatacatatgtaactaacctgcacattgtgcacatgtaccctaaaacttaaagtataataataattaaaaaaaatatattcccagttccaccgttgcctttttctgctctcagggtacatgggaactcaaattcataatcagaccatgtttggtgcgaatagagtgggggcaaagggggtttatgtttctgaggtttatctaggatgttcatccaggcttccctatatctctgccagacagcagaggtctttttggtagaaggatttccataatccatgtattttctagaacttgttggctaaatggctaagtgaatgttttttggagtgctaccagaccctgcccttcctgttaataaatagattacttaattaatcagaaattttcttaaaatttagatgtacatctaagttggataaagtaagatcttcaggagcccttggccagtgtcagtatagaacatctacctgataatttcttctagagaactgggcccacttgggcttccccttggtaagagatgctgaggttctggttgggctggtcaggatctgatatgagcactgttgtattctctttacttcctttccaattgccatgagaggggagtctctgccccacatttttaaccagtccttcaccagactcttgggtcttagtctgtgtcatctcttcatgggcccttagcatgttctgtctgtgtaggtcctctcagtaaagtccttcttaaagcacaaataaacaaaagccccatcttcctctaactactgctccaggcacagtgaactgattttagttcttcacaaccttttcacccctgagcttctggcacataacactcacccctagtttagaaatccttatgtctgcaaagcctctgctgacactgctgaatgtggggtctgggcttctcctccacaccagtcttgctgtctctgttacgattattgctcctctgcacactttggaaggcagcacagcacaatgttgaagagcatggccctggagtcccgactctgtcacttagtgagctgtgtggcctggggtgaattacatagcttctctgtgcctcagttttctcacctctaacatgggaatcatacttggacctatttaaccgtgttattagaaagactgagataatacatgtactgtgcttagaattgtgcttggtacatagtaagttgtctgtaaattattactgctatcgatgccacattattactatttttgctgctactaggactctgtttttgctagtatactctgttgcccccactgtactctgagttgagtgaggtcagggttcctgtccctcattttctctgtcgtagcttcagtgtgtgggcacatacattctataggtgcttgttgaatgtgtgatatgctaggacagaggagtgggagcgaagagggatcttgcagggtggggagacaatggcattcagaggcctcctgctggaggacgtgtcttcagggctgagctatacctgatggctggaagctagccaggaccaaggatcacatgacagtagcacagaggccccgagggttggtgggggggcggcagggggaggtgggagaagatgggactgcagaggtgaggccagcaaagaaatgggagtcatgctgggcaggtcggtccagtgaggggagcagggtgtggccatatgtgccgtgtaaaattatctagtcaccatgttaaagagcaaaaagaaacaagcaaaattaactgtgatatatttcatttaatgcaagatatatccaaaagattgtgtcaacatgtaatatttaaccatttcaacaaatcatatttaatagagaaatactgatgagatattttacattgtttttgtactaagtctttgagatctggtgcttttgtacttgtagcacatctcagtttggattggccacattccaggtactcagtagccacacatggctggtggctgccacgtcagacagcatggcttggtagaagacagttgagaggtaatgggttttgaattaagacagtgtgggtggggagcggtcaggggagtagaactttacaggatgactgccatgtctcttgcttactagatgagtggtgacctcccagttgatggaagaatttaggaaaacaatgcaaggtttatttctttaatatttttcaggaataaaggggcaggaagtaagatgagttaagttttagagtttgagatttcgttgagacattggaccttgtggatagggagcttagtagagagtttatgatcttgaggcctgggaagaggagcagaagctctttaagcccagcataagactccctggcctatcccttcccctcctgagctgagcccaccactcacttggacatcctgtcactactcccatcctttctctggcttgagggctgtcttcttgggcttcagtggaagatagataatcacctcccaccccgaccagtcagtgggctgtggtcagagaggaaaagaggagcatagatgggtctgacttcacaaacatgccttaaccttcatctgcagtgactgaaatatttctttcttttgttctttctttttttttgagacagagtctcattctgtcacccaggctggagtgcagtggcacaatcttggctcactgcaagctccgcctcccgggttcaagccattctcccgcctaagcctcccgagtagctggtactacaggtgcccgccaccacgcccagataattttttttgtatttttagtagagacggggtttcaccatgttagccagggtggtctcaatctcctgacctcgtgatccgcccgcctcggcctcccaaagtgctgggattacaggtgtgagccaccgtgcctggcctgacagaaatatttcacagttcatgagccattcagattttaaagtttatttaaaaattatgtacaatgaaatcacaagccattttgaattaaaaagaagtaagattgagatagttcaactgctactggaaaatgtctgtacctttttatttttgatatcaaattctgagatctttttctgggtctctttctagcagtacttttgtttggcagtgtctctgggaatgagatgagggattgcaattagttcatggcagaaagggaatatttgttgcttgttgactcttatttagaatattcaaagatgaggtaagaagctcatccatctattcagccattcattcattcattcattcaccagtcaacattgttgtgcatttacaatgtgctggatgctatgtgaggtcctgaaggtattctcccctttaaaaatcccagttaccatgtagtgatgtaactgtaacaaagagataaatgcagacttgtatgggagaagaaatgcagggccaggaaggaaggtgaagcttgagccaggtgaaaggggtgatgaaggagaaacttacgcagacatagtacagaacatgtagctttcatagaacagcaaatgttgcaatattgccttgaaacagtcttcaaaatgtgctttcatttatgtgtgcatttgttagttctacaaaaggttcaaggcactgtgttgagcgctctggaggtgcagctgctttaaggtgtaaatgcacgaggcagcatgagtgcccttttcaagagcagagagcacatgagcagctgcagtacccagactgaggagatgtgacatccacattaacatttgaaggtgtcgtgggactttgatattccacccgcagacaataggcctctggtatgtgtcagtccctgcattagatgttggggatatgcatacacacacacacacacacgcacacgcatgcatgcacacacacatgtatttatatatgtgcatacacacaccccacacacatatgcatgcatgcacgcacacgtgtatttatatacatgcatacacacacacacacgtatgtatatataaatgacaagagtataacatgctgctgtccttcagcccctcacagtccagaggacctaataatagtcagacaacatgatgtatgttacttggccttgtgggagcacttgactccacctggagagattggggaaggccttgggaagaggttatatttaaactgagttttgaaggttgagtaggaattaacttggagaagagagtgggaaaggacattctaggcaggaggaatgataaatccacaagcactaaattgggaaagagcaaagtgcctttgtgcggctgctgctgctgagcttggtagggtgcagcgtgtgtggtggagaggaggacatgggccaggagggccgggggcagccccgcaccagtggtgctgagggtttcagctttcagtgtggttcacagggaatcaccagtcagttgtacagaagcatgggcgctttacattttagaatgatcttgctaaaaccagaagatttgctgacgaagatgagactagcaggagactgtgccatgcagacatggaatcctgatgaccacccagacttaagggagaacatagaggaaccaagtcaggaaaggacagacgagggaagaatggtcagtgacaagatataacagagagtagtggtgtagtagcaaagggtttccccaactttggtttttgaaaaacttctaatccacagaaaagttaaatgaataatacagtgcacacctgcttatcattcacctagaactaacagttgctaacactttgtcacttttgctttaatctgttgctgtcattgccctcctaaaggaagcaagggtggccatggagatattttggcaagaactctgagggcagagacagcctgtgcaaagtccctgaggtagaaggatgtgtagcttgttgtctgctggtaaggaattgatgtggctgaagtgagagaaagggggggaattatagaagtgttagggaggtagcagaggtccatatgattgagggccttgcaggccatggtgaggtgaggactttagatttttctgtgagggagatgggaaggtactggagatctttaagagaaacgtgatgcgatctgatttgcattttgaaagaattgctcagactgtgtagcagtttaaccagggtagacggtagggctagcaacaggaggtcaggtagagaggtgactgctgtagtccaggcagggtctgatgtcacctgaataaggatagcagtggggacaggccactaggagtgtgtcctttgtctacattgaaggtggaggcagcgtgatttacagaatggattagaggtgattcaaatgtaagactaagtgaagggtcaagggtgactcaagtttttggcttctgctactggtgcagtaacagtttgtggagaaatcaagaacctgttttggaatgccttaaatttgaggtgcctgctgggatatctgcatgggtatatggactagacagctggatagagaagtctagagttgaaggaagtggtgtggactggagaaaggactttaagaatcattgacatataggtagtatttaaagcaataggtagattctctcgctgggagagaaaaaagcacagatagagttgagatccaaactcggaggcctggagcgccccagaaattataggtcgagaagttgacgagaaccaggaagagcctggaagataggaggagagagggctgtcctgcatgtcatgcgaagaagcgaggagtgagcagctgtgacaggtgctgctgataggtcaggtgggatgagaaaggagagccttggagggcaccttggtgagagcaacttttgtggaatattagtgtgcagtcagagcaagttcaagaatgaatgagaggagaggaagtgaaaacagcaaatattgttgctctttcaaggattctgctctaaaggggagcagtgctggaggaagatgtgttgagaggctcagtagatgcttgaagaagtgaagaaggtgaggtagaaggatgtgcagcaggaaggaaggtcaggtaggagacaaattcaaaagtacgttggtaggtcactttggaggagatagctatttaaattagtccttgaggcagacttgttttaaatgactgaaagaatgttgctacaagggtgttctgtgttagagtgactgaaagccagtgcagagcttgccttggctggtgctcagtggctgccgaagctcatggcactctggtggtggatatctgtgctgttgcagccacatgctcagctgtgctgggaagaatttgggtccccagaggcttcctgtccttaactccctgaagtcaatgctgtctccctgcccagcagctctgtgcgggactcctcacggtgctgggactcactctgagtgactgctggttcttgtcctttctgctttccctttcttctcccctctctcttcgtggtttatttgctgtggatctaggacttcagaggttcacaaacatgaatgaagtttttatacttaagcataattattctgtgcacggtgaactgtctaataattattattttatgacatatattcagcatagactaaagttactgcgagaaaacctcacagatgttagttaggtatctgaaatgagatggtatattataggtatgttgttctgaaagtttttttatgggaaaagtaaattgtatttgaaggtttagtttagatttgtattctagtatattttattttattctggcatttcatagtttttcaaatcaattttatttttctgtgtgtatctgagaaacttccttaatactcccctctgaaatcatttttacttcccccaccccgtcttacaaatacttcattccttactccattttcattttcgaagtgtggagatagttattattgaagcaggaccagagcagagacccccagatggtctgagagttagaagagactttatagagatcagttcatccaattccattctagatgaggaagttgaggcatcttgagttgttttcccatttgattattatgatcagaaaccaaacctaatattaaatccttcaaggtttactatccttccttctaacaacttctctaaaaggagccactcacaggcagtgactggtgtacttggatggggtggctgcagccctgcaataccatgggctgcccagtgttagggccatctgggccagcaccgctcagaccctgccctccaacttgtattagtttggtccttcctcattgagataaattcgttctgcatgttgtttcctgtttgccagctgtccctggggattgtgggggtggtgacagattcaaaaacctgtgagattgctcctcaagtaattgctatttacatttctgaatttgctgtagtagaaactgaagagaaaatctttaggctcttggtcagtactggactagatatcagacgactattacattttggtactacagagttcattcaaataattttgaataataacgttaagctaccatgaaaaaaaaaacctgcactcctttgtttgcaataattcatacataaatactgctaaaacaccccatcttatgtgactaagtacattcttattcatcaccccaaattgtattttaaatgagaatatcagaacattaagtatttgtattttaggctgaaatgaagatattctgtcataagtcatctaaagtaatatgttttcaaagtagggatgaatctttgatataaagaagttgaaatagaaaaaaacctcaagtataaatccttttgtaatagcatctctgtagcatttttcaaagcgttcaggtatttccaaataaactcatgtttaagaactctaactaaggctgctgaatagatgctaaggccaggctaaatcacacagccgtttaaactgaaacagctcagttcagagggtactgctgttttataaccatatttaaaaatgtgttcctcttttactccctcaaactgggttcagggatataatggatcccattataggtaaaaggtctgtgactcagccatcgagctactcaaactcttggctgttttaattgccaccattaaagctttagtacttttatctcataaaaatagatatcattgatgtaaaatgtgtgcctattgaagatacgtgtgtacctctgcccttatagttagctaatcaaccatttgagtttaaagttagttaggttttatgcagatgggaacatgacatagatcacagatttgttcaggtttagtcatttaattaagaaaaaaattccatgtagtagtaagggcaatatctaactagaatgtcttccaagatgaaacttattttgttttggtttgccttttaactacatttaattgacggaacgatggtgaatttttactagtctctttcttgaaagagaatagtgttttttttgtgattctaatactgtgacttcagtgattcaaggaaatacttgaaccactcttctgtccctatttgacacatctgtttaagtgtggtaattggagatgtttctctggttgtattttggtgtatacttgtagacaaaaataaagccctgcaaaggggaaaataccaaagtgtgaaggaaacttcaagaacacactggaaactaaatgttaagatgtgaaaagctagttctttctgggctttttcttccagtatttgagcatgtcacagccattcattattcatattgtgctatgcaaacaaggtgcagtgactctagaagagttctaaaatgagtacatctcaggaaagcttaactgcctaaccactgcgtacatacacattgctttctctgttgtgaaaataaattagcaaataattggtgggacagtttattaagttattctgttctgcagttgtaattgagggattgtattcagataagagagaaaatctgactgtaaaagggactcaaatctgaacagttctaaaactaaaacctactcacacaaaacatttatgagctgatatacataaccaggcttctattcttgcccagctgtgtagattcaattataataattttctcacttgcacaacactgctgtttgtttattattgcgttattagttagtgaatgaacctccctctttttgacccctcagcagtgtttataaaacacttaattgctttggtgtcttctgtttcatgtgtagttccagctggaaggagtcatggggacacagtcccctctaagtgttaaactgactgtttgtaatatgcagcaaactttctttccaagtaagtatcaggaacctttaatattgcttataacacagctgcttagatatttttgcttgaaaatgcagaggtttttaatttttttttcttttttaatctccctgtgatgatttacatggtagttaactatctaacttgttagactctagctttttaaaatgctcttttgcttatcgtaggcactccctttatctcacctggactcttcctgtctgaacgggtcctacctctgcccagctgttaccttacaccaagttctctttgccattacatcttccacttctttggagaaacttaagcagaattgtgtgagcaacaacgattaggtagtaggcataatgtttgagaatgtgggctttgccagaggttgcctggtttgaatcttgattcttcttataaccagctttttgtgatgtgcagcaaatttcttaacctctttgaatgccttcatttccccatctgtaaaatggtgataacttcactggttgtctggaacagtgctgggcacagaggtgctcagtgatatcacagcagtggcctctttacaaaggcttaatgaaggaagtcctgctgtgctgtctttatgtgaaaggataaatatctcactaggaaaggggaatcctaggtagaaaaacaatttcagatgagagttgcagaagattttaaagtatacattagttatttattgttatgtgacactttacaggttgactatctctcattcaaaatgcttggattgagaagtgctttggatttcagatttgtttcagattttggaatatttgcattatgcttatttgttgatcatccctaatttgaatatctgaaattgaaaatgctccattgagcatatcctttgagtggtatttcagtactcattaagtttcagatttcagagcatttagatttcagatttttagattagggatactcactctgtaccacaaactttatggcttaaaacaatatctatttcctctctcagtttccgtagatcagagtttgggcatggtttagctgggtcctctactcgagcctcacaaggctgtagtcagacgtcattaggactgtgttctcatcttgactggggagtcttgactggggaggaatccatgttcagattcattcaggttgtccacagaattcatttcctatgctatatgacttgggtggggggcttcagtaattgctggctgttgcctggggccaccttcagctcctgaagtctgcctgaagttctgcaccatgttgggttccctggcaacgtagagttcccaccctcaagaagggtccccaccctctttaaaagtgtcccccagtcagacctagccagaataattgccctttaagtaactctaaaccaattgatttggaaatcttgattacacgtgaaatccttttaccttcgctgtattctgttggcttgagggtcgcaggtccctccatagtcagaagatagagataatggggccatcttggaattctgcctccccacaagatgtacgtgagtttttataggacaagagtagtctgtcattaagcaattattgaaaactaaatttgccagactctcaatctttgaatcctggagaacttgcctagagtgtgtaaattaactttatcactatgctccttataaattgattttttttcccttcaaaaattgttttgttcccaattctgcacaaacccctgggattgttcagtgttgcagacacacctttgacagtctttgaagtttgacttttaaaattcttaggaacagcatagtaagttacttttaatattgatccttttaaggtagtagaaacttaaatgcaaatttggtaaaaattgcttttccagaaccaaattctgcatttcttctttccagtttaaagattaaacatgcaaagcgttttgaccagccaggaagcactgctgttgtcttttgttttgccaagtttgatccttagtaagctgggtagcttcaggtgtgggtatccactgccaaattcaaacttccagacacctctttgagaacactatggaccttagggccaacttgaaataagacagatgccttgagactgaaataggttctatagattctcattcctgtatagttactaaggtgagcccactaagggaagggcaatatgcaaggtgatgaagaaaagagagaagggagagaatgaaatttactttgttaaggcccatgaacatactgtctttgtcatttttacttctagaaaataatgtccagtagaagaacatttgctgatttactgccataaggagctcaggaatttagaacaagagggtgaaagtatgactgtgtctcagattcctctaatgggctcatattttggtttgcttatggttagtcagaggcaccatgatgttcacattggagaccctgcgttttgttgggttattgctcttgttctgtcatttccattcagtcatttataaagcagcaacaatatcacccacctcaccaacctcatagggttattataggaatccaagagaagaggtatgtaaaatgttcaacagagaaaataggtgggcaggcctgctgcctcaggggggtacccctctgcttgtggcctgggagatctaggaagttactcactcttactgcaataaactttgtattgtgttgcatttgtggtggtttttgtttcttccctgcccagagaaatgatggtttctgttggccctcttttttctcacaaaattacttcagggataggagatgtaagatcaggaacacagtctaaatactggcataccctttttagaaggctggcacatgtaaaaacatcattcaagtcttgtataaacaagctaatttttgcaagcatttatgaagcaacagagacacatcaaaagcatgttcaatttagcattagctcaactctgtgccctaggggtgtgtgtgtagataaacaggctgtttcaactatatggcccctaagtgcaagcctgtgacttcatctggtacttttcctaagaagtagcaatgaatctgtgacaaagatggcgaaaactggcttagttacagtctttgaaatatagtagatggtgatttggggtggggagagttttcaaggcagggcaaggagcgggctaatttttttgtggttcctgaggaattggttcagtccctgggacaaattaggcctcgatattgattgcattgaattatgctagtggagtgatttttgagaatcatagtggataatgtttgttggctgcaaaacacaataagaatgccagttcttacctacatttttatctttgggtaaaaggttagtgattctctacagctttagttcggaactaaactagagttcttccctgaccctttgaaggcaaaaatctcaaatttgtattaaattttttagccatcttaacctgcagattagggttaggatcttaaatagaagtaaggcctttatggttttggagaaggacagcagtctactccctaggcttgtgctgtggctacaactagggttggagaactccacagccactccctctggctgaggataccactgttgggggtcctggtcacattccagaccttctcacaagaggcttggtaaagtatgtggattttgtagcagagctcctatgttaggattccagttttgccattttctagctgtgtaactttgggtaaattaatcttaaggtttcggttccatcatttatgaagcagcaataatataactcacctcaccagcctcatagggcattacaggaactgaagatgaggtatgtaaaatgcttagcagagcacatgccacatgtaactatacaacagatgattaaaggaaacattcagtacagtgttgcaggatggctttaggactggtactttggtgctgtctctctgctcagcaccctcttcccattgccctagaagggccaggctggggcagctttgctggcccagcagcgtggctctgtgcttgcagagctgaccctcgcccattggtacccctgggcctgcagggcagcacccaaccaagggtggacaactggtcagagtcatgttggttgaaaacagagagacaggaaaggggagaaggctggaagggcagtggtgggtatggcggagggtgaaggagctgggagcaaacaccttgctctcctccacttgcggggagctttgtttcatttagaatttctcagacatttagaaaagggtttagcattggcagagtttcactgcttatgttatcccagtcaatctgactatagaaacaccacagcatagtgttttacacattgtgaatgctgttggacagttcctgtggtatcactccactcctaaatatggagaacatgcttagtatgctgtttctgatgtgaaacttttcaacagtaaatctaacatgactgcttggttcattatttccattgtttcagatgctactaattcagaatgtgtttataatttagatgccataaaggtggctcatgttaatttgtagccatttaagattttgtttatatggtgaatctgttctaaggacagctttaaaacacaagcagaaaggcaaaggttcaaaaacgccttcagataatttttcagctagatgtttcaacagtaatttaaactttttatttttaaaatttaatgattctgaggtacatgctaagataaattatttcattatgctatttcaaaattcattttattttactttgtaattatcttgacatataggaatatgtaacaaaaattatacaagtcattcttatatgcttatactactttattcctaccagtaacttaaattgagaataaaataaactcagccaattcagtgagctgtttcagtgcattttatataaagttatatttgtgcatagtgtaatatactatcttttgaaacatttgataatcaatgttttgagaaagacagatggacagatacacatgcttacgtacccctgtgctagagaaggtgatgaatttgccatgctatcactatatcagtataatcaaaagtatattttgaaggacattttaattcaagatcttcatggaaagaagggaagccatggctaaacacccttaggacactctctgtactgtctccagtgccccctttcctcagtctattaagggcttggaaagtcctgcagtgaagaaaactgaattttggttagcacagaattctttatttttgaaacggagtcttgctctgttgcctaggctggagtacagtggcgtgatctcggctcaccgcaacctccaactcccgggttcaagcaattctcctgcctcagcctcccaagtagctgggattacaggtgcataccaccacgcccggctaattttttgtattttttagtacagacggggtgtcactatgttggccaggctggtctccaactcctgacctcaggtgatctgcctgccttggcctcccaaagtgctgggattacaggcgtgagccactgcatttagcctatcacagaattctttaaactcatgttacctgagacctgtttttatgtgacacatttgaatatccttaacttgttctatactttttgccttctcaattaattcatatagtcattcagtataaatatgttttcctggaaattgttaagaatgagctgaataaaactaactggcatatcaaaagacttgaactcagggccctgaattcattaatactgattttaatcaagcagaaaatacttcagtccttgattctcttaagaatatttttgtgctttttattttatatcaaataattaaagtttattaccccagttgaccattcaaactactatccgctcatcttgatctcctcccttacaaagcagattttaaaagcttgcttgtgaagcatttgcatgcctgcagccacccagtctcaggcaggatttgttgttcaagctggttcctctgcctccccctctctctcagcctgggacagtttttagaaagcctccctggtctcagcctgggttaggtgctctgcactctttcccagcaggtactatggctgccttgtttactgttagagcctcaaatatttgttgaataaatatatgaattgggtactagataccaaatgcatcttcttttttatcagtgtcattgttataatctcaataggacttgccgaaacgttgctaaatgctcttttgaatcattgcacactcttctggctgaagatcgagcttcacttttcataccagaattccttttttgaagagtgtagaggggtcaagaacctggggaatactggaaaaaataaaagttaagaatgtctgtaataaaaatgtgtctccaaagccatttttaagataccaaatagtatgtttcagtcttaaatgactacttgctatttgtattttcatgagccatttaagcaatagtttagtgttctaaaagcttgtatttatgttacttgggacttaattggcctgcctcttcttcaccagaatcttattttctctgagagcacaagtgcctcctcctcattgcctccctttagcttaatttgtggggaggcttttgttttcataagtaccatgttattctggtccgcttggtaccatcttttcttttcctataaagcattgttttgattttagacttgtttgtatgtaaataaacatgtaaataaatacatttgtctgtaaataaaatgtttatccttgggtgccctgtatgacaaaatgttggtttgcagagatcatacatgtggaagcattgcacacactgttaacattgcatcacttgctcatgctatactcaaaattgctaacaggctgaggcttcagcagtgtaattaaggcaaaacatgatgaaattagatagctttttaagccagaaaatgctgatgaattgtggaagaaaagcacattgagataaataaaaagttgcttttttacatatcttttcattttctttgatgattcttctatgcattttgggttggatttgcttaaaagaagcagagggattgctctcacttcccccatcgggtctcctttggttaaatttgcatcttgtccattctgctgttttatatacgataatttagttgtatgtcttttctgatttatatgttgtgaacaatggagttaaggaaaagaacaattgtctgtagcttatggtaatgttttcaacaaaacacactcaccttagatcgtttttatttatagtttaagtatcagttatgctgtttaagttccaaaagttcatggcagtctttatatattccataatgttccaaatgggatatggaattatagtagaatatatgtcaagcagaaagtttgacaggatgttatttaaaaatacctttggtatctaacattctccatgtttgctctaataaatgagaggttttaggaatgccctacatggtaatatcagatgttaatggcattgattacctgtcaggcagtgggaattgatgggaaaatgtctgctgtaaaattaaatagtattagagaagactgtaccatgcatctggtggggtggggggtggagggggggacatggctgggcctgggagactttgtcagggtattactgggagctccaggtttttttccccacatgattaaggcaggccatctgttctttgttaaatgtttacaaaaacagcttttctctaaaagatttaaggagatgtgggtctggtaaacactgtaatatttctgagcacctttttcaccctatttcagatagtaccaaaacataattctgctgcatatcaaacagaattaatacttttttgtatttgatcttcacttttttcctccttatgcaagattaaattttttactgagttactaatttattgcttcatttattactaaaaggagcatctaacatgatttgcatgctaaagtgtgtaaactttaaatctttttgtgttatatgttttatgctttttctaattcattactgtgtgctggggaatctctcattagaagctggtgttctgttactggagcaaatgccatgcagattaaagaaaggtaaacatacctggtattaattctccattctaagttttaatcattgtttagactttcctcttttcctctctttccagaaacagctttttctttcatttcctgaaaaatagcttgtcccaaataagtttgatctccgtgtcctgtgcaaaaaagatagggctttttcctttttaattacattaaggaataatatgtacaaaataactcaacttatgcaaactaaatataaaacagttaaatcaggtccattgatacttaggtagtgataatttggacagtgcctctgttgatgtgtaagagtgtttgtgaggaaaggatagaggggcagagggtaactttggcagtgtttagttagttgtgttatccctgcatggaaatctgctcatgtagatctacatctgtgtattcttcttcaaactttgaccttgcctctgtgtttcctatatatcgttactcttttttcagcctcattctcccttagctatgaccagcaaagggcaataagtattttaagattttttaatgccacaggattttggaagaaactttggaaatcacctatcaatcacctaacccaaaaccttcattttgcagaaaaagaaactaaccccagatgggtgaagtgattttttcccagatgatatagctgacggtagggcctggacttgaattttaatctcttaactcagagttctgggctctttctcttacaccagtgcaattgagtgaaacctgtgagcctttcccagaaagatgctgtgtagaagatgttaggaagaggtggacagaatcagaaagtactagagttaggaaactagattcaaatcttagctccgtcactaactgtgtgacctggggtggccacatcaccttcttggacttttcctttctgaaagttgggggtaaattatcacttttttgttatgagattcaggggaattaacacatctagcaaacataacctagcttggtgcatggcatcaaatagccgctcagtcaatattaggtgtattggaatcgaatttacagtacctgtattttaatgtttgattctaaccttcctccttttctcgtagtaagccttggcgtgtacagtagtcacgaggctctggagatgtgggcctgggctcgtctgcctgctcctcttctgtaggtcatgtgctgaggagtgaggactctggagctattggctctgatggcagtctcagttctgtcacttaacatctgtacctcctcggacaagttacttcatcttagagtggcggtgtcttcaactataaaatttgaagaatcacctaacgcttagggctggtgtgaggattgaatggtaccacggtgtaaagcatatatgcctggcacatagtagatcgtttacattacagttagtgttacatgccagaagaagcatatgagaaaggcaggaaatgagagacatatgtagatttaatattttcaagtattttgttgaaatataaatgttcgttagatgtcataatttatggtatagatgataatccaggcagccctgctctggtttggatggtgagctatgagggaggctgttgtatgcaggagtcacttcctctgatcttggctgaccactcagaatcccattctaaatgtggttatttttctactctatttaagatagtctctgggtgtatccctagtgaaagtcaagaacctcccaaaggcatgtcacattaatttatttgggttatctctcccgtggtgaaattttgaaatataaagccttaaagaggttaagaaaaacatgttccacctttcatgtcaatgcaagaaatttcaccaatccaaaatcatcaagtttgggtatgtgcttttaatttgatattttaatgttgtttaaaccagaaatgacttgtattgtattagatttatgtgttatgtttacacttttatttcagactttcacagtactagaatcttgcaatgttcagtatacttgctcattttaaaaatggctaaattatataccttttatttgagctcccattcccacatggggctagaactcaacttagatgtattctttgtggcttagtcttggtgctgttttgccattcaccattttcatgtaggctgtttaaaaaacagacagtgtcttcagttgagtgagtttttacttcctgaactgatttttttttactgtattaactaaagtgctattttaaaactttctttcttaaaagattctctcttaaacatacattttttttggatgagagaagatgatagattctacaactgtatagttggaaaaatatttgctacctgagtatagaataagtttcagaaacatcagccactaactttcagttcttttctttactgtgaagaatgataaactaatttcaattcctatttgtgtctctcagcattccccgtcggagccctttctagagaaaccagtgccggatatgactcaggttagtggaccgaatgctcagctagtgaagagtgatgattacctgccatcaatagaacagcagccacaacaaaagaagaagaaaaagaaaaacaaccacattgtagcagaggatcccagtaaaggttttggtaaagatgacttccctggtggggtagataaccaagaactaaataggaactcactggatgggtcccaagaagaaaaaaagaaaaagaaaaggtcaaaggcaaaaaaagacccgaaggaaccgaaagaacccaaggagaaaaaagagcccaaggaacccaagaccccgaaagcccctaagattcccaaagagccaaaggaaaagaaagcaaaaactgccacgccaaaacccaaatccagcaaaaagtcaaggtaggctgtgggcagaaaaaacaactgcaaaacattgagagtacagaaattagcgccaaatagttacagcctatgaaatgaggggtgggaggggacacaatgatttttgtcatcattgagtttctttccctaatatccaaactaaaaagctaaggcttttacgcattctgaaagttaggacttattgttgtgaactgttgatttacagaccttactggatacaaattaaaaatcaattttttatatttttatgaaaacttatcatttagcaaatggaatgaagttagcagtataattatttataagaatagaccagcaacctcattttcagtgatgatataaaactggataagaaggattatagaagaaaggtcactatatttcactaagcattccagcccttcttcccagaggttgaaccaggattgttaattctctccacttggcggagtaagccttccaggagcagggttgaaatcctagtgagcagcgcaagagaaatcaaatagtacttgtccattggatatgcattcaagagtagcatgaattttaggttctagggaagaccctctttcactccatattccccccatcaattctctgaccgctcccccaatttcttaccccatttattcggtaagaaaaactgagaggagaagacattgaagactaatttttttcatttgtagtgaatgtttcttacaactgttctgaaccagttccagacatctgaatctgtttttcagaatgtggctcatgttagaaaatatagtttccagatggaactatggtcagccttggttaatccgaatctgtttgcaaactccattagaaaacacgcccaccccataccctcatgtgcacgtgtaaacacacacctgtgcatgtacacagtcagttctgcatttgctgtgaactttttgagattgctgccctgtgtgtgcatgcccaagtacacaaacagaggagattaattttgtggctagaaagatgttgccttgaagtgaaaggacaaacttggacttgcaacttcctgctaaaaataatctaaacaactccaaatacattattatgtgatgttttaaaagtttggatcatagccatttaggaaattttgccctcaacaccttttatggtgccaaagtaactgaattacattcagtagctcagtcttacagataacttaatatttgcatttacttgtgaattttctttgatgcctcagtgtgtggtctcctaattgaaaaccatcacttttctccccctctttgtgaacatgtttttaaacttaacactttataaaatctgtttttatttaagaaatattaagtgcttattatttgcaggtactgttttaagagttagggatgtaaggatgaggaagaaagacatgggtagaattttagtgtgactttatgaggtagtttaaaaaataagtaattacctaaatctaagtatatgcttttggtaggagaaagcataagcttatttctcccaaggagaaagaaatcaaagcaaaaatcttaaaaagaatataatcttttttctttaacttaaaacataggagtctgtgttctaaagaagctttttggagctcaggaaatacatcattaatattaatcttagcatcaagatatatatctgattccagctttcatcttaatttttaaatttatcacctaatggtaaaaatggattaaaaaaagaaaataacactttatattagatattgttatgaatttccaagtatgtctttttaagttctgaatctacatcagactggctctatgtttaaaaacttacttagcatacccttacctcttgtagagtcctttggggcagatattaaaatgctgtatttaacaatgaaatttgttaaaattttcccaacaactgtaagaaactgtttgaaagttggagcaccaaatctagttagtcccaggcatgccatgtcttcttggtgcaaatatagaccctgtgtttatccactagagaaacattcagtgcaagcctcataggcttgctgtccaccctgaagtatgaatcagagtctgtgcagagtaagtgtttggcattgctgaatctgagtgttggctttgcaccagagtcacaagcttttggtaggaagaaaagggtgtattttctctgaaaaagtgtctagtaccttcccccctcctgcggcttttgattaatagtctcagtcaatgcctgctataggcaacagttatttttaccctaagttgtgtgaaaataattggatggaacacgtctgatgagcctgcggatttacaggttaaacgggagctgctgcagtgtggcccaaagacttaggatgccacactggggggggcggggcacaaagagtgttggtggcacctctgttggccctggtcacttgaccacttatagggccactctgatttacaatgaagggtggtaaggacattcctgaacttccctgttgttgacagtcaaacagggatggctgtccaagcatacggtagttgaattgaggttttaagtaaattaacaaaccagaccattattttgttgaacctcattgtttctcttgatctgataaattgagtatgtcgcattgtggtctcgttgttctactaagtgtagaaaggaaacagcatccctggagcaaggataactagagtgcatacaactacatgtaaattctgaatagcatagtagaataattatgtaaattgaatatgcagtgatgaaggtaatagggggtttgggttatgttagtactgggtttgaattgccgtagcagtttgcttttaagcactggaatacaacagtggcaattttgttttgcaaaatgttatgtgataccagttatttccatccttgaataagttaacttgatgaatttgtttatacagaaaataattttcctacagagagctaaaatagagggaataaacagaaccgaaatgaaaaatttagcacagaactgctgacatctttactctgcagccctgtatgccatatcattgctgtgttgtacaaacaagtgtgctgttctttgagctggaggtaaaggaatcggcccgagggtgctctagctttctctgtgctgtgtcactgtcagggagagagcttggtctgcatcacttacactcaccatggtaaaggacatgtgaaggctggccgttgtcaggggctgattttccttgtgtgtctcctcactgtctggcaccccatcttgttctgtaaaatggcagaagcttgaatttgtgaccattcccagagaactggcctttttgacaactaaaatatgatcatacatgtctttcctctgcaggaggacctaaaagaatctgcccagaaactgttacatagagtgatggtgaagcaggaaaagatgttcagcatcacagaaaaagacatgtaaaaccttgatgagaaaaacgggccacattcctattctctaatcaggctgtatcttttttccctttcccgttttatgttaaatatatattttttgtatcgatttttctagtgttctccccagttgtccttacagctttcaaatattcgttgctaatattgaaaataacagcgaaaacatttgtgggttggagaggataccgttttgcatgtggaaggattcatggagctggaatatgaggatttgcatccttttcaatgcattttctgttgtgcatgcatgtgccttgtgagatgagaaagaatttggaggaagtgcttcctttgaatgactcttgaaggatttaatggtccatttagctatataaagattctttgaatgtacagaaagaagggaacttggccaaagattgtgacttgactactgaagcttaagttaagtagaacaacacagacttgctgctaatgcagtttctaggaatgcctttcattccttgctctatgctctgtccctagtattaaacttagtagaaaactaaaatgttatttttcaattaagagtgaagttttatttttacatgctactcttattttaaaaaaacatatatagtacgagaaacatgtgagggtgctttttgcaaatcatactatcattatcattaatagtagtagtatttgtatagcagctttctctgaggaactcagcttttcaaacattgttttctcagttacgagcttacagagtagcaacgtttacctgagaaatacttttactcagccaccaagtccaatggtggtgtatttttataaactaatacatattttatggtgtactcttgtatatgtaaaatttcttaatagagattaggcacaaaagtaacccattatgctagttttggtagtaagtacaaaaacctaaatagtcagatatcttcctgtcaggtacatgggtaataaaataaattaaaccctcagccttcctttgattttttttttttgtagctgtcctgatgattttcttattctttattttactcacatgctatgatttactcttggtggaagacattggacatttgaaaagacagaactaaatgttttgcaccctgtgcctgtggaagagggtagagatttcttatgtgtgtgatgataaatgaatctttgagccctttcagtgttggtgcccatggacatagtgtggctttgtctcccgacctgtcctacccagtctctggttcattaaatccaagcttgtgctccctttcctgctgcctcaaaggctgtcttttcttcaacaaaaggaccatagcatcttttaaatcccgaatccttctttcctttagggtaaccacctcaaggccttccttttgctagccagcatcagtggccccattgtggcccttcctctatttaatttcatcttaaactggctgagtaagcagggtgagagagtcatcagctgcttttagtacagaccccggtgtctttgacgtgtgtggttcagttnnnnnnnnnnnnnnnnnnnnnnnnnnnnnnnnntgggcctgctggaaatttgtttctgcccatccagtgaactgcagtggactccaaagcagtggccttgttcccactttggtttatatgggagaaggtggtgtagatcccactttcaacttccactgcacctatcaaatggaagttcaggtgtaaggaggccgtgagccgcagtgggatgttaaagggagatttttctggagacacattccttgaaagtcctaagtggaattttcagatggagcgtatgttgccatacagtagatgtggttatgatgttagggctggcaggtaaagagcagaaggaatcataggctgattttatcttttatttaaataagtctatatttgtgaaaatgaagtgctgttgaaaaatgaaattctgtacaaatgcagtttgcacctgatatgtaaagatctttatgttagttgtcttctgcgtggacgaaggcagtcttcgggtgcttgtgcaaagccactgtgcagagcatcagtcatctgaaatgccagccctcacttcagccacctttatgtagaagtctatgtgacttagcattcagacgttaaataggaaatggagagtgcaaatcaagaaaaaagacacttctttttttttctttaagttagacaacacccttaaacttccatagaatactaattttatgtgtagccctgacttctgtaggaataatataattttgtgggagtttggtttctcctgttggggtggatggtgatattttcttctttgttgtttttaccatttatttaatctgccaaagtctcatctcacctgaggcacctgattgaaatgtgggtgggcagcatggctcatttgttgtgttagccaccctggcagattagagaccgtaatgatgaatctagggagggggttctgactgccagagtcccccttcctacttcataggattgctgtgcatgaataagagcggcatcttaaaatgtggcacagggagtcaaatgtgtgccctatagtttggcacttggaaagatacactatgataaaaggccattgaaaggcctattttttatatagttttgtagtgtctaattggtttaattctttatgttatatctaggaagtggagagtgtgaatcaagaaaaaaggcactttttttaagtaagacaacacccttaaacttccattagaatactaatttttatttgtagccctgacttctataggaacaatataattttgtgggagttaggcttccattataatgccaggtgatgccacatagccaaagtgttaatgtctgtgttaagcttctgtgatcagataacacattagctaactagacttcttttccatgttacttctggcagatctgaatttaatccataaaactcggtaacttgtagattttctttcttttttttttttttttttgagacagactcgctctgttgcccagggtggagggcagtggcacgatctcggctcactgcaacctcaggttcaagcgattctactgcctcagcctccctagtagcttgggtctacaggcatgcaccaccacgccctgctaatttttgtgtttttagtagagttggggtttcaccatgttggccaggttggtctcaaacgcctatcctcaagtgatccgcctaccttggtctcgcaaagtgctgggattacaggtgtgatcactgcacccagccccaggtgacttttttttttttgagacagggtcttgctgtgtcgtgtaggccaaagtgcagtaacacagtctcagctcactgcagcctcagcctcctgggctcaagcagtcctccctcctcccacctcagtctctctttttttttatttttattttttgattctttcagatccagacctacagagacttttttgtattttttatagagatgaggttttgtcgtgttacccaggctggtctcgaactcctggcctcaagcggtccacctgccttggcttcccaaagtgctgggtttacaggcctgagccaatgtacccagctggtgactaattttgaagaacttaaaacatttattaataattcttcattgaacttgaacatttattgtccatcagtaaaacagaattcttccctcttcctttcctgctaacaggtctcctctttctttttcaactagaagagtagggtaaagaatttgtggctggggcttaggagttgagggtggcgaggcacctgcttggagtgaagcatgtgggtgccaggccagacgcctgagaaccaagggtgcctgaggctgctgggtgcaggattgcagacatctgggcagcgcactgagcactagtggggccttcgccaaaagggtactggatatcttggtgtgaagttgttgacctctgggtttattatctgccattcagagtttgatttgtccccttcctcattagtttattctgttgtccgcgttttattacattctagtttagctgttaaattttagtcttagaactttctttaaaatttttattttgtggggttgattttactctatgatgtaccagattttatgctgctttaattggctttttagaacttcatactttatcttttttagtttgcctttttgtcttttaattttctttttcattgtctaaaaaacttaaccaaatagtagacagggcttaaaggaaatgctctgctcttaagttgagaggctagacactctcctctgccagtattgagcccttggcctctaccatctagctgtgtattttagtgtggcagctcagatcattttagagttgtattttgtcacaaacaccctgcatcacattctgtgtggcatcccatgccacaaaaacatctcttttacttcttatccattaggttcatttctttattcagaagtcttttcaggatataaagtgtaagaatatgctttaatacctttcagtctttaaaagattataatgtaacattttggagaagcttgagtctctgaaaacaaacctgattaattctcatgacctaagcctcaaggttaatttttcccaatatggtgagaaacttcactaacttatcccatctgaagagactgattaagaactccttcccattgtccagacattctcattagctgaccatattcccatcacatttgggtccacaatgtggttcttttcaagtttnnnnnnnnnnnnnnnnnnnnnnnnnnnnnnnnnnnnnnnnnnnnnnnnnnnnnnnnnnnnnnnnnnnnnnnnnnnnnnnnnnnnnnnnnnnnnnnnnnnnnnnnnnnnnnnnnnnnnnnnnnnnactaatcaatgtttaactgtgttctcttttgtaataaatcagggcagctacctggctttccagtaaattatggccgtttgtatcaagctttgtttagaaagccaacagaaggaattggttatctatactgaatccatccaaccccatttcaggtaatagcactaggccgtccttacgaacttacagttgtaagctgaacatgactacttgcataaaggtagattgcctagactatctctccatgtgacatatactgctctctgaatataaagtttgtgttcttcaaatgcctgcttctaagagtttgcattaagttggtgtatgccttggtgccattgggggtgattgcagaacttaagaccttggtcacttagctatggaccctgagcacatccagctacccaccagtgtaacccaattctcatcatgaaatgtgaaatgtaagtaaggctggaggaggagcagtggcccttcagacctccagcagcatcctcagaaaatgttctccatctgattacaagggcttgtctaaaatgaggagcagatggctctatatctcattgtcttgcttcatgagtggatggctctgtctctcagtctctagcctcatgagtggttggctccgtgtctctttagcctcacaagtggatggctctacgtctttctagcctcgtgagtggatggctctgtgtctctctagcttctctagcctcaggagggatggcctgctttttggtcattatcagtagtgatgtgagataatggtcacaaaagaggtttgtgagtatggaggcaaggtatgtagatggtattcttttctgttggttttttaaaaaatgctaggtttcactctatttttttgaactttagcccgattttactgagctttataggcgtttcatcaaggttgacgctatgtgggggtttcttatatgagttaatgagaaaaatatttagagtagtgcctggtacatacccagggctatgtatgtttctgctgttgttattgctattacttgtactgttgtaactagaccagttaacaattataagtaacctaccagagtaggctctagaaatgtaaacgtaataagacacagtttcttctctgcttgagcttacatgatagttggagaaagacacacatatagtgctttgattttaatacattgcagtaatgttaccaccaacttttgtgtattttatatatcccttgtatggggtacatcatgtgacatgtgggtggagtgaggagatcatgtctgatctagaccatggtgattagaaaatgcttcttggaatgagtggtgtccgcgcagggtcttgcagatgagtaggttgggataaaagtgtaagtagaagagatacatgtgtgttttggggaatagttctgtatgcctggaagcataagaggcaaaggttctggtacacccatatggagaatctcagacattatatgtagaggtttgaaacagaggaatgccccagtcagatttgccttccagctggttactctggtgacttgagatgagttttcaggtgatgttttggtggcattaccatgatgctgaggtgggaaatacaggagacagagcaggtttaggagaggaatgagggcagacatgatttcttcagtgctggtgccattcagggctggaatttacaggtgttccctgcacatggcctagttattcttccaactcacaggctgccatgtggctgtcggcttgagctaggcccatgagtagccatcactgcagctgttagaggagtcttgtggttctgtatctgcgtcaagcagctcagtggccttatcttcaatattgcaatgttggtttaaggaatgttacttcttaaagacattctcatccccctgacctagaacagtggcccttttcatacattccagcttctgttgtaatttggaagaggaatatatgtctgtgttttgagtttgacattataaaagactagttttgacccttacggatataaatgataactatgcatgtggactctatgtcctttctccaccggtctgatgttgtatagccctgcatgtggggtgtgagggtgatgaggcagtggggagctgttgtgattaatagcctgggcgggaaatgatatgtgtctgaactaaagcagtggtcatgggcatggggaggagtgcactgtgggtctgtttgcttgcttattcttttagctagtgcttaggaatgtcgatgaaggctcttccttctatgtatgttgcttggatgaagtcatcctcagtgaagggggtcctgtctgtaagtctctgcagttgaatcggcccaaatgggtctgagccatgaccagagaatactttccagactcagctgcttgtttttcacatgggtgtggatgttaactatctgtgccattttctcatttaaacctcataataaatcttggaagactgtataaaatattaacgttattttacagatgaggaaactgaggctcagacaaattaagtaacttatccatggtcccagcctataaatgacagttcgaactggaactaaggtttgtcttgactcatatcagtgctcatatccaccattctagattacctttgtttgttaaaagaaaaatcttgacttggatatttttgggcaaagcagttttaatacaacacttagttgaaaaatctcaattagcttattgcagaatagtagcaaaggcaatttaatttacataacttaattttgtccttgatggaaatgttggagggtggacactgaagattttgttgctttttttttgacttcctagggtgttctttgatttgtatattgatggatggaaatgcttagctgtccgttaacaacatgaatagtgaaaggtctgatgagtttagaaatctttccatactcagatctgggataagtgcttcccttatctacaggctttttgtctaaacatttggagagggactgtctgactttcagctatcttggaggttccatacagttcattcttgggaagggcagatggaaaatcattagcacttctctccttcagcaaattgatgtttcctcaaacctgggctctggtcggtttccagatagtaagccttttactcctgtaggaccacgcatgcagggcccggcagccctctaaattaaaccgtgtacatcgctctggtatagagaggtcactgtgaaaagcgcgagctgccaactcactttacctggcagtggttcaactctttgacaggcctacctctgatttaaacaaatttgagaaatatgtaaagttttggaagcagttttgcactgatttgataaaagaaaccacaaaacactgcagcgcaggtgttgagaatgtttgaaagctgattgagggaagcagatggctttagtcagtggcatccagccaaaagagcaggtgctggtcatgtgaccgctggttaccagggtaatctgattgctcttggcgtgcagatgaaaggaaaggggcccagtgttcagctgtagtattgtataatttgtggcagttagagcggaaataaatgctggaaatggaacctcatagtaggggagacttctgtccatgtgtagcgtaaacactaggacagttggatgaggaacggttgtatggatttttttttttaattttaaaaatattatgctttctgtggatctttcggagacagtttttagagcacggccttttttcttttcttttaaataaaaataactttttaaacctaactgccatttgctataatcttgaattgttattttcttatgtagctatttactatgctaaaatgttaacaaaataaaactctgagtattaagaataactagtttaagatgatcaaatattttatttagttgaaaaaatacattttaggtgtgtgatgggtagtttattaacaatacttttgaaatattttacatgacatatgctttattctaaaagcctatagatatcttggcttcttccttttgtagtagctgagggtaaaaacatgctgtttaatgcattctgtcagcacattttcctgagaacttacaaacttcaataaataaaatttttgaaggtttttgaaatacagcttttgtttttcacaatttattggaatttgaggctccctagaaatattttttaaaaaatcattactgaggttggattattttcagtgttggataacaaatagtaattggtgttagaaaatttgcaactgatggccgggcacagtgactcaatgcctgaaatctcagcactttgggaggccgaggcaggtggatcacctgaggtcaggagttcaagaccagcatgaccaacatggtgaaagcccgtctctactaaaaatacaaaattagctgggcatggtggtgcatccctgtaatcccagccacttgagaggctgaggcaggagaatcgcttggacccgggaggcggaggttgcagtgagccaagatcacgccgttgcattctagcctgggcaacaagagtgaaactgtgtctcaaaaaataaaaaaaaaactggagctgatttggaaatagaaatggaaggtagcgctaaatgtacataaagtcaggtaaaggttctagaggtaatggcaaatgtaaaacatttttttcttgaagtttatgtcttttgtcttatataatattcaaattctaataacatttgtcagcaacatactatgaaacatgcactttattagggttgctttactgtatttttatatttcagagaactgtctttcaaaaaaagggctaattgtgattatctcaaaaaacacgtagcaccaaaataaagcttatatttaattaagaacacagtacctactaaaattatgtacaacaggaaattgctatgtatttttattacattctaaaagattataagttgaacaaaaatgtaactggatggtataaaagaggataccttctagtactggtcaaaagaatacttaagtatgtaaaactatccacaaaaggcacaaagagaagatcatgatatcgtttttcatgacaattaaaaaaaagtgttctgtaccttaaaaattcgatagcaaaactacttcttaatctgattttttattatggcttgatatactggcaggcattttgcacaaatgtactatgtgtggtattagtttttgcatgcagtttatttttaattaggtcatatatttgctaaaagtcattaatatggagttttgccaggaaaacttaattgggagttgcatttaactgtaaatagccaatatgtatggatttatcagttgtcattgatacttttgggatattaatgtgggaaatataagagacatgcagaaacacattaaaagtgaacactaagcgatccactttgaattctagtaataagaaacctgactcagaagcaagtgctttgaagaaaaaggtcaacaagggaaaaacagaaggttctgaaaattcagacttagacaaaacacccccaccatctcctcctcctgaagaagatgaggacccaggtgttcaggtaatacaattattgtgattcccgagccttggttatttagcatgggtaactttagccatgtatgaagtacacaagacctcccctnnnnnnnnnnnnnnnnnnnnnnnnnnnnnnnnnnnnnnnnnnnnnnnnnnnnnnnnnnnnnnnnnnnnnnnnnnnnnnnnnnnnnnnnnnnnnnnnnnnnnnnnnnnnnnnnnnnnnnnnnnnnnnnnnnnnnnnnnnnnnnnnnnnnnnnnnnnnnnnnnnnnnnnnnnnnnnnnnnnnnnnnnnnnnnnnnnnnnnnnnnnnnnnnnnnnnnnnnnnnnnnnnnnnnnnnnnnnnnnnnnnnnnnnnnnnnnnnnnnnnnnnnnnnnnnnnnnnnnnnnnnnnnnnnnnnnnnnnnnnnnnnnnnnnnnnnnnnnacctcaaagttgagatatagtcatgtaatctaattcatgtaatactaaagtttctatgaacaagccagtgactttccaaatggcaactctgcagaatattctcccgactttaggagagttttataggaatgagttgaaatgctaaccctgaagtaaacgtgaggaatgtaggttcttgtgtgtaaagcatactaccttcactgattggactgagaaggacccttacaagtgacagttaaaaattatttccttgttaggttccctggaagcatgccagtgtggtccactgggatggctgggaatgtaacttatgtgaatgacatctaagttgtcaaggagcagttactgaagagttgtcctggagtaggaagccagcctctagaagcttactggactttttcttatttagtacacactcaggactttgcacctgtacccccaccagtcagaaacaaaatatttgtagtgtgcagctctgttccaaagaatttcagatatttttggctttggctttttgtttgttagagtagaactccctgatacctataacttcacagaatagccttaagctagacctgaaagggagggagagagagatgaagtgaatgaatatgttttggtttagttcggtttggttgtgtaactaacagtgatacctttggcagtgtgggttattatgtaattttattttatacatcaatggaaagatattgggaaggtaagtagatatcattttttaattgcgtaggctgttttacaactaaagcgttttattgatttttgtttttttactgagatctggtcttactgaatcaagtgttttaatgattttgagttttatttttatccgtaagggtattttctcctgatttatgtttgcttaaagcaggacctttatgtcaatagtatttggacaacattaagaatttgtttacatcagtagaggaaattctgttatgttgttatttcacaaatactgctattgtttttttaaaagtctgtttatattaattcagactcagatggaccttatgaaatactagctttagggtttttttttttctttcctgctgcatttcaaacatagaaaactgctaatcaattcaagtgaacattgatgtatcctttctaattggctagggcctaactgttacgtgttcaatagctaatataagcaaccacacaagatctgactttgaaagctgtgttttcttggtatgtctgacacaggaagtgatgctgactggttgtttattatgtttcttcctgtaacacatgcatgaagggcttagcattaaaattcttgagttttgtgattgatttactaaggtacatgtcatataattttaactaactcaaaattgtgtcacaaggtgctgcaacagtgagatcatggaaacatttaaatgttctatttgttatacctgttttaagtatcttttctaaagcaatccaagtttaaaaagttgatatattattttagtgtcaattcaaaagttttgaattatggtttaaaggcagttcttacatttcattttgactcacaaaaatctttcagataataatagtttaccagatcacaatagaaacatgttatgtattaaataatttaattttacattggggaattgtaaaaggaaccttgatactcaaaataaatgtaagatcaattattattttaaaactagagaagccacgtaacattaaaaatttttatcaaattgagttataattgtattttggggtgtttttacataggaagtgacctcgtatccactgctaactaaccccatcactattgcacagatttatatcacaaagttgatatcaggaggaacttacattttaaaagttatacttaccaactcataaatttctatttaaaaagaagaaagcacactgtcttattgtactggatggaacccttctttaacatcagggtgggatttagcataaagtggatttgtcttagaccctatccagttacttatatggcacaacactgtgacagtggggtcttaagcagggaaacctgatgaaacatggcaggtagatcactaggagcacattgcttcttactggaatggtataaagatggaaatataaatgaatccatttaaattgagttaaattgacatatcaaatgaaatacaacatgttatgctaaattttgcaatattaaaattgttcttgataatggccttttatatcttgaagaaattggtggtccagaagtgaggaatggtaaagtgggcatgagagcaggagtaagtaggtcagctttggaaagaaaagggaagctgtacaaggtaactgggccatttttctttggaaagctggagctgattaatgatgactttagtcctactaattacatctcacattatgtaccatgtactgttctaaaagctttgaatgaattcccttatgcgatcttcatggtattcatatgaggtagttactgtcattaaccccattctacagaccaggagtccaaggtccacaaaattacttgtccaaggtcacatgataagagtcggggcaagttcaaacaagagcacttagctctaggacttacaaggtcaaattgccacctgggatgtgggaaagtattgcagatggcagaatactctgctggaatctctgtttcctccacctgggattgatctgggcagtgccaaagctttgtcctgtagaggagggtcccaggaggaacctctggcccatgtcactactccctccatgtaagccacaaggaagtctcttaataaactttttctagaatggtctcacatcagaaaagtactttgcacctctgtggccacagctgtgtgtggcttggagctaacaatatctaactatctatttgatggtcatattataccgagtttgtatcgtgaactgtctcaaatccctttttaagagcagggagaacataaacttaagattaaaatcaatcagtcccactctttggggaaaagtactgggattgtgttcatcctgacttgagaaatggtagtgcctgtcttgccttaggtgcacacaatgaatgttttgcctctctctgccttactttctcaactttaacattcttgagactctttaaaaagtgttatttcataattcttagaaaaaattttgtgtcaaaattttcctcaatatttttatttcttctttgtgctttgcaaactcattccataggttgtaatattcttgaattcattagcagcttaaaactttacatgtgtcattttcaaatttagatttgacatacatatatgaataaaaaggttatttctccttattaattagcttccaaaatgaattctttgacaaaacagttaaataatatagaattattctgaacagagttcagaacctcttgttctgttccatttgcttctctccccatctttatagctattaataatctgttgtctgtcttttcacattccttatttaaagccatgtacatatacattcatcttttagcaaatactcattgaggcatagagaagtaaacaagatatacagtctttttgtcttaagaagttaatatatcgatgaactgcacgtctaaatagatacacaacattttttatttatcttaaatagaatcttaagctacttcttgttatgtggcttgtttttcttcttattttacaattagtcttgcagatattcccaaacttcctggaagtgaaagtagtgagtcaaaggtctgcatgtttaagttttgatagataggaccacattgtcctgcaaggactgtgtgggttgcattttgaccacaggattgtgagaatacccagtttgccagtgatcctgctaatactggctattaccaatctttttaattttaaccactatggtaaaaacattatattttaaaaagtaaaattactgtccatagtcattcattatgaattttgccatttaacccttcatctcttcagaaattttcagagtatttcttttaggatcaagattaaaatacaaaaaccttttatttaaaatggcctgaaatatctggggcaccttggttagtattataacaatatttgtatagaactttgtaatttacagattattttctaaagcactgattttttttggactttttatatgggaaaaatgttaaaatgtacaaaggtagagagagtagtataatgaacccctatagattcattagccagctccagtattgctgccacttttgatggacatactgactgactgaggaaccagatttgttatttccattttcccagttgaaggacatgtagctgggagtggcagggctacagctgtcccaggcatctgactccagatttccacccatttctattgtatttgttagcactgtgatcttttcacatcatatataggattagcattatcaccttttccttaagattaatttaaaaaaattcatccttccactctgcgccattataaagaacatttttctttttttttttttaagacgcagtcttgctctgtcgtccagactgcagtgcagtggcgaaatctcggctcactgcaagctccacctcgtgggttcgcgccattctcctgcctcagcctcccaagtagctgggactacaggcacccgccaccacgcccggctaattttttttgtatttttagtagagacggtgtttcaccatgttagccaggatggtctcgatctcctgaccttgtgatccgcccgcctcggcctcccaaagtgctgggattacaggcgtgagccactgcgctcggccacatttttctttttaatcattaatttcaaggccactgtcttgggtttttgttttagaagagacggtccagcagacaggtgaagagaaagcgctacactgaagacctggagttcaagatttctgatgaggaggcagatgatgcagatgctgctgggagggattccccctccaacacctcccagtcagaacagcaggttagtaccagatctgtgggatttatggatgcattttaaagatggacttggactagaaatttcattgctgcaatctgagaagtgcagtggaagcattggactttcagcaggggaacatccacctaatgttggataatgtgctatgggaaattcgttgtttagcaatatcttttaaaaagccctgttcactgcaatttatttttatataagactgtgatatgtaatttgacacaattttggagaattaatgttctatgctgaggaagagtcagagttggaatataaggaggctgaatatacctctgagaattcagtgctgtggcttctgggactttaataaaccactcaagcttgtctcctgctgttaggcactgtgagaacccctttatgaaattactgccttgtagtacccagcagggtgtactttattctctgtgcaatgtaaatgatggataaaacagtttgtataaaatatgggtagtgtaggattgattattgtaaagatcttttctaaaaaaataatgcttttttcttattgaaaagtatattaaatgcatctttgcattttatttggtaatttgttctatgttaagttgttacataatgttttatgtgacctccatagataaaagatgcctactatagcagaatgatgagtatatttaccccatgggtatagatgaagaaaagttatatttttgactgctaacgtgcagagattattttgtcttggtggctagaatttctgattgctctctagctttagggacctaggctggtccacgtaattaaaccatataatcatgaagtaatattaagcacagatctcctttttgcctttcagtagagtgagatttttgttcctttcaatcgtgtttctcactgataactttgtacccagtgacttaaaaggtgtggaggtggtagcaaaggggaatgatttcttgctcttatagcttaggatgagatgttttctatttggattgatgcacatgcctttttttttaggaatctgttgatgcagaaggcccagtggtagaaaaaattatgagcagtcgttcagtaaaaaagcaggtgagtgccattggagccattaaaatctgtgaggtgtatgtgactcttacaggattgttggctttgtaattttcttttaaaattctaatattgtaaaataaaacttccagtaatatttctaatcctgtctaatttattaacccaatatgaatctttgggatatttgaccccagatgaaattaaaatatatcaagcagtcagtgctttattacaccattcagagtggactagaaactcacaagtctccaaataaatgtatgggactttcagagttgtagactgcctttttcataaatattattcataaaaatcaaaacatgaatttacttctaatctctctcaggaaggttcccccctctttcatgttaggatggaaattctgtttgtcattttagcaagtaggtgttttctcatgtgttttgtaacattttctcatatacaattgaattattcattagtgtctttcttgccagtgcaaaggtgaaatacaggtctattttcagtgtaattttaagaaatagttttgacttaatacttcagagttattcaaagtttctgttcatctgcaaaggtgagctctaagtatctgtcactagcctgctagctttgtcactgaggtactcatatgctctttaacaaaaaaatgccagtgacataccgtgttttcttttcctgatgaaaattccctgttttagctaactcccttcttacagcccactttgagaaaatgctttgcttagtttgaataattacataaacctgcaggtgcattaggtattacaacatgcagtttttcgtgtctctaggaagtagtctcctttagacataggtgtctgtgtcgcagcttcagtcattatcaattccacacagttcttttgtttttatttgctttcaagaaggatggaactacaagttcatgtttcagcatgtaaaacaaactttaaaaaataatatataataaagacatggtctagctgcgaactcctgggctcaaacatttctcctgccttgggctcccaaactgctgggattacaggtgtgagccatcctgcctaaagttgtttatttttagcaaaatgtatacaaagtatctcccagtaagagagttgaggaatggaggatttacaggactcagtgagagtcctataataaagtgagatcccaggcttatcaaataggaaaccattactattcaaatactgctattgagtgatccttgaacatgttattgcaccagcagtaaacttctctttactttcatttcattagtttgttttgctattgtgtgattcaaggtatgaatttttatcggaatatacatctctagtttataagaaaataatttagagcagtatgtcaaggtgttttccagttgagtataggggatacggggtatggagtgactggccatcttggtgactctttgaatgtgaagatttcctgatgaattaaatttcccacctgctcaagtaggaaacaagcactatttaactcattagaaggttgcatttttgtcctactaatgactctagaactgctaatttatgaattgtagatatacagtaaaatttaaatacttgacatgctttgaagaacaatccccttcactgaattgaagtgacttgtttgagtaaatagcatgtcgtttagatgggatatattaattttcattcaattggtagtgcttcagcaggcatactcagcaggtttaggggttgcaaattataattagctctattattcagagctatttagactatatattatgtagaacattgctttttctttctgttttgcccactttagggtttttgtcttcttttcctctttagctaccttttaaaaataggtacccatggtttaggaatagatactgttaaccatttaccgatgactgggtttgtcttatcataggagattaaaaatcactgtacaggagggtggacatttgttgagttgatgaatttgaagctggagaaaattaatggaaaaaattcttctggaagggagatatgctttgaggtatgatttaaaataaagaagagatgtggagctcatggaattgcttgtcagttactggtatttcttaaagggcaataaaaaaatccattagaaggtactaaacattaacaggtgctaactttttaaactgctaatattctcaaagtagatactttagttatcacctttaataacattggaagaaagtgttgcaaatagaaacaaaaggaaatttgagattttttgtggattcaatctatgcctgctggtctgtttcttattaccatgaataatttaataattggcagtgagaaggtgtctttatctctgccaggcagcactgtagaaactggctatgagctctcagagcctgtccctgcatggtgttgacccagagtggagactccatgtttttcaaagtcagttgacctcatcactgtggcctgagaagcatcatgatccattatgatggagttgtgcaaacataaaactcacctggcagaggcaccgtaagtcagcacctcatgttaaataggggtggctcaagcatttatgttgttctaaacccaggttaatgtctgtgatacctagttgcatgaaatagttggtgcctatttgaattttgaggtagatatatgagtagatacttggattgtataaagcctaattattttgttttccttgtttagtcagcttgtagctgtttctgctttgagccattcatctttggaggataattcaaatccttttttttttgtatcagaaggccaaaagtagttttaaaagtgaattgtgactgtattccctaaaattctttatttttctttaagttaactacaggacgtattttcagagtgtgtgttttaagtatgtagctgagcctcctagagtgtaaagaaggcaaaactcttaatctcatccattgtcatgtccttattttttccctaagtgaactgtgatttggtgtctctagtaaagtatacagtagatagggccaaaagtgaaaagggattcatacccacgccttattgataactttattgaggtgctttttcattcttttgtgtattatttgacagagtgttctgtttttttgctctgtattttagtttcttgactgtgactacttaatttagtagtaggatgcataggaaaggcctaagttaggcctagactctgggtggctatttagaatccaggtggctggagaactcatttattgccttctcaaagtttctggtttgtttgaacagtgggacaagtatggcttaatatgtttgaaactttaagtgtcatatgaataataaggatttccctagactaattttggatctaatgaaaagatatatacatttctcagaaaaattctatttaattcataatattactgggttctcaaatttaaaggtagctgctcaagaaataaatctgagtgttgtgtgtatgtatgggaatagttctttgacttagttattcattgcctatgcctgttgtagaatggcttctgaaaatagggcttagaggtgagaggttttagggtaggggctgtttgaagctgtcaacagaggctggtcaaactgcctcccatttagtaaataattgaaatgatgtttctgagggcttatgaattcacacacttttgttcaattgttttactgttcagtaaaagaaaagaggtcagcatgatcatatttatatgaaaggaacggtgaaaaacagctctatttatagttttaggggcaagaaggtggtgatccaatatgtgtggtccattaaacagaaccaagtgttgtattctgaaacatccaaaagataacaggccctgggacacttctgtaccagctccaggtgctgctaaatgaagtttcagaacctggttggttcctcctaggcagccctagactctcttgtcaggcatcttcacagcaggttcccagaggaatagctgatcatgacaagaaaatgggtagtaatgagagttggggacagatggctgtaagagtcagagctttctgggaacagacttgagacaaaataaaaagtgtctttactgttcaagatttgatcctgtatgtgttggtgcccacttagaattatgggatgatgagaccatttagaatgagaagaaaagggacagtatgggagaaaagatcagacagaagaatcaggagaaataatacgagcatagacatgataaatcttgtttatgatttataacatatatatcagttatataaatgatacatttgatacatttgaaggcattgaaaatgccttcaaaattgaaaaaatataattattatcagaagggcaaaagctcagacatttgagttccattcttgatttgaatttcatgataatgctgtgtgaagaatcaaaggatctagtttcatccttgcttctctttttccctgatcatctaccatctttttgtctttctgctggaagtctggttctatataaagataatatatcttaaaatgggaggctgggcgcagtggttcaagcctgtaatcccagtactttgggaagccgaggtgggcagatgatgaggtcaggagatcgagaccatcctgtctaacacggtgaaaccccgtctctactaaaaatacaaaaaaaattagccgggcatggtggcggggcctgtagtcccagctactcaggaggctgagacaggagaatggcatgaacctgcgaggcagagcttgcagtgagccgagattgcgccactgcactccagcctggatgacagagcaagactccgtctcaaaaaaaaagggagtagaatggggaaatattaaggctagagagaaaaaggtagggtgggtcttggatggatggccacttgaacttggtagtatttatttataaattaattccatgttccatttatgttgctggttcttgaagccatccaacaaacatttctttttattttggataactaaaagtttatgacatagaaggtgttctgatacattggtttaaaatagtgctttatagttattacgtttcatagatccattatggcacaaccagatattaatagatattgaccactcctgcatatccagactccttcttgatgatttctagacaggccaaaactgtttaaaatataggtttagctcggtgtggtggctcatgcctgtaatcccatcactttgggaggctgagacggggggattgcttgagcctaagagtttgagaccagcctgggcaacatggtgtaaaacccagcctacggaaaatacagaattagctgagcatggtgatgtgtgcccgtagtcccagctacttggggaggtggtagggaggggcaggggttgctgaggcaggaggattgcttgagcctgggaggttgaggttgcagtgagccatgtttgcaccactccactcaagcctgggtgacaaagcaaatcctatctcagaaaagaaagaaaaaaaattaggtttaactgttataagtgagagtttcaaagaaaagtttaagttcacaatctttgaaaatggtttgaaggttggagattgaggggactagtacctttgaacagatctgtgccagtctgttatccagtagaagcctttgcttttttgtttgttctttgccatgttcctacttgccttgattttcttcgaagcatttcggaggtggctgaacagccatacatgaccctcaaggcaggcttggggtctcttgtaagagtgtaaaagcaatccccaaacatctgtaagtggtgtttatattttagatccctgatttatctgatcaaatgttccagaaggaaattacatattatgacttgtttaagagcctaaaaccaaaaggggaataaaaagagatgcctaaaataccatctgaacatcatcttctgcatacactacagcagataggattaagggagacattatagataatcttactactgaaaactcttgatttggctgacatgtatcacaattttaaccttacctaaatgtagtatttggagtgttaattttatttggctgctatgtgtgtgagacatcttgtctgagagattttaattgtaccattgagtgaaactaagactatgaatagtgatgcactgaaattacagcataagaacaaggtttacttttatatggtttcttgtttagagttattaagtatatggagaaataaatgtcttttaaatattttaaaacattacaaaacccacaatgtaaagttgccatgaggcagccaaaaataatacatatggcattcaggagagcagttgctaattggctgctgcctgagaaaatggtacacttggcgtctacttaacactgtgggtttggcagaaggccaaatttggggtcaggttgttgtgaatgaagctgcatgtggttagggaggagttaaagtgattcatgtcttagaagctctcgcacgttgagcagaggtgcgtgcatgggcctgagcgtggcagtcttcgtggccctggccacctcccagcacacggtgtgctcatcttacgtgaaggtcctttgctgctcttttcagtcctattttgtgctcatatgggagtaaatcattacttttaaaatattctagtagatggttttaaatacatgcctgaaattttcttttgttgcagaaggaatctggagaggaggtagaaattgaggaattctatgtgaaatacaaaaacttgtaagtaaattgtgattctgtttttaatggggggctatattttccaagtagtaaacgaccatttttttttaaagttgggaaattaagaaactttggtatgatttctttagtcatcatggcctgggaggccattttttaaccaacttttgtatgtttgatattttatgaatttttctggaaaatgtgtaattggtgtaaaagttgactaacttctgtgtataaccaataagtatttttttagagaggataaaaacttctacaataatagaaaaatgaataaagcagtatttccctgtcctctgatcatgaattctaccctgtggggctacacttcgtcccttcacctgtgcatagtgtgcgaggccctagagacaagaactctcctgtggaatgaaagctctagagaaccatgacatcactcaggttctaaaatgcagtgagctatagctttatctgtttttgtttgtttctgatatttatttagtagatttgaattcataacttaaaaatctgaattgaaaaacacggtgagttgttgtccttgtagattctgttgtaagcagtacacctggcccagacagatattgtgatgagctaggatgttttcagagtcagtaatcattctgctgaagaagactgaggccattttgtaacctaaataacaatcatagaacaaggacaaaaatgttcattgataatgtaaacattaaatttcttttttaccccttttaaggcaaagaactaaaccaccatattaatacattcttagggctttaaagagaggcttttgtgagttgctgtgcgaacagcctcagaaaatttaccccaccctagaaaatgaaagcatcaggtgccatgggttttctgtcattctctcttgttgtagttggcactgttaataaattgatgcacttctgaagaagttgtgagtaaaaccttttatcaagtaaaaagataaagaagtctctatcagttttatcatgagagttcaatgaaatacagtctgacaattttaaaaatgctcggaaaatgttaactgtcatcattcttttgtcctcagagcatgtcagtttacacatgtggaaattatgcctacaacacgatttcctatggtaaggaggaggtaaactaagtaaaccagagggagagagttcccttgtagatttaccaaattgaaacaagagcaaaggagttcaaatatcaatcaccaaaataatggcactaccagagagacctccagatcagtgtgtgacagtgaggcctgagctgcctccttccagtcagcctgttagtgaccccagagatgggctccgagttcctgaccaggtgccagtgccagaccaggagactctagccctcctcaaaagtcatttgaggtgaggtaaagggagttttgaaaaaaaaaaaaaaaaaagaaaaaaaaggttttctgactgtcattattgagagctaagagaaattaagatttccataaaactaagagtttttgttagccttatatttggatacaatttcacatttatagaaaaattgtaaaaaatagtacaaagaatttctgtttttctttttgtagttaatgtgtatcttccggaaagatactttaagacttaaatatggttgtggttgctaaggggtgatttactaattccatcatttcttctacattgattggttgggtttttaccgtaaggaagagctttaccctcttgtctgtttgttaatttatagctgagcggacttgtggcttctcattttattcaagggattataactctttactgttgtagtatttactttgcccacattatcccagatttggtcagtgggagccccttcagactggctcttctgtctttttgccttgtccccatttttctttgaacattttcttgctttctggcaccagaggatgttccaggctcatctcgtaacttccctgttttagttatggagtcagttacttctccaagaaggcttggttgttttcagtgaaggggggggcattgagaaaccaagattggggctttaggtgtgctcctcgttgctgaggaattgttgcttctagtccctctcagtggataggactgggagagagagagagtgtgtgtgtgtgtgtgtgtgtgtgtgtgtatcgagttacacacacacttatctgtttattatatacacacacatatttacctacctctccaacacaacagcaaaaacaatgtgtatatattgatacttccagtattattccagcagcccagggttcattctctcctttcccctttaatattagtaattcccttcttcaaccagaataaacctggctctcttattttttatgtttgctttttttcagtcctaacatatataggaagtgatttcagagttactagcccatatttctgtgacaaagaagcctatatttggttagctttttgtctttagtttgagggcatagggactaaaactttatccaaaatgtccttgggttggttattctcttttcctaccccaccagtgtggtttgttatttatttcaggggtccccagtccccaggccatggatcagtactggtcagtgtcctgttaggaacctggccgcacagcaggaggtgagcggcaggcgactgagcattaccacctgagctctgcctcttgtcagatcagcgtaacattagtttctcataggaacgtgaactctggttgtgaactgtgcatgcgaaggatctaggttttgtgctccttatgagaatctaactaatgcctgatctgaggtgcaaccgtttcattccaaactgccctccaccaaggacccgccccagtccgtggaaaaattgtcttccacgaaactggtccttggtgccaaaaaggttggggcctcatgatttatttgatacacagtatgtttctttagttttggtttgtatttgtattcccttttagcccccgcttgttgatttttattgtttttcaagtttgtgaaatattaatatgttacaaaagtcagaactatacacaaaagaagtgtagtcctccctttccaccccattcctgcttacttccttactaatcccaggtttatcctttctgtaatttttggcatgagcatgcaggtataatttcctcttcgttcttacaaaaaaagaaattggtatactgttagtacatttttgtgctttgctttttttcacactacatcctggaaatcactctacatctgttcataggggtcctcctcattctttgtttcagctgtataatattccattgcatgactgccgtaaccattcaaccagcctcctgtgtatgtgggtgtgtaagtggcttctgatgttttccaattacggataatgctacaatatatattctcatacatatctatatattttcaaattattggaggcatggcttccaggtgaattcccggaagtgagtttactagatacaaaaggcaaacatgtatgtatttttaagagatattgccaaattcccttccttcatgttgtatgaatttatgttcctgtcaacaaagtatgcaaacacctgtttccccacaacctttctaatatagtgtgctgttttactttttaatttttgtaagaaattgtatttcagttgaggttttaattagcattttctcttattgtgaataagaacaccttttcataagattaatggccactttttacatcttgctttgtcagttgtctgtgtcttttgctcattttctgtcatgctcaacttttaagagctctttatatataagggatattagttctttatcttgggttatatgttgcaactatcttatctcagtttcgattgtcttttgacttcatggtgtttattgcattgcccattaaaattttttgtacggtcagatttatcaattttttcttttattgtttctagctttagtgtcatagctagaaagcctttccctatatccagattacagaggaatttgtccatgctttccttgtggtttcattttatctatttaggtgcctgatccatttggtgtttattcttgtgtattgtgtaagtcatggctctaatttaattctttttcaattgttgttctagcaccattattaaagagtcaatttttggccaggcacagtggctcatgcctgtaatcccagcactttgggaggctgaggcaggctgatcacgaggtcaggagcttgagaccagcctggccaacatagtgaaaccccatctctactaaaaatacaaaaaattagctgagcatggtggcgggtgcctgtaatcccagctactcgggaggctgaggcaggagaatcgcttgaacccgggaggcagaggtggcagtgagccgagattgcgccattgcactccagctgggcgacagtgtgagactacatctcaaaaaaaaaaaaaaaaagagtccatttttgactcagtgatttgagatccaaactttattttgtcctaaagtttttatttatttattttatttatttttttatttttctttatctgtactttatgcctttgaactgcttgtctatttataagccagtaccacactgcttagggaggctttatagtgtattttaatatctggtagatctatttccctagtagcttttctgttttattgttttccgggatattcttgcatgtttatttttatatataaaatgtaatactgtttagccccatataaatgcctgtttgcattttatttatttacattgtgttaaatttacaaatgtatgatgttgagttacacagtgtgacaatgatgtcttttcagttggtccagttctacttttgtgtcttgtaagagttttaaatattttcttatacaaattgtacacatttttaattaaatttattgctaagtattttatctttgttggtattgtgaaagaggttttctctaacatatccccttattggtaattgttgttgtgaatgaagacaatttgttggcttctgtatgctaattttatattctgctacattgctggattattttattatatgaattagttttctaattgattctctagggttctccaggtacctgatcatataatctgcaaacagagatagctttacttattattttctaattattatgtctcttattgttttgacttgtcagttacattggctaataacctcaaatacaatattgaataacagtggagatagtaggtatccatgctttctgatttttgtggaaaactgtggtgtttcttcatttagtaagatcctgtctttagaaccaaaatcttcaaatatgtgttaacaaaatacctatcaattcctatcttcctaagctttaaaaaatccattatgggtgttaaagtttgtcaaatgtttttgcagtgtcaatagaaataattgtgtgatttttctccttagatatattaatattgtgtatttttagtgaatttcctaatgttgaaccaaccttgcattcctgaaataagtaactacttggtcatgacatattattgtcttaatgtgatgtggagttgtgtttgttaatattttacttatatttacttataactataaatatttataagtattataaatataaatatttactactttgcactgatatgggtaagggatatgctctttcttttttaactgtcaagattaggtataaatatatacctgtttcataaagagtagttacatttttaaatgaaattttgttttccaaagtgaccatacactgtattatctgtagggcctagttcagattatttcttattagcttcataatatttttcttacattgacttcttcataacttttaaaaaatattttagttctagtccagttaggacgttttcttgccttaattatctattcagacaaagcagtcgtatttttgaccctttattcttccttcctcttcttcctaagcctccagaatgggttatcatcagagtctagaaagcagagtcacactgaaaatttcatcccagtttatagcagataaagcagggctggagccacttgcttatatgcttgtgtccagttcaaggctacacaggtggtgctttgaaggcttttgcacctcagccaaggcaagaatactaactgactgactgcacatgtgcctttttctgtcaaataatttggagaccagagcagattatttttataatatgtgtttctttttgtgtgtgtgtggcagggggaagagggtctccctctgtcacccaggcttgaatgcagtggcgtgatctcagctcactgcaacctccacctctggggttcaagcaattctcccgcctcagcctcctgagtagctgggattacaggcacatgccaccacggcctagctgatttttgtatttttaatagagttgggttttcaccatattggtcaggctggtctcgaactactggcctcaggtgatctgcctgcctcgtataatatgtgtttctgattatgacagtattgcatattatttattggaaatttggaaactacaagttgaaagtagaaaataaaatacttgcagtcctagcacccagaaataataaatacaggttgagtatcccttatctggaatggttgagatcagaagtgttttggattttggattttttcaaattcagaatatttgcattatgctttaatggttaagcatcccaaatctgaaatccaaaatgctccattgagcatttccttcaagttcatgttggtgctcaaaaagtttcgagttttagagcattttgaatttcagattttcagatgtggaacctgtattagcattttgatgcaatttcatctagtctgttttctgtgtgtgtatgtacagcatttatatcagttcatagctatgtaagtcatatgtatttaaaatccttttttccctcaattatagaaggactaaatgagtcctatctttgcaaatcatattagacatgattatcagttatgtgctacttaatatcataagcatttcctatatcatgaatcatttttgaaaaatttttaatggttgtataatttttgtttttactttttcttgttttaaacttctgacttctgtgaactaaagcacaatttctaagagtactagtatgttgattctgaaaggggtatatatattcaagatataatttctttttaatattgtcatcagaaagagaaataagaggctctcaaggctgtttgaggggcagggagagggtgatgggacaaaagaatattgaagaactaagcaaaagaatgtcagagttgccataaaacattaactgtgtacctgtgagtgttggagaagaaaagggaagtgcatatgtattccagttcaggtgagggaagacaccatgcatactcagaggaggggatggggagtcttgaggggagggggtttgcccagtgcaggtatagatgatagcaagggaaacattcacaggggaccaaggaatatcattgcagaaatcctggaggaacacagtctgggagaccaggaactgataagaagctggtgaggggcatggcccagtgttccaggagcagacagtggttctttcctcctagatttttctagaaggaccaggttaggtttccctttgggaccagtatgataggccttgggtgactctagggcaccctacacctcttatctccaaagaaactgctattttaaatttgaattattttaacttgataaaaacctatttctcaatgataagaggttcaaagtataaattcagaattaaggcctccctgtagtgctaattttatattgaagtataatccattcacttatggaaatagcttgttattaggccattctctctcttctctgtctcttttgtctgtctgtctgtctgtctctctctctctctctctctctctctctctctctctgtaacaggtaagagagctggaggcttaggacagaaggcaaattttaggcactaatattgattttctcttcttattctaaacagtggtgggtatattaaatgttgctcagcagccttaatgggtaattaagcaggttattttaattatctgtgtagttgacttttttgaataagacataataaaggattaattatattctacatatttcaaggatattgttttgttctttcagctcttatcttcattgtcagtgggcatctatagaagatctggaaaaagataagagaattcagcaaaaaattaaacgatttaaggcaaagcagggccagaacaagttcctttcagaggtacgacatacctgcttacttttccaaagtatttactttgttaaaatgttctaaatttaaaattttagttccatgaattaagaaaaactagttagtctcatttggtgctgtcaacttgcatattggtaactggttcttgctaacaaatttgtaaacaggaaatttctcattcttcctgttgcttaggctagaagatatgggtccttatgatagtatgtggaaatagcggtgatggtatgataaaaatcgtgtaatgaaagtacagttagcagatgatgaaattaagtaagtggacagaagttctattgagatttagcaggttaagaaatctacaatgttaagtacaagttctaagatacaaaagcttgacttctgttggggaaagtatgtggcaaatttcttttgttgaagtcaatgcctaattacagagagttcactaaactcattttcgcaaatgctgtgctgtagtgtagaaactggtaataatatctttgcctgtgtccctttatcccaggtatcagtatagaagtacagcaatacctagggcagagaagaacatctgcatttactagaagtgccagttctgccctctgcctcctcagtatagtcaattacattttttaaaaagtgctttcacaagctgcttactagggtctctggacttaggatcgccaatttggtttcacttacagcctcaagtagataaaagaaaaaccctaacattgaaagataagacttgctgatttattagttcctcttttcctaaaagagttgacagaatgtagactttatgtaaaagaagcgtacaatttgatgcaaaatagtatctgtttaacaacctactttgtactgccacccctttttggagatgaaggaaagtgggacagaagagcacttagtacttttatgtcataaaattcttatactatcaggtagcaagtctgtgttcttctgggatctgatttccatggtcccaactggcctatggtaaagtccgcattcaatgggagatcatgtggttgttcttttactggacacatgtctgcatcactacccctggcactctgagtgtgcagcatttttggcagtgcagtggttaggaccgagtggaatggagttactcgaatgtgactcaattcatagatcttggagaatattaagaagattcttcagaagaacttggaggaaaattcttttgaagaaagaatcttaatatttgattttgaggacaatgctgtgagattctatttttcatgcccttcttaatgaaaccagagttaaatttttatgacattggatgagctgaaatcattagcctccttttagaaagagacaccctgtgttctgctgaccttttctgtgggccagggggagggagacaggcaaaagcgcaatggtagctttccccccatccctaaatcctggtcctgtttattaagtttatttgtattctctctcctgtagtcacactgtctttaggaaattgtgcctagccctagctacacataccaaggttgaatgtacattatttacctggtaacttggcagctagaaatcttagtttctgtcctgagtgggagttagcagagaaggatagcaatccccttcctccctctcttttatacatgaaagtgcacacgcccccgtttgtttcatcccatacatgatcatggcttcaggtgttccatggctgtactgctttgagattttcagtttcagctgcttttacattctttgtttctccttaggctgccttacaagcctgctgcaactaaaaatgtctattcaaaaacatcatttagactggaaatttcgtcacatgtgtgatgccgcagattactcacttaaagggtagaaatgtgtaggaaaagttaaggattttaattcagcactgactgtgaaagcttatgtttaagaacaagttttcctaaagagagtttttgccatccaaacctagttttgggaaagtttaagtgtttctgctgtacatggataacacgtgtgtttacctaagtctagaagcttttgaaaagccagtgcattaatacactaatactttatattaattgaacatttcaatggatttttttttgccttactaatctacctctgtgtaaaagcctgagatacttgagacatatgtttgtgtttctgctttttgtttcataattcatggttcaaagcttcccaactgggtattttaagagggccgaatagccagggaaagtttgttgttcttgagcagatgatgactgaactgcttatcttttccacctgcaattcaagggataagaatggtgtctaagtgacttctagtttaccttttgcaaaatattttaatgcagttatgttattgataagttaattgagaggtgcacataataaaatgtgtcttttgttttctaacatctgaaacttgtctgaccctaacttcttttgggtatggcttagtctataactctttttttgagacggagtgtcgccctctgtcacctgggctggagtgcagtggtgcgatctcggctcactgcaacctccgcctcccgggttcaggcgattctcctgcctcagcctaccgagtagctgagattacaggcacctgccatcatgcccagcttattttttgtatttttagtagagacggggtttcaccatgttggccaggctggtcttgaactcctgacctcgtgatccgcctgccttggcctcccaaagtgctgagattacaggcgtgagtcactgtgcccagcctataacttttttttgagtcatattctagtgttttatatgagatacctttgcaggcagcagtattactttacttttgtaaagattgtttaatatattggttaaatgagccaattatttaggcttcatttcgttatccttaatacttttgcctaaacacactatattcaatgtaaatcattagaaaacagattaatgatgagactgtgattctaaatgaggtactaatattggttgacaaatactaccaaacattataaactctgatcatgctaaaatatgaaattagctgcttgcagtgtatttggcttttgaataacattttgtagatatgctataaggcatcggacaactccaggagttacaatattccaagtaacactttgcatgactctgattcttcattgcaaactgtagtttcgagaatgctaaatgcatcgcatgccataagccttttggattgctcattagtgaattgtaatttcacacttcatttaaaatattcttaaacattctctcacagtaaaaggtttcacacggtaattaaaagacccagttaacgaagtctgagaagtctgatttcctcatggggagtgcttttgctaaattgtagcatttcaattaatataatagaatttgccaaatgtaagttttatattgctgtgacccaaaatattattgcttggtgaaaagtggaatagtatttcatcttgggaaataagtaaacctttaacttttttttttccctttggtgtagattgaggatgagctttttaatccagattatgtggaggttgaccggataatggactttgcacgtagcacagatgaccggggagaggtaacaggagatcatttgtattacaaagtggtgattcaggcaacccatacatgtttatagagaagatggtagaatcctagacctggtcttggtcagagccttggactgtgacacacttggtctaaatttaactgaaacttaatgatttattattagttttatgacttaataatagtgctaaatatgttttatgtttagtctgagaacttttttaaaaaattgattttcaatatgaaagaaatacattgacattttgcacaattccacaatatgataaagaattcagtacattttggtataaatctgtcatgtagcacaaagtatccttatataattgagtgtctcttgtggcagaatggagtttaaggttatttagaattgggcatcattagtgaagttgatgaattcatttaatgtggtacacagaggctaatagacattatttctcttaaaagatcctagtctcaacactcttattttgctttgcaaaactnnnnnnnnnnnnnnnnnnnnnnnnnnnnnnggatatttgatagggaagtaagaatgaagacaagtgtagtgacttctgaagtattgtgtcttgataatgatgtgcccacccaccatgaattgtgtccttcctggcttctccatgtaaattgaattttatatatacagtgtttggatcttgcttttctagggagggtctgcaaagaactctcattttcttccaaactctgtgtcatgacactctatgatgtttccaagaccatatctgtaacatgatctttacttttctaattttccttagttatacttcaaaaaattgtttcatagcatatttacattgtacaggaaatatttttcacatcacaactaggtcagtgttccttggtcctgaaatgaaggtcaacaaacccaagtgttttctagaggaaagacaaaggaaatcctgttgatctgcattacctgaaatattttgccctccacccttataaagctcaaatatgttattttaatgtgattggacacaaacagtatcactctttttaaggaaaaggtagagatcctaataaatttaagcgtatgtctcattttttaagaaaccagccaattatgtaaacattgaaatatgctaagatgatttaccatgtaagtctgaatcaaactcctgatgaaagatttgtacagataaaaaaaatctcaaattcagctttgctatttgctagctatttctttatactttttggctttcgaacatcacttaccaatgattttgataaaaggctaatttgttctgataatgcccaataatactgtttccagtttagacttgagactcttaactaggaacagctgtttatggccatagtttttaaatttctgtcaattcagacttactcatgctgggataatgtctattgataaatgaagtagagcatgcttttccttaatgtgtatgtaaatatacatgtatatgtatatatgtatatatataagcatgtatatacacctatgtgtatgtataagcatatatacacacatacatatgtataaacatatatatacatatgtatatgtataaacatatatatacacatacatatatatgtataaacatatatatacacacatacatatctatatgtataaacatatatatacacatatatatgtatgtgtatgtatgtggtcaaatgaatccaattctgatttatttaaatctggtccagcctgtgactcactatctggtgaagtggtgttcacttccttatgaagacagcacgtgggagcggaggcaggacatagatcaagcaaagatcgaggagtttgagaaactaatgtccagggagccggaaacagagcgtgtggtaagaattggctgatggtagagaatttaatttgaaaatagcatagtggtgtggtctttgggaaaccactaatgggatttactatatttgaaacaggagcgacctcctgctgatgattggaagaaatcggagagttccagggagtataaaaacaataacaaactcagggaataccagttggagggagtaaactggctacttttcaattggtacaacatgtatgtaaaacaagtttttcttcacttttaaatatatctgtagttcctttcctttagttattgaaaataataaaaaagaacttaatgttttaactctaataagagctttttcaaaaaacaagcattgaaaatatatgtaatatttaataaatattaatacagagattgatataagtgtgtaaaaataatttttattctttgagaattttgtttgaaaatatattttgttgaatctaagagaacatctaaagcctttgggtatgcatttgtgggtacaatggtatatattttgtgaaatgacagcagtgtgtcatatccatactcattaaacttttgtacttcattttcctcctaaaggcgaaactgcattttagcagatgaaatgggtttgggaaaaactatccagtccattacatttctctatgagatatatttgaaaggaatccatggcccttttttagtaattgccccattgtccacaatccccaactgggaaagggaattccgaacctggacagagttgaacgtggttgtgtatcatgggagtcaagctagtcgtcggaccattcagttgtatgaaatgtacttcaaagatccccaggtaaaccttcacaggttgtattctttgtacttactctgtgcattttaaggtgttaaaaaaaaatcaaagtcttggtgacttgggaaggtctaaattttgccaaattgagaaatttgctttagatatctgactcaatttacatttgtattatctttctgtgtctatgaaaacagctcttcatttttatagctttggtttttctgattattagattagaaggaatgaaattttttgccttggatgatcactgaaatccatttaatgctttgatatgttaattagttttattttgcaagcctaagagaaaactaaacaaaaattggtaatattaaatgtgaatagaaagaatattttattatgctattgctagaagtgaaaaatagtaagcatgtaaaaagtccttgaaatatatgacacattgaatgaaacacatcccaagggaggaatttatgctttggctgttagtagcaattgctttaatttttttcttactctagttacctgtatgccattagtgtgtatcaacagtgaagtgttataaatgacatgataaggaagaataatatgtactaaaatagttttatgttatgggtagtaaatggaagtcctgtaaataggatctttgctatatatatgtttttgctatatatagatagatagatagatagatagatagatagatagatagatgtgtgtgtgcatgttctaagtataaaatctgacctacaattaaataactaaaggagaaaaaatattgaaatctgtgtttatctttagatttgggaaattattataaattctgtcctacgtgaatgtgtgactagaatgggtacgcttagtggtaattgatgcatgtgctctgttaggaaattagatccaaaatttactgacagttttctcatttgttttccaattctgttttaccatatcgtttaaaactgccaaaataacttgaaaacagaatgtatgtcacctaaaataaagagatctccaaagggataaatacgtatgttttatgctatttattcatccttaaagttatttatgtaaccattaatgcttaataataattcagagttgttcttatagggtcgagtgataaaggggtcctataagtttcatgccatcatcactacatttgagatgattttgactgattgtcctgagctgcggaatattccatggcgctgtgtagtcattgatgaagcccacaggctgaagaacaggaactgcaagctgttggagggactcaagatgatggacttggtcagtgaccatattggtgattgcactgaacctgaatagaattgttgctgacttgatagtcccgttgctcagaatttgatgcctgtaaacagtatttgaaaagcttgtcaaatattgtgatatattctctggcactttcagttattcaaaagttgttgccttttggattcttacattgttggctagtgtctgttaaacagttgtattatagcagagtgtaatcatgatagtttcactaaagtgagtttcaagtatttgttttaccctttgttcataaatacaggttgatcataccaaatacaaaaatcccagaatccaaaacgttttgagtacccacataatgctaaaaggaaatgctcattggagcattttggattttggattttctcatttgggatgttcaacccgtaagtataaatgcagatattccaaaatctaaaaatatctgaaatctgaaacactctggtcccaagaattttggataagggatacttaacctgtactgccatttcattaactgttgggccaagctttacttcagtgatgatagtccagttatttttcagtgctcataggttttgccatactgtggccagcaggacttgtagatgcaagttctcaatgagttgggtaggatatctggggttggtttagttcgcacagatgcttagaagtttggggcattacagtgcctcagatttgatctggagttttacaccacacttatcccatagtcttccagcttcccaagagatgatcaggtcttcctgattagattttctagatttttttttcagcaggagcatcatggaataacatatcgtaggagtagaaggatttgatttattttctgtctgatactgctgtgtgtgatttcctagtgggaattgcaacatgacctgtcatcctcaggcttcttttcactccatagtttatatagtggttatgatcacttatattttatttttaatgtacatttggaaagcaaagctcctgtcatttagcatgccttggatgatttgatgagtttcacggaagtacaaaaagggtttcaaagtatttttaatgctaatttctgcaggctaatttgatcttttgttaactgagagtttgagatgagaaggagtgttctgtatattcatggccatatgtttttagctgaagactggtattaccaaaaaacacctaaaagctttttgttgcagctgattctctgaaagagcagcttattttattcttaaagagattagaattgccagctatgcttttagtttaaaacaaacaaaatctagttttgcttaaaggaaaaagtctgactgaattatcctatttagggtgggatttcccatttttcttcctaatgaattattattaaagcgatcctaagatctgtctcaaagcagttgactattatttggtggccaatacacaaaacaagtgagagcgcttagaaacagtgaatagtctcagggaccttggtaagcatatggaaaagagaaactctgtgtttgtatttgttcactccaggtgatacttaagcattaaaatgaagtaaacttgtatttgcaggtaaacactaatgcttgtgatataacctaaatatatattctcagtagggatccaccttcatagttttctactaagagacagttatgtcaccatttcctgaaggcttaaacagtcatctgactgaacttatctgagttgtgttctattattagttcatgtgttcccagatagtaaattcttactgtaaaacattatttcattggtgagtacacattaatttaactccatcaagatcaaacaatctgattgtcattgggctatttttttttttaatttaagttctagggtacatatgcagaatgtgcaggtttgttacataggtatacatgtgccatgttggtttgctgcacccatcaacttatcatttacattaggtatttctcctaatgctatccctcccccagccccccacaatctttgggctatttcaaagagttttctattatttatactaacatttgataaatggattagaatctgttatccaaataattttcctattacatattgcagtgttcttaagctttttcacataatggcacgtatagaaaatgatagtagttgaatgccacactcaggtaaaaagagaaggctgcccactgccacgggacaccaccagtcctgggtgtcctgaccttccccaaggacttataacctgtactcatccttgactcaccaactgggaagctctgattagcacatgaacaaaatatttatttttctaatgatgaagaatttttatttgagaagaaatgttttcaagatggaacacattattgttcagaatataattatgtttgtccaattctgaacagctcgttgtctggtctttaaatccttacttaaaataagcatcttgagaacttagccactttctactttttattctttcctagaataagtcacagtcaaaatagtggttagtaactatatccaactacggcacaggccatagggaactgctgttacctgcactagactcagttgcgatgaaaatgcgcttgatggggattatctccaagtgcattcccagaaaggacgaccaatgagtgtcttcagctctgcagacaccaaggaaatgtttgtgaagatgatacattgaggggcagtcaccatcttcacagtcctccacaggagctctgggaaagcaaccatctcgttgtcccccatccacgaggaggggatgctgtggagatcatggtagttcttcattgattctagtatctctttcattgtcaggaaacctaacacaaaagagtctgcttaaaatgaaattaaatggacatcacttcatcagagctaaaaagaatggtaacgttgtcaaggcaaaagcacatctgctagcataggtggaggtgataagctccatcgcctgagtttcttacctgatgttttgtgagactgtgcatagtaatcgtgtattttttaattgttacccactttcaaattgatacctagttttattccactatttgtaggtaactgtatgaaaggattttgtgtataatcatttggtgtaactaattgaagggaagctgcataagaaaggagttcctaatgctagatgacgagttagtgggtgcagcgcaccagcatggcacatgtatacatatgtaactaacctgcacaatgtacacatgtaccctaaaacttaaagtataataaaaaaaaaaaagaaaggagttctttccttttttcgaataagtttattttgaaattaataagttaaaaaggctttaacttttaaaatatttggttaagcagtcaagatttaatttaatgtcgtaataaaggatatgaaaaaactgggagacacgatatcaatacagctcaactactgcagtaactctttcctgaatatgtgatgggacttaaaaaaaaaagttcttgcatacagtaatccaggacttgggtatgtcagcgattgtggcccaggctatccacaagtgtggtgatactttagaaaaaaattgattgattgatccttactgtttatgaatttactgagtctgaagatgatggtcgtccatgaaacttcctcagagactttattcaaagggaagagaaggaggaatacaagcatattgaactccttcacctactttcaaagagcttcattaacagatatgacttggtagatattaagaaaattagcatgttcttacctcattcatctagtatttactgagcgtatactctgcttggcaaccgagacttgtcagattccaaattaagtcagaatattgctttctcaactactgggatgtataattactttctgaaatagttttgttagctgtgctgtgtaccaaatggccaaagtagaaaataatagggttcttaagattaatatctcactattgttaagactggccattgtaaaacagctcttctgtattgcatatatgaaaataggaagacagggtataactgcatgaggaaagctggggaaagagttcgtaaacaggaagaattaattaaagaaatacctaacttggttcaaagagacaaatttataaatagcatctgattaaaaaaaagtgattgtggtatttacaaccaagctgacctctttgctagttggaaatttttgcagaacaaaatagtttttcatatgctgttgcatgtagaacttcttttgtctctatgaagtgagtcatgcaggaagcagatggagagatgagagcactgttgatgtagagagcagaaagaagcatgcatgtttcatctgcgtctagggattctaggaaaaaaacttaactggtggggataaaagcattgagacttgggggacttaaaaagccgtgatactaaaatactgacctataaccccaggaagaaacaaaatggcaagacacatttaaggaccctgtagagttctggagaggactgtccatggatctgtctacctgacacagaaatcgtgttctaatacctctgttttcatgcctgattcctatactttgcatagggtagatgagtaggagtagaacaatgggtgtctagtgagaggctctggttttaagaaagtgtttttgttacaatttggttagtggctttccttgtgttacctcaggaacacaaagtgctgctgacgggaaccccactccagaacactgtggaagaactcttcagcttgcttcatttcttggaaccaagtcgcttcccttcagaaaccacatttatgcaagaatttggtgatctaaaaacagaagagcaggtatttatcagctccactttgtatttcagttataaaattgaagattagcccatgaaatggcaaagtattaagttattttaaagtgtgattatattacagtttttcccacctagtacacagaaccttagataccctttccttggactttccaggtcatcatcataaaggttttcttctttatttgtttgtctttttgctcttgtgaagggctgttgagatttatagagaggttacatacctgttgatgtaattttcagagatagctgtgctgtgcaggttggtagttttgctaggtatgtgtaattttggggatgatgtcagacgccactgacgttggtagacctgtttgcctgctgcagttttgagtctctgttctttgtgaagcatctgtactcagccacaccgcttacttcttcaagcctacatattttcactttagaaacttagggcataaccactgcacagtatttctgtgagaagtaaatgaagcattgtgtataaaaagtgctcgggccaggcgcggtggcttacgcctgtaatcccagcactttgagaggctgaggcaggcggatcacgaggtcaggagtttgagaccagcctggccaatatggtgaaaacccatctctactaaaaaaaatacaaaaattagccgggcgtggtggaacacgcctgtagccccagctactctggacgctgaggcaggagaatcacttgaacccgggaggcagaggttgcagtgagccaagattgcaccactgcactccagcctgggtgacacagtgagacttcatctcaaaaaaaaggaaaagaaaagaaaagtgcttggctattttatatgctgtaagagttatgtgggcattagttataatttgtgtgctgtatttgaaataaataacggagatagacttgaaatcttggtttttacgtgccccctccgctgacttactgtctaaaacctgttagctcagttcagggtaaggtctgttttgtttttcttttctaaaataaaaactgtatggattactcagttctattgccaatcaatagaaaagagaaccagggagagacgtctctgctggctccttagtgcagggactagattgctcctggctcacttcctctcattctttagctctccctagaaaggaagagaatagaaacagagcattgccatgacattgtcttgtccctcttctctatcttccctatggcttaggacaaacagaagggaaagctacatgaatcagttggatttctcctgctgggtacttttcaagccttctggctgttcagggctcctggatgggtgaaatagttcatttgacataaaattatgcaaccttcatgcactgctcttatgaaagctgagagatgagctccttcatactctcactgggctttgaaaaatgaaaatggatgtttaatgaatgagataatcctgatgtttcatgttaaaatatgttttaacttgcaagcaaatcatgacactagtatttacttaaggtccttttttaggtgcaaaaacttcaagctattctaaagccaatgatgttgagacgtctcaaagaggatgtagaaaagaacttggcccccaaagaagaaactattattgaagttgagctaacaaacattcagaagaaatattaccgagccatccttgagaagaatttcacatttctttccaaaggcggtggtcaagctaacgtacctaacctattaaacactatgatggaattgcggaagtgctgcaatcatccgtaccttatcaatggtaaggctgccctgctcgcgaacttgcttaagtgacgattgaagcaccagaaatccctttctgcccccagactggggatttcatggtgtatagtcattcctgtctcctgtccactcagcatgggtttcaccagcttcccactttctgtgatgcctccttctgtggttgctgaaggtgagtgaccattgccccagcaatccctgaagtggaatctcaccttgcctttctcctgacctccctgtgcttgaaaagaggcgttagtgttccagggctagaagtcatctgaagtgctaacagccaaagagaaatgagcccctaatggaggttttcttggggtgtgtgtatttaaatcagagatgttaaagaggaacttaggtgtgagcagacagctatcagctgtctcaagcctttgatagcaaatgtcctcatcttcctctcagtccagagtcatctagcacctctatcctctgagaacaaaaaaattaacttaaagctttgataatttatggccctcctcttttcttaactaaattcatagtgttatgtaactcatggcttaaaacctttattatgtatttttggaaatcattaaggtaataaatatttcatgcttatgttgtataagatactctggagaatgcaaaggtaaataagaagggagcattcgccacaagcagtcttcagttagctgagggattgagattgggggagtctttagaaggagatggtctttttaggcaagtctgcaggggtagaaaggattttgcgaggcagagttagaaaaagaaaagatgtttaggctgaagtaacgatacaagcaaagagagggggtcaggaaaacaatgaggaactttcccaaagtaaaaggcacacataagaaatgcaccttagacatgcttggatcctgctgcagaattccttaaaggctagtgcatggaacctccactctactctgcaggcagtgaagaaccatgactagtgtttgagctgagcattgattagaaatatgattcagggtgatgcgtcaggcaacactgcataaaaaggatgggaggaggaaagacagacaagcagaagaaccagctcagaggctattgtattctgggtagaagttaatgtgggttannnnnnnnnnnnnnnnnnnnnnnnnnnnnnnnnnnnnnnnnnnnnnnnnnnnnnnnnnnnnnnnnnnnnnnnnnnnnnnnnnnnnnnnnnnnnnnnnnnnnnnnnnnnnnnnnnnnnnnnnnnnnnnnnnnnnnnnnnnnnnnnnnnnnnnnnnnnnnnnnnnnnnnnnnnnnnnnnnnnnnnnnnnnnnnnnnnnnnnnnnnnnnnnnncattggtgtgatgcgacgaatcagtgaatttcttttttatatatatatacacagtttttttttcttgagataggttctcactctggcgcccaggctgtagtgcggtggcacgatctcggctcactgcagcctcgacctcccaggctcaagcatccctcccacctcagcctcctgagtagctgggactacaggcatgcgccacaacgcccagctaattttttttgtattttttgtagagacggggtttctccatgttgcccaggctggtatcgaactcctgagctcaagtgatctgcctacctcagcctcccaaagtgctgggattacaggtgtgagccactgcacctggccagtgaatttctttttgtgcttttagttttgtcttctaaagagagtatcatgtgtgatgattatgtatctgatactgccaatctgctaatcacagtatgtttagaagcttgtgcagccgttacggtgagtgttaactagccaggtcttgagttggcgagacagagcttagggcaactgatggagcgagatgaggacacgtgtgtgcatgcactgtgcacatacatgtgtttgcatttaatagctggtacaaaagaaaataaataatagcctccaaggggaaagaaaagaaaaggagatacaaaagggtttgaatgctaccagcaggatgtgtgtgaaaggggagatctcagcaatggtagttagattgacacccccagttccatcaagtttaccctgtttggtcatatgttaattatatgcattgaacattgtgggttgttttcccccaaaacacagctggtgtgtctcttcctttgatgattgctttccagggtcatcctgtatagcatatttgttcgcgaggagcctcttaggactccctaaggcttggcagatgtggcagttgtcctaattggtcacaccttgaggtcagcttttctgtcctgacaagaagtgtctgttaagcaggtgtctttgtccctaaatttggggaagttatagtgaaaaagtgtagataacatacaaactaagcgcacgcagctgcccagataacttacgcagacattgtattgtgtagaggttgctccagggccagtactgttcattctcatccacagtctggagtaaaaacatatatccagcatttaaaaggaaattctttaatttgggagattacattgaaatttgaattggttgtggcagagtaaagaagcctcaatcaacattcaacaaaacacatttccaggattatgaaaaatagaagcaattttatatgtatgagttgaaagcttatgtatgagttattagctcaagctttatttcaatggaatttccaatttttaggttttgcaatgtgaagttaagaataatgttgaaaacatgtccaaggtaccctgctggttagagctgacttaagagttgttgctggttattgtttgaggcaggaggcgtgtagaggaagagtgggcaaaaagaaaacacgaatgaggcttacgtgatggagtgaatttcagagagaaaatagtaactttttttttctggtaatcgtcaagaacaaaatattttcttgtttgttcgtggcttttatatagctagaggacattgcagttactgtcccgacagtgaccatctgttgaagtgaaaagacttcaagctgtaagtgaatgcacacttgtttcaagttgtctttgatatacacactttccagtgtagtgccagccatacattaatttaggacggaaccaacaaagtgttttgggttggcatgacctatttccagttaatttttggattgatgtttacaaattgggtatcaaacattaatttgtaatcttgaaaatttagctgtgatatcacaagggagcagttgctttcctccccaacactcttcccaccctctttccttcaatgttgccacaataaaatgtcaagacaatcatataggaaaggtgtttgctgatactgtttttaaatgaaatattattagtacaaactggctgccagttgtaagaacctgaattcataacagagagctgaattaattaattcagaagtagcttttgtcaggtaagaaagaatgcattttttttctgactattctttttgatagtataaaaaaggcaaaaattatttttttaatctctgaataaatttaaaattaaaattctctgcaaatttgactgaattatttgttaaaaaaatttaactgaaacccaaatatctgatgtttattttgtcgaaatgattatttgctttttgaaaaatattcgttggccattaatttgttttaaatggctaaaatactatattttatattgtggattttaacttagtatggacaaaaaataattaaccaaatgtcataagagtaaaacttattctgaatttcagagcttatgatgtattgtacaacaagaatacacttgaaagatacctaatgtaacgtgcacttaaatctgtttcccctgtctcttgaggggcttgtcctgaatctagaagctgggtttctaaatttcatgttttaaaaaatatttaactttattcaagaacattcttgctagtgcccttaaacagcattttgctctttactcttgcatttattttccatacttaaagaaacattctgaatattagcttttcattcacttggaaaaaggagtgagggccagtctgccttcataagaagtcagtgtattttgtggaaggccttagtgcttgggaagacattaactgactttaatctgttctcagtaaattatttgttgattaataattaataggctgtatttctgcatttgaccatgtcataaggtaatttctacatgcagccttaaagtacagataggattgcacttttgttacatctgtgcttgttgcagcagtaccatgtgagaggctgtggttgtctgtcccactgacccaacctttaaagcctctttgaggtttatgtatccccatcttgtgtatagttagttcacatgttaaaaaccagtggtaggaaggtagttttaagtttctggcacagttaaagtctaggaaacaatcccattaagatgaatgtgtgtgtttgtattttctgaagaatagttgagcacatcctccaccttcagggaaaagagctaaacacaacagctatgtcctgattaaccccagaggcaggaggaggtcagaccaatgctgcgtaattctagttaagccacctaagcagttgaaggaagcttagcctgctgcttcctaaataagcgtgtgtcaggcagggatgtcatgggccatctttccttaggaagatgtcatcttcttgaggcctctttccaatgtacccaagtctttggaccagcaaaaatccatgtgggggaaaagaagggtttaagcatagaagtcttatgtcaaacacttaaaggtttgtttgtttttaattttaaaagatttggatagttcaagatagaatttttgtatcttaggaaaaattaccagatgggaatgaatgtggagggagatttagagattacaatagttgtatgcttaggtcccccacaaatattccaggaaattgtcctggaaataaattcctctttttgtagttcctttgcctatattaatatgcaattatagacccaaactactattgctcttacgctgtaattgttaggactctattcctttgttttttcatttcggaacagattttgttgtttgtgtttatgttcagctagtaaacatttcttcatttctttagcaatttaggttccaaattttctgtaggtatctggcccttggcttgtttctgccacttctggcttgacagtctgttgttgaaattccgtttttacagacagcaaacatttgtttgttgaaaaatgtggttttccccctaaatgcctcaatgtgttgtgcttaaaacttttaccccttttgtacatccacagttttgtatagacccaactatgagtaagtggatggattcttgttcataagcaggagtttggtgttctggttcctacagtttgcaatgggttttgaaagcaagtgcattgtttttagtaataaaaaccttttacagtattcacgttatgctgtccaatctctgcaggtgctgaagagaaaattttggaagagtttaaagaaacacacaatgcagagtctccagattttcagctccaggcaatgatccaggctgctggcaagctagtgctgattgacaagctgctgccaaaactgaaggctggtggccacagggtgcttatcttttcccagatggtgcgctgcttggacatactggaagactacctcattcaaagacggtgaggaccaccatatcagaataataaaaaggaaatctaaaattaccttcacaggggtccaagcagtccacctaaaagtggaatctatgataaaggggctagaatgggggaagtgcatcacatgtcatttttaaaactatagatgtacatgatgattattttatatgatgactacaggaggacactgcatacttttttaggcaattttatttccccattgcctttatttgagtaggggagaatagttcttacttaaaattgaaattatttgttatcttactgttataggtgtcagctgtttttagaatttaactatttccctggagaggaagtaaaataaaatttaatctttggtcattcaatcaattatataaaaaacgccaataaaccctatttgctctgagattagttctgttaagtcatattagtctttttaatatatattccatattgtaataattaaaaattaaaaaaaggagcaagtatgttgtcgctatgcgtcaggcctccttgttcacactgatgttttctaggtacccatatgaaaggatcgacggccgagtaagaggcaacctccgccaggcagctatcgacagattctccaaacctgattctgataggtttgttttcctcctgtgtacaagggcaggaggtttaggcattaacctcactgctgctgatacctgcatcatctttgattcagactggaatccccaaaatgacctccaggtaaatgcacaagaaagtcctgatgcctttaaaaaggaagtcattctgcttactatgacagagagtaccagtcagacccataaattaatgttgcgtcgtcactcaggctgtgtcctatgattcagagcaaataaccaactagtaatctgttgattaataatgtgagaagaaattttttagttttaaccttcttctaaactgcacctctatttattggcacatagatagggtcttagaactggcagatgagtcttgtcattctttggtagccgtcttagctcaggtctccttaacaaaataccataaattgggtggcttaaacaacagacatttatttctcacagttctggaggttggaagtccaaaatcagagtgccagcagagtcaggttcttggtgagggccctcttcctggtttatggacagttatcgtcttgctgtgtcctcacccagcttaaagagagccagctctctcgcctctttatatgagcagtaatcctgttcgtgaggactccaccttcatgacctaattacttccctaaggcgccacctccaaataccatcacattggaatgagggtttcagcatatgaatttggtggggagacagaaacattaggttcattgcagtaactattaatttcatttttcttccaggctcaggctagatgtcatagaataggacagagcaaatctgtgaaaatctacaggctgattacaagaaattcctatgaaagggaaatgttcgacaaggctagtttgaaactgggcctggataaagctgtgctacagtctatgagtggaagagaaaatgctaccaatggggtaaaaccacccttgcccaaaccatttatttattctggcactttcctttatttaactaatagtaagaaattactcagcctttgattatttttcgacctcaatattttaagtgtattttgtaacactttcctttgttataatttaggtttactctctttgagaaaaatgcagcatttgtttagtctgcaaacctcttaattttaaattattttgagtattttaaatatttctctaaaacaggtacaacagctttccaagaaagaaatagaggatcttctacgaaaaggggcctatggtgcactcatggatgaggaggatgaagggtctaaattctgtgaagaagatattgatcagatcctcctacgtcgaacccacaccattaccattgagtcagaagggaaaggttccacatttgctaaggtgtgaatcgatctaaagaggccaggttttccatagaagcatgacggagttcatgtgaaaagtaccttgtaaaagtgcttacaagatgcattgggaattaatcaaattaatcattaactccctgtggaacccctggcacatgaagctttctttatgctttggtttatcttctgtgtacctgccactggtatttgccctcaccttgtcatccttgtatctgcttcccagctcctgaggctaatcgctcacttgtgttcttgactctattgtctccacttctgagatcctgctccgttggcatcttccttctctccccagatcctggtttttgaaacagcctataagaatgatcaagtcactcctttaaaaacacctcttctctattttcttctttagctaaatctccatacataaactcttcagagctaaaatccacacaaacgtaatctactgcagcctctactgtctccctttctacttatttttcagctttttcagcttccagcttgcacctgttccctgcctctctatcagagctgctctggccagggtcaccactgagtacaccagatggttccacctgagagccccttctgaggtttcacctgcattttgttctagccatctcagtgaggcccactctgtacttttatttttaatgactttattgaaatgtaattaactgaccatacaattaacctgtctttcgtgtacaattcaatgcctttaccatattacagacttgagcaaatattgccacaatctaagtttgtaacatttccatataccccagaaaggtcctcatgctcattagcaatcattccccattcctatccataccagtctgccatatctggaaagcatgaatctactttctttttctacagatttgccttctctggacagtggacagttcatataaatggaatcatatgatgtatgatcttttgtgtctgacttcattcacttagtataatgtttttgaggttcatccatgttgtagcatggatcagtagttcactcctttttattgctgaacaatattccattgtatgggtataccacatttacttgttgataatggacatctgggttgtttttactattggctattatgaagaatgttgttatggatatttgtgtacaaggttttgtatggacttgttttcatttctcttgggtatataccaggagtggaattgctgggtcctatgttaacttcatgtttgactctttgaggaactgccagactgttttgtaaagtgactgtactagtttccttccaagtcagatagtaagaagtatagatgaggatatggaggaaatggaactccatatcctccccaatactttttattatctgagtttttagttttagccatcctaatgggtgtgaggtcatatcccactctggtttttatttgcatttctctgatgatattgagcatcttttcatgtgcttattggccagatgtagatcatctttggaaaaaattctattcaagttctttgttcattttttgagtttctttttattaatgtttcagacttaaaatatgttctgtatgaaggttctgtattaatatgattgcagatattttctcctactctcttcttaatagcatataattttaatgaagcccagtttaccaaatttattttatcgcttgtgtttttagtgcattgtcaaacccaagctcacaaagatttatgttttctacagatttgcctactctggacggtgggcagttcatataaatggaatcatatgttatatgatcttttgtgtctggcttcattcagttagcataatgttattcactagtgtaacttagattccaagatttatagtttttaactcttacattttggtctgtgatcccatttggatagagttttgtgtatggtgtgaggtaggggtccaacgttcgttttgcatgtggctatccagttgtcctagccgctccaatctggaaaggctcttctcctgtgggttttgagacccacatcttctcctttacatctttcagccttgtgtcagattattttctcagagctcacaggcactgtgtattcaatatgtgcacagccaaacttatcacccctgtctctcctcctgcccctatctctgtttgtccacctgactgacatcattcagatgcctgagatggatgctgaggtttttctggcttccgcttctttcatatttcacttgtacccagattctgactccattgattttgccttttgttttattttatttttgggatgatatctcactatgttgcccaggccagacttgaacacatggctcaagtgaccttccaccttcagcttcccaataattttaccttttaaagaatatgtttctttttttttttttgacagagtcttgctctgttgcccaggttggagtgtagtggcgcaatctcggctcactgcaacctccgcctcctgggttcaagcaattctcttgcctcagcttcccgagtagctgggattacaggtgtgcaccaccatgcctggctaatttttgcattttttgtagagacagggtttcaccatgttagccaggctggtctcaaactcctgacctcaagccatctacccacctcggcctcccaaagtgctgggattacaggtgtgagccaccatgcctggcctaaagaatatgtttctaaaccaccttcttttctccattttgttatttcttctgtaaattattacagtggcttcttctgctgtgttctgacctccatgctccaagcattggtatgacctttccaacttgtgactctggttatgattgtgtccataatgagattattcctattttcaaatagttcctggttccttcgggatagagttcaaactctgttaactctgttaacatatacagacactgcttgacctggcttctctctccctcaccagctcgacctctggctcttcttccctgactacccttatcccctttactctctgtgccttggcacatgctctgctgtgaacatttccacatgctttcctgttttataaatgttttagaatggttcaggcatcattttatggaagagacttttcttttcggtttccagcaacaccctgcctgaaccaggttaggggcccctcctctgtatatcacttgcactggtctatacacttgctccctatcatttatcactctgcagtgtaattcttggtttggtctcaggccctggtcagtgagctgcctgagggccagtctgtcattctagtcccatctactgtagtgtctggcataagtggaggaatgcacaatatcggagcaaatacataaacaaaagctgctttacattctgcttctgagaaaggcctctcaaagtaatgcgtttcttttttctctttaggccagttttgttgcatctggaaataggacagatatttccttggatgatccaaatttctggcaaaagtgggctaagaaggctgaattggatattgatgccttaaatgggagggtgagtaagaagtcccattcgaacacctatctgatctaaaccaagagccactctttgagaaatgtcaaatgtatctcctcttttattattagaacaacctggttattgatactccaagagtgagaaagcagaccaggctctacagtgcagtgaaggaagatgagctgatggagttctcagacttggaaagtgattctgaagaaaagccctgtgcaaagccacggcgtccccaggataagtcacagggctatgcaaggagtgaatgtttcagggtggagaagaatctgcttgtctatgggtaagtaggactcactacgtaagatagaattttattgtaacagtagttagaattcccaactggtagagaaaaactatatttgtgtttgaatttgtgtgacacccctttgcacagtcaaatgaatgcttctgcagtaactttacagggctttgaagccatttggttaacataatctaagttgttcagatgcttctggttcagaggtcacctgaagttaaggtgcttgtgtataccttaaggaattatgccagatctagagttacatgttgattattaataattaagaacaaagtgtcaaaattatgtaatcttttctcactttacaagctttgcataaaatttatgactgtcgtaagcttttaatatttctcttataaaaaattgtcaaaggcagtaatctcacttgttaaattcttccttgcaactcatatgaaacatgaatggtcatttgaactttgtgaaagtgttgtatttttcctgctggactataagtttctgaaagggaggatccatgtccaatttatctctgaatcactgtgatgcccaaagtggtactttgaatggcagggtgctcagtaaatatctgaattggtcaataagagttctctagcagattgtgggactacaggcaactcctgttaaaaaaaaaactgcagctagagtaacctttctacagatctgatgacgtcctgtcttggatgatttcttccaatgaattaccattagtttcagagtaaacacaaacatatgctgacatggcatccagagctcttctgggaccttgtcttctgttggttctttcccatgggtagtccaagcttctgttaggacagacggcttcatctccttcagtgcgccacgctccatctcatctgtgtctttgcacaagctcttcccactgcctagaggaccccccacttgcacctccgctgggaggtgacctacctcccttctgctctccgtgggtgtccgacgcaggcatcagcttgtgctctgcaactgagtctggcctgcacttcccatcacactcatcatgttgtttacaatttttgagtcgcctccctctttcagtttgcagctccttgaggatggaagctccttcattgtgccctcagtgtgtagtgcagtgtgagcagacacacagtgctgataaatgcttgttcaacagaagtccatcattatctgtgaagctggacatcctctcttgtctcttcttacatggggcagagactcaccccctgcgtcccaaaagcccttccccgcaaaagccctttgctacccatgcctgctgccatgtttcagcacaatcatcagatttgagagttctgtgggtaactttaggaatggaacacatgaataactcctacagctaagaagtgtgcttagcgcagattgtctttcagtcgagcccttccctcttcccatagttgtcactatgtactgaacacctatgtgctgggcactgtctaggatcctctcagtcactaggggtggagctctgagcaagacagtcatggctcaggcaggcaggtgagcaagtagaagtggtgcagactgtgacaatactgtgacagggaagcactctgctgtggagcatagagcctgtcagctcactgttaagacacagctccagtgttgtctccccacttctggggttaggaggaatgaaaggaggaattccacaaaaggtggcatgtacagcttgtgacttggtggatatcacaaatcagccagggtaagagggagtgctggggtttgggtagggaagggaagtgaggtaccggcagatagagcagtgtgttccaaggcctagcagtgagagctagccctgtggttggagaaacttgaagaagttcacaggagccagagaggaccagggagtgacaagagaccaagtgagaggcagggcctgagggaggatgtgcgctgctctctgctccaaacacaactctcagtctgcagcagaggggctgttcataccatgagcactgccttggtggctcagtctgctgtcgcctgggagaagacatggctcacatagcacctgctgctgcctgcccccgtacctatttgttgtgtggtcttactccatagctcccagatgagacagcacagcactgtttagcctgggattataacacaaaacaggcagtcagtccccatggtgtgttgtctgtttgcttctgtcttctgtccatagtcgtttctcccactcatttctcatgaggacctgagggttggcagaatatcttgcctgtgatggttcttatgcttggggttattactccgtttcaaaaggaacctcagagctttccagaacctttcaccagtgactgtggcatccccttagaggtgggttgatgcggccatactgctcagcatcgcatccttgattttggggtagtcacaccttttatcttgagttgccttttgtctcagatggttggtcaacatcaaaatgtactaatcatgacagtgtgaagcaaagtccatgatttccaggccctcggatgcactcatgtcctgaaaattgctgctacagccttcatgtacctggaaaggccagggttagctttgtgggtgttattcttgtggcagttcaactcatgcgcttagaagcagtgaactgaggggcagcttactgtataaaggagtgtttttaactcttgcaccctggatttctttcctatcacccagtgtgaattgttgctagttttgacccaggatttcccaacgctggtacctgacttaaagtaaagccataaatcaaaactcacaggcacctctgcatgctggatatttgctttgcagttggggacggtggacagacattctttcccacggacgctataaacgccaactcactgagcaagatgtagaaaccatctgcagaaccatcctggtgtactgtcttaatcattacaaaggggatgagaatatcaaaagcttcatctgggatctgatcacacccacagcggatggccagactcgagccttggtcaaccattccggtaggtctccaccatgctgtttgtgctacagggtcacaaagccaccaggaacttttgtgacacactgttgataaagagatgtgacataaaccccatatttccctgcctcgtgcattaagctctctgccattgacactataattggaatgtaaaaggcttctattattattatgatggtgattctaggtttgtcagctcctgtgccaaggggaaggaagggaaagaaggtgaaagcccagagcacacagccggtggtgcaggatgccgactggctggccagctgcaacccagatgccctgttccaggaggacagctacaagaaacacctgaagcatcactgtaacaagtatgttattagagggtggacctggagagcttaattccctttttattctttaaaaaatacatgcagccggcccttcacgtctgcagatgcagaactcgcagatttggagggtcaactgagggacctgagcatctgcggatcttggtgtctgaggggggtcctggaaccatactcccgcggatatggagggacagctctgttattaagacttttaaatggtatagttattgcctttgcacagccttatcatttttcttgaaatgtggtgtcaagttgcaggagagcatacctttaggtgactgattattttttaacatggtaagatacacaacacaacgtttaccatttttaccatttataagtgaacaattcattggcattaattacactcacaatgctgtatactcactatctgtacctgaaatgtttccatcttcccaaatataaacactgtatcaattaaacagtaacttgcctggcccctggcaatcaccattctactttctgtttctattagtttgtctattctgtgtatctcctaggggaatcacagattatttgtccttctgtgcctggcttacttctcttaatattttcaaggttcatttgtgttacggtgtcagaatttcattcctgtttatggctgaatagtattccattgtgtgtatatgccacgttttgtttgtcccagtcatctgttgacggacacttgggctagttatcatggctgttgtgaataatggtgctatgaacattgtagaggactggtttttaaccagtatcggttagagaatagtagtcagcattatatgatcccactttcaactaactgcgtacagtggagggaagactggggagttcatgtattattttttgcttaatattacctcagttgctgggtccattttttctgcctgtgagcttggaatcatatttcttacctttatttccaaaaactgattatagataattgaagaatattgaaactaaatttatttcattgcttggggttctgttaacagttcctattaaactaacatctgcatatgttgtttccttattctgaatatgcatttttccgtatcactagttcaggcaacaatgctactgatcagctctatgtcctagcttcgtgtgaccttgagcaagttattcagcctcttgaggactcactttgctggtgagtccagtagacctcggcagcaagatctcaactggataaggcaggatgtaaataagtatgcatttctctttgtaaaagtagcagcaacaaagtctgagcacataatactggcagcatgccaagcgctttgtatggattatctgtttgaattgtctaagattagtatgatttttatccccatttaactgacaagaaaactgagactaaagttgagtaacctcctcaaggaccctcagccagttagggggcagaaccaggtttgaacccgagtagatgagggcagcctcagcttggaagtcttccctgctccttggggctgtggtgaggctctgaggtgtcttcagaaccattacctccaacccttttggtatctcagaaacttggtggttactgctgtggcataagagtgctccctaaaatccgaccccacttacactcttagaaaatatctggtcagtatggtacagtcaatgtttaatctcatgagttaacaagagaaaaaaatctaaagaaatagaaatgagttatccaaagtgagtctcttcagggatttataagctcacacttggcctatccagaacccatgctggccgtgagtaggctcgtggttgggggagggcctgttgaggagcatctgttgatgtgtgattgggagttgtctgttctggtgaatcctagttgttattttgaagttttagggacagtttccataccctgagaacagcatggtgtagtagagcctgaagacctagttccagttgtgccatgtgcaaggtaactctggccttagatttgtcacttatcttctgctaccatcagttttcccatttgaaaacggaaattataacttgccctgcttcatcatagggttatcgtgaagatcaaaagggctagtataagtgtgagacattgattgtaaagtgctgtacaagtacatgatgggattattcagctggggaaatagcatttgtattaccatgtactcatggccaagaaggctgcgattcacgtatcagtcctgaatgcacaccagggctgtccagcaggggatgctagctttggtagacactggcttttgggacttaccaggtggactttattgaaagaattatgttttcgccattgagaaactccatgcaggactgaaaatctagttcctagaattccaagggttttaaaaaatcgatttcttgagaatgattaagaatgtcagtgaattggacacattttaattttctaatgtttaatttttttttcaagctactacagcttaggttcccaggtacagtaaactagaaggaataaaaatgtctaacatagtatttcatacaggagaagagcaaggacacaccttctaccccaccctgtcgccatcttcctttctcggaagcaaagttgtataatctgaaaaacctgacattccatattgagggtttattgtaaggtagtaaaaccagattttatatctcatttattcctacaacttctgatgtgcttccaaaaatggtattaaggcagcagctgaggaaattttatgagataatgaagcagaacagttactgaaagccatctgctcagttgtttacaaacttgcttcaatacttcagaggcaatggtagggtacgtgtctaaacttcacaagctgcactaggtagaactaaatgaagtgcgcctgggctgggctgagctcgggccctctctgtgcagtgtgagcggttgccaggcaggcctgttggaagccagcagaaagcaccacacagaggtgattatgtgccaccatctgtcacgcttcaagcctaccatacagcatggctaatcagccttggcaggatgatggatgaacagcagcagctgccaaaagccactgttggcaaacagtcctgaagttaagaactttttcccccctctgtcttcctctccagggtcctgctgcgtgtccgcatgctgtactacctaagacaagaagtgataggagaccaggcggataagatcttagagggtgctgactcaaggttagtgcgagctcacatttgttctcaacctcagtgagataatctgggtagccggaaaacatcatggattgtgtttcagaaccttcataaaccactagtaacccatctccttttttgcatcttgaatgcagtatttgtccttcgtgcttggggatgtgatgagaatcaggaaaaggctgtttgcatttatgtttgtagtgtaaagagatgtgaactaaagcactggtgttctgagatgacccttaaaatgggataccatgtgataaagttcatttctggtcatggcagagggctactgactcatgccctttcttttaaccttgctgatacctccccaccatgctcagatgtttatcgtgggagagagggcatgtgagctatgtatcacattcattacttggaattcttttttaatactaatatttcttataaatgttgtctttcagtgaagccgatgtgtggatccctgaacctttccatgctgaagttcctgcagattggtgggataaggaagcagacaaatccctcttaattggagtgttcaaacatggtaagtgacgtttctgtttgaatacatctcaactgtatggcttggtctttatttagaactctttacatactcttttccaaagtcataatattaatgaggatagttccaaaggactcttggcgtctaccatttttctgtactaaaaatctaatatgaactgtaaatatcagatgctgtttttgaatgtttgttgagcatttgagaagaaaacatttctttcttggctgtaaataaaacccaaaccatatttgttttaataatagccaagttgtactatagctctccctaaactttgcttccagcgcggcttcccttgctaactctgccaaccagtgtcaaagtggacggtgggcttaacctctgctattaatctgtacaagtgcctcctgggctttgttccaagcaatatttcacaaatgtcagtgctgagaactcgcggctcccctgagtgggatgcagccttgttaactttgaaaggctggggatgcagaactggcatgatatatacagtgagcgattcctgattataatcccaattctctggaggtcgcggaggtattctcagcagcccagcctgactaaaggggagaatgatggcttataaaacctttcatgattacagtttggcttgcggctctacagcagttaggagcggtgtgttgtagtacacatcctaattgaattgtgctgttctgcctatgtactgcagccacattttgtgagctcagcctcaaaatcattttcccgcagtgcactgttgggatctgccattttccatctagtcaacttgggcagtcaaaaagcaaattgcagtttgaaaaccatagagggaaccgtgtcatcttactgacatgcatcatcctaaacctaataagacaggttcgctggccttatgtatatggggatttttcagccagccatgcgagttcctgcaggactgatgctattcacagagtggatgggggtggactcagtgcacccctgcagaggtcataaaggaacattgcgaatccttctaaatgtcaagcaaaattagatctggggaaaaatagggtcagaaatcctcccaggcatcttgcagttattctgaacctgtttttctattagtgtttgtggtaattctgataatatccctgaagtgtaacttggctcccagtagcttccctagaaggagcgttccatagaatgatctactaaaacaaggtccacttggattcaacagagatgctaaccttgactgaaaaacaaacttgtgttgtggcagtgctgtgattttgccagtgatggggcctttctttgtttctgtgtgttttctgtgcacggatgggcacggcacaggctatgagaagtacaactccatgcgagctgaccccgcgctgtgctttctggaacgagtcggtatgcctgatgccaaggccatagctgccgagcaaagaggaacagacatgctagcagatggtggtgacgggtaagaaggacattttaaaatttgaataaactttatgtcagtttcacatctattggcagggttcagttcttaccctgcagtacacactgtattgtgtctgatttgaagttcaggagatgtttaccagtctactctatttgtatgtcgtaatgactgtttaaacaatatacattatcttgataatctgaaacttgtttttcttttccaaatgtcatttcccgcaatctccccagaccccctccaccacactgccatggctgcatgttttaaatactgatagagttgcttttgatgtcaaacccataattaaaagtagcactgggcagattattactctttcctacccaccccccttccttcttttgcttatcagtatgattcaaataatttttgtgtttgttttacataggggagaatttgatagagaagatgaagacccagaatataaaccaaccagaacaccgttcaaagatgaaatagatgtatgaacttgagtatattggcttttatagctccattaaaatattatatgcccacataagacttgttaaactttatagataatgaccttttctttaaaagacaaagaaaaatgagaccccaaattaaagtaattctgtttcttgctttgctttcaaggaatttgcaaattctccttcagaggataaggaagaatccatggaaatacatgccacaggtaaggtcccagaaaagcttgtgtagccgagcagacgtgcactgagcagtcattgttcacgtggtagggactgtcctgcttcatgacagcagtgtcttaacaccttatttcttctacactgacctgttttgtgaatcattttaattcttgttaatggctgtgttttcatgacattgaatttcttagataggataactgtttctttgatgataattagctgatttatattttacactaattagtgaaaaattttaagcatctaaactatagctcttgggaatagagcatagagcatttgctaagtattcacctaaaatattttcagtttatttagaatattgaccttttaccgaatataaaatcattacacaacaattatgcagttattttttatactcaagatgattattgcacatacattagaggagagtaccttataagaagtttatgctgtaaagtgtgtttctttatgtaggactaataaataatgttttcatcccctctaaggagttaaaaaagaaataagtgtatatattccaagtgaatgttattacttatttatattttaaaaatgagggcactgagatgccctttcccacactgtcatttgaatcttaatgagtcatcctgttttgttggaatactctgtattgcaagattgcagctacacatttcaaaaatgtttttccacttccccaggcaagcacagtgagagtaatgctgagttaggccaactttactggcctaacacttcaaccctgactacacgtctgcgccggctcattactgcctatcagcgcagctataaaaggcaacagatgaggcaagaggccctaatgaagactgaccggcgcagacggcggcctcgagaggaagtgagagctctggaagcggaaagggaagctattatatctgagaagcggcaaaagtgagtttcttcaaggtttccactcagctcccggtacatgcccctctgccctgctcctgtagacccacaagagacaggactcatatcaaaggtagtgaccaccaaagaaaggctcgctccaacaaagcagtctgtttccccacccccaaataactaccatgtataaagtctggggggaagaagaaaagaaacagtaaatattaagtcttttcctgaagtatgatgcaagctaatataatctttctaacaggtggacaagaagagaagaggctgatttttaccgtgtggtatccacctttggggttatttttgaccctgtgaaacagcaatttgactggaaccaatttagagcctttgccaggcttgacaaaaaatctgatgagagtttggagaaatacttcagttgttttgtggccatgtgtaggcgagtatgtcgaatgcccgtcaagccagatgatggtaggtacatttagcaacaaagttctatacaaaaagacgagtaaagtgaaaaataagaaagtgtacaatgtagaatgcccttgaattctccccaagtaaatatgagcccttctgtgttacagaaccgcccgacctctcctccataattgagccgatcacagaggagcgagcctctcgaactctgtaccgcattgagctgctacggaagatccgcgagcaggttctccatcacccccagctgggagagaggcttaagctctgccagccaagcttggatctgccagagtggtgggagtgtggacggcatgaccgagacttgctggttggtgctgctaaacacggggtcagtcggacggattatcacatcctcaatgaccctgagttatccttcttggatgcacataaaaactttgctcaaaacagaggggcaggtaatacatcttccttgaacccactggcagttggatttgtccagactcctccagtcatctcatctgctcatattcaagatgagagggtactggaacaagccgaaggcaaagtggaggagcctgaaaacccagctgccaaggagaaatgtgagggcaaagaagaggaagaagaaaccgatggcagcgggaaggagagcaagcaggaatgtgaggcagaggccagctctgtgaaaaatgaactgaaaggggttgaggtcggcgcagacactgggtccaaatctatttcagagaaaggttccgaagaggatgaagaggaaaagctggaggatgacgataagtcggaagagtcttcccagcccgaaggtaaggccttaccactggcccctctcctgaccctgcagcagctggttgtgagatgcgttgctttctggcagcacggcacctgctctttttcacgagtacttagtgtacattttcttctgtgaagggataatttcaagttatgcttatatctgtgttttgctctcgcaccttatagcacctaaccatggtattttgaagaacataaactctaagaagggttgcatggacacattagcaatttctggtttaaggatggaagttaacttgtagtgagtgacagtgtattaagaattctatgtgattttaattttgacaaatatgagggaaggtggtcattcactgagtaaatattgttaatcattttgaaacaattggtgcttgttatgttttgattcagaagtaaagagtgggaatagaatctaaaaataaccaattttttaagtcacagtacggttgctgaaactggcccagaataaaaatagagcacgtactgtgctgtagctggaaccttcaacttttgacagaaggtcagcccttttttctgtgtggaagaacatagactcttgagtcaatgacttggttggctatcagcctcttgtaaggtttacttgcacggtgctaggtggctagtgactaacctctctaagcctctgtgtcatcatctgcaagatggaaataacaccatctatgttaaagggctgttgtaagctttagacaacagtgcccaataccattctagccatgtagtaggtactcaataaaatggagctgattagtattcacatttttaatcatgtcctttctaaacttcagtttccctgatactgtggttgtgagtaatgcacattaactcatttctcagcaggagctgtctctagagggaagaattttgatgaagaaagcaatgcttccatgagcactgctagagatgaaacccgagatggattctacatggaggacggagatccttcagtagctcagctccttcatgaaagaacatttgccttctcgttttggcctaaggttggcaggtttttgttgctgttgttttgctgaccaaaaaggattagggtagaggaaatctttctagcttgatttttcaagtaattttaaggtaaacttttgacacagtatatgaagactatagatttttcttatacttttaaagaatgatctgaaaaagcccaaagaaaaaaattgtagaacacttttctaataggatgggaaatgtgatgtgaaagaaagataataagaaatagaagtgtgtatatggattgatctttggctccatgtggcttttaggttacttacccccgttgtctagcataatctatggattatcactgtgttttaaaatttttttgtgaaataaagccttcagatttaagacaactttatagttttggaaacctaccagcttcttgacttggaagagggtgtactgttgacccatttgcttttgacgcattatgagataattccaaatgtagttatctgtaaccaaaagcaaaatggaaattacttttttggctaaatagtataattttataataattccctgtgtaatttaggtctgtttttcagggtgaggaaataatcatcctaatcaccataacagggctgtctggtttaaaacaacacaaaaaatgagcttcagtcagcctaccccccaggctcgtctttcccagtattattgtgtaagaaacaaggtgaaaattttgaccaaagaatgtactgtcaaagacattttgtttcctctctctatccctttagttcccctgttatgctaacctcctttattgagtgtaggagggagtttcccagatcagtcaaaggttatagtagcagacacttttaatctatggaaactcagtctaaagctgtaattagaaatttttaatgtacacgcttcaatgaaatttgaagtgataataggtagggaatgcaaattgacattcattaggtgttcctaggttggtgcccacttcataatgctgaactttattaatagtgacgctaatgatgtcctacttcctgggactgcaatccagcctgtagatctgaagggccagggcggcaagaagctaatgcagggtttccattgtcatctactgacatccaccagcagagctctatggagcttgtacaagagttactttttaaatatgaagatattttgaaggtggtgattatgtagtacatttttctgttttatgtagttcagtgttcgtaattaaaaatagcatgttttctgtgttgaagccacctaggaccttctgccagagcaatgccattataggagattttgtttatttactttcttgtttgatttcttgccttgttttcttttactttttgtcctccagttgacttttaaacattttatgctcttttgcatcttgatggatgtatttatctagtaattttaaccagggctttgttaaaatttcttgtgacttttcttctccctccaggatagagtaatgataaaccgcttagacaacatctgtgaagcagtgttgaaaggcaaatggccagtaaataggcgccagatgtttgatttccaaggcctcatcccaggttacacacccaccacagtggacagccccttgcagaagaggagctttgctgagctctccatggtcggccaagccagcattagtgggagtgaggacatcactacgtctcctcagttgtcaaaggtgaattagaatggcttgtttctgcagcttaaaagggagctctctaagccttaactgagtttgcgagcttatatttcactggccttgcttagaaataagatagctgctgtttcctcagctctgtgcaccagtcatgaatgcttaattccttaagcttcttgttccttatttctaaaagccagcccatatagcagtactgttttggctcactgcaactctgttctgttggaatttttcaataggaagatgccctcaacctctctgtccctcgccagcggaggaggaggaggagaaaaatcgaaattgaggccgaaagagctgccaagaggcgaaatctcatggagatggttgcccagcttcgagagtctcaggtggtctcagaaaatggacaagaaaaagttgtagatttatcaaaggcctcaagagaggcaacaagctctacctcaaatttttcatctctttcttcaaagtttatcttgcctaatgtctcaacaccagtgtctgatgcctttaagactcaaatggaactgctccaagcaggcctttcgcgcacacccacaaggcatctccttaatggctccctagtggatggagagcctcccatgaagaggaggcggggaaggaggaaaaatgtggagggacttgatctgcttttcatgagccacaaacggacgtcattgagtgcagtaagttggggagcttgcctgcatggcgattgcacgtgttgacagctgagggtcctgtgatgctcacgatgctgggctgtgtttctctcagcagcattgtatgaaagccagcttcctccactaaagaaatagttttacaataaacagtcatgattctgatcattgatacagatcacttggcctgaacgaagtgtagcttgaggatgtattcttcccaagttctgatgtgttgattgctctcagaagaacagccaaacctagaaacatgttcttctgaatctagaattgttatctctgaattcttgaggtggaacaagtttcattgatatgttttaggcctggcatttattaaaattagtataaatgtttcattttggacctaagatttgggttaacataaaaagctagtgactgcaaattctcctatctccttaagtagatattttaaaaatttgagctgtgcttttgctagaataggtttgaatagaatgtgtgaaccaatggattttgacttttcctttctcagttcagaggaaataaattaatgcagtataatcaaaatgattttctttcttaatctgcttcaactacatctcacccaaaaatgtggtgcctgactcactgatgaccagaattttatcccaaagagcacaattacatgtgcttttttaaaaaatggtttagcactatatatcttgaacctattgaccagaagccccagtcaccatagtggctggaactccttgtctgtgttgtgaggagtgggtgctccaggaagccttccaggtactgggccatcctggacccttcttcaagcagtgggacacagtttgggaaactgaaatttgagattgagggaagacagttgtctgtttcaacatgtttttacttacaccatccctattattatttgcccattttctatttcttgaactcagagaaagcttaataagatggcaggaaaagacatggttgagttaaagttcagaaatgaaaaataacatccactgaaatttctttgccctctggtggggtctaattaaaacagaagcattcaggtggctaagagtaaattttcaaaattgggccgggcatggtggctcacgcctgtaatcccagcactctgggaggccaaggcaggtggatcacttgaggtcagcagttcaagaccagcctggccaacatggcaaaaccttttctctactacaattataaaaattagcctggtctggtagcacgtgtctgtgatcccagctactcaggatgctgaggcaggagaattgcttgaacccaggaggcggaggttgcagtgaatcgagattgcatcactgcactccagcctgggtgacagagtgagactctgtctcaaaaaaataaagaaaatttttttcaaaattgattaccaatgcagtgatcatcataatggtcatatttgttgatggtatgattgttttcagaatcctgtaaaagtacactttgtaatggactagctgtgacttacatgttttctgtaagtcaaaatgccatttctaggggtatggccctcagacagagttgtagcactagtaaatagccttcctgtttgaaactacttctttgatagattttgttgactgataaattctttctccataaactttaacaaattgggaagtttctgcagctgacacttctttttgtttattatcatgttcaatatttgtaggtttttttgtttttgaaacagggtttgtttttgagacagggtctcactctttcgcccaggctggagcacaatggcgcagtctcggctcagtgcagcctccaacttctgggctcaattgattctcccacctcagcctccctagtagatgggactacaggcgtgcaccaccatacctggctaattgttttgtatttttggtggggacggggtttcaccatgttgcccaggctggtctcaaacttctgggctcaagtaatccacccacctcagcctcctgaagtactgggattacaggcaatcatgttcagtatttggatcacgacacagctttgtctctggatcaggtgttaggaattaataatgcaacacacgtgcttttttcctattgcaagtacacattctattttaaatctgagactgattttattcatttcactattttaagccgttgttaagaatttgttgatatttttctttttctaaagtcccatttagaaagcctgagagaattcctaattgaagttagagaatgtatttttaaaactttttttttttaactgtcacattttgaaatgtagggattcctcatttggtgttgtcgggggtgatgtgcatgcacataaaatacaaggaaagcactgctcgatctgtaaataaaccaagtaggaaaagatgtaaaggccagcagtgttacctggatgaaagaggacagatcctagaatttagtattttgtcagcactctaactgtgctgccatgaaaaagtaagagtgcattcagcaacagtggacaagctggcactattccctgtgccagcactgagagtcaaaaaatacagtcctgacaagtgcttgcactggagaatgcagtgtttaggatggggtagcacataaatcataatgtgtcctggttgttcatgtgtgccacgaccaagggatgtctagggtactttgtgagcccaaaggaagcctgggagtggagggaagaggatatggggagaaacagatgaagaagtttccctatggatggctgtacttcaattaagttttgaagatcatgtagtagttggtcattttaaaagggttggcagagaacatgtgtaagaggagagagcctcttgggtttgaagaactgaggaatttgctgaggaagtgagcttcagcagagatgagcttgcagagaaggcaggatgcaaatcatggagggccttgatgccattcggaagaacttggattttgtcctggaggtaatagggatgcaattattgaaaaaaataggagagtgatgtgacataattttttgaactgggaagggctgcattttagaaaactgactccagcgtagtggtgtggaggttggattgaagataggtgggattagaatcagggagaccatttaggaatattgcaataacctgggtgggaagtgacaaaagcctgggccatggtagagctgtggggaaggagaaatgggtgtctggaggttgaaataactgtagacttcagttagtggtggtctttccaatgttgccacacatgtctgagacaaagtgtcccactaccaacaaaattatattgtgcacagagtgcccataagttacatatagactggcttttagaaattcctttagtataaattatctttaatatcattatccggggatctccaagagagactgagaggccgcctttcatgcatatcagctcagactataccccccatgttgtattcccagtggctggcttaggatttcagagcatggaaccttagtggactataaattttttacctaattactagttctacagtgtgaagaatgatataaaagtttcgtcttcttctttttatttttatttttttgagacgaagtctcactctgttgcctaggctggagtgcagtggcacagtctctgctcactgcaacctctacctcctgatttcaagtgattctcctgccccagcctcccaggtagctgggattacaggcaagtgccaccatgcctggctaatttttgtattttttgtaaagatggggtttcaccatgttggccaggctggtcttgaactcctgacctcaggtgatccgcccacctcggcctcccagagtgctgggattacaggcgtgagccaccgcgcccagcctcattttctgacttttaatagctgttcccaaacaactagacattgtttctagtaactattttctctttttgataaaagatccattctaggatagcgttttcttgaaataggacattgtcagaggctctctcttcgtgtgagaattcataccattgtgaactttctgcaggaggatgctgaggtgaccaaagcttttgaagaagatatagagaccccaccaacaagaaacattccttctcccggacagctggacccagacacacggatccctgttatcaatcttgaagatgggactaggctggtgggggaagatgctcctaaaaataaggatttagttgaatggctgaagctgcaccctacttacactgttgatatgccaagttatgtaccagtgagtattgcagagtttagagttggaaggaatcttgcaggccggtccacttcattcccttacaacatagaaatccctgacagctggtccctctgccttttccttgaatgtttcctggtctcaaacatttcccaggtctttgttgttgaatcttcttcattacagatactagcttcaggtctgtcttactgaaggcagccttacagttatttgaagatgcgcgttatgcatttccttactgtttgcttctcccatcaaactcatgtgacttcttcagttattctttccatggcatcgtttccaggcagtcttagtattggggtaacactgttgaatgcactttctccagtctccagacgaggccccgccatcccagagtgctatgaagccaattacttccagagatttgaccagttagtgcagcccaagattgtattagctgcttttatggcaactaatcctggtgccttatattaaacgttagacagttcatatctccaaatggtttgtcacacgaactgtttgctagctagcaatgcaagtcttttgctttctgtatttatgtgattgattttttaaaacttaaatgtagagttttacattttattttgttgggttcagcctagagttcttgccactcagaaagtacccccaccccctacaagatctgtctgtttgttggttagttctcattacagacagtctcatgttgttgatggggtatcatctctgtgttcattggagccactaactagaaattagtaaaagtactacagaaagcctcctttaaaagtatcatgacttggttaaacatttaaagaaaaactttaagtgaggttattgatagataaaaggaaaagccaattctcacttatgtattccttaatggacgggtaaaataggagttttttctttcaaagagaaaaatatggtttctaatattaataattaaaatgattcttgaaacttccataataattgaagatgatctgacagttctctttggcatttatatagagaagaataagtactaaataccaattttactaaatatgttttttcttttgcagaagaatgcagatgtgctgttttcctcatttcagaaaccgaaacagaaacgacatagatgtcgaaaccctaataaattggatataaacactttgacaggagaagaaagggtgcctgttgtcaataaacgaaatgggaagaaggtaaacgctgggaaagggaattgatcactatgcgatttcttagcccagaaggaagtgttttatcctgccttcttctataggggaaaagaatcctgtctgcccgaatgcgtgtgtgcgtgtatgtgtgtattatagaagggggagggagtagattaacagaaaggggagggaagactgtgtttttaatcatttgtcaaatgcctctacccagatgggtggagctatggcgcctccaatgaaggatctacccaggtggctggaagaaaatcctgaatttgcagttgctccagactggactgatatagttaagcagtctgtaagtacaaactgcatttctatcaagaaaggtagctatacaaaactgttttccttagtctttcttattttctgttggccattaattattcagttgtaacttagcttaaaagaattgacataatacatcattttcatacatcatttcatacatcattaatacatcaatcattaatccaaagtgaattcatttatcagctccaatttaaaaggtttgtatggaaacatacattcacaatcttagaggtagacttctccaggggggattgccccagctaagcctacttaacagctcacctgtggaataggatgtatggtggttgagatcattaagattaactgtgatttctgatttaaaaacaaaacaaaacaaaacaaaacaaaaatacaacagttctgcctaaaagatttgttaccattagctttttaaaaattcgttcatgacatgctggttctttgttttaattatacattaaaaatgtctttcggtgtaacattctgttgatcttaacacacgtgtgagtttgtgaactgacaccgtagtcagaatagggttccatcccccacccccaccaccccgagttccctcacaccgtcctttccccgaccccagcccctggctgccgctgacctgttgtccatccctgtctttttgagaatgtcctgaaatggaagcatgaaggacataagtcttgaagcagtttctttcgctcatcatatggaaggtcatcgatggtcacatgtgtcacagttatctcctttctgttgccaagtagctgtctccattgcatagatgtgacactggacggcttagccctcacacactgaaggacatctgggttatttcctgatttttgaaactatgattagagctgctataagcaattgtgtacaggttttggtgtgaacataagttttcatttttctagggtagatactaaaatataattacattttccatatttcaaaaatacttttacatatatttgaaatatccaaaataacacattatagagggcataaaacatcctgggtttatattatgttatactattttataatttttctcccatacaatatctttttttttcttttttttttttttttttgagacaaggtgtttgtcacccaggctggagtgcagtggtgaaatcacagctcactacagcctcattctcctaggctcaagcaatcctcccacctcagcctcccaagcagctggcactacaggcacacatcaccaagcttggctagtttttgtattttttgtagagaaggcattttgccacgttgcccaggctggtctcaaactcacctcaagcaatctgcctgccctgacctcccaaagtgctgagattacaggtgtgagccactgtgcccagccaaaatttttttttaattgacagatatttaattgacaaaaattaattgatgaatcaaatatatatgcaaggtgtacagcacagtgtttttttcttttaagagacagggtcttgctgtgtcacccaggctggagtgcaatggtgcaatcatagctcactgcagcctcaaactcctgggctcaagcagtcctcccacctcagcctcctgattagccaagtagctgggatgacaagcatatgccaccacacctggataatttttttttattttgtagagatagggtcttgctatgtgccccaggctggtctcagactcctgggctcaagaaatcctctagtcttggcctcccaaagtgttgggattacaagcatgaaccacggcacctggcttcaaagtgatgatttgatataattatacattatgtactttcctttttaaaaatttgttatgggtacatagtaggtgtatatatagggtacatgagatattttgtacaagcacacagtgcataatgatcatgttgggtagatgaggtatgcatcacctcaagcatttaccctttgtattacaaacaatgtgattatactcttttagttattttaaaatatacagtaaattattgttgactgtgtagtcaccctgttgtgttatcaaaaactagatcttactcatcctgtctaactctatttttgtaccccataatgtactttctgatgtatgatttcttgagttagttatggatgcagctaacttgacatttacctcactgatgagtagccttgagcaatttttctgcagttcagcaagctaacataataataaaaacaagttttgctgtcattaagttttatcattgagctgttaggagggaagaactacttaggtatttccatttggaatggcaggttcaccacagaggctcacattgagatcaagttgtcttcgacagcctttatagccactgtttgcctcccctgtactccagggttttgttcctgagtcgatgtttgaccgccttctcactgggcctgtagtgcggggagagggagcgagcagaagaggaagaaggcccaaaagtgagatcgccagagcagccgcggccgccgctgctgtggcctccacgtcagggatcaaccctttgctggtgaacagcctgtttgctggaatggacctgacgagccttcagaatctccagaatctccagtcgctccagctggcaggcctcatgggcttccctccaggactggcaacagctgccaccgccggaggcgatgcgaagaaccctgctgctgtgctgcccctgatgctgccaggaatggcgggcctgcccaacgtgtttggcttgggcgggctgttgaataaccctctgtcagctgctactggaaacaccactactgcttctagtcaaggagaaccggaagacagcacttcaaaaggagaggagaaaggaaatgagaatgaagacgagaacaaagactctgagaaaagcacagatgctgtttcggctgctgactctgcgaatggatctgttggtgctgctactgccccggctggattgccctcaaacccgctagccttcaaccctttcctcctgtccacaatggccccgggcctcttctacccatccatgtttctacctccaggactggggggattgacgctgcctgggttcccagcattggcaggacttcagaatgccgtgggctccagcgaagaaaaggctgctgacaaggctgagggaggaccctttaaagatggagagacccttgaaggcagcgatgccgaggagagcctggataagactgcagagtcctccctcttagaagacgaaatagcacagggtgaagagctagactcacttgatgggggggatgaaatagaaaacaatgaaaatgatgaataaccagtaccagttccagttcaagtgtttaaaacttttgacaagtggtagtcctactgtttacactcacagttaatgttcatacctagttttataagctgttctgtaacatagtgtagcaaaaaaaaaagttcaagtcatgttatacaggtgtgtcaaaaggtatcttggtcattaagtattgtgcagtgcattatttattatccctaggagagatgaaatttgagaggtgatcatgtctttttaaggaaacttacataatgctctgctttttttttttctcttggtaccattggtattataataaagagcaatttgtaactgagtggcactaatggaagaaagtgctgctcaaaggaagtatgaagttatatatttaattttttaattttaatttttaatttttttgctgtgaaggtcaagctgaaatttaccatacatatcatacttgctcatttgtttccctttttgactgtatgggggttcccacactcgtgcatacacacacatccatacactctgacaatctccacgctagtgtgaacgcctctgtcccgaggcgcagcaataataaggcagctgttgaatgtgaagggtccctttggaaaattaacctactgggagggttcttgccagacagaactacagttccattgtctcgtggtcttgtaatgcactggtaaaaacaaaataaatagatgaataaataaagagtgagagaagagagaatcaggtaccttttttaaattaaaggactttgttactttagccacaaagctaaaacagcattacctcagctctaaactagccttgaagtttacagacatgactttgtaaatgtattgtttttctttgttgtgatgtccttttatttttttctttgaaaactgctatcatgtaagataaaatgtaaattgctgccaactgtagtaatgatgcttttaataaaagtgacccatgatatgcagagatgtaattatagaatgtagtatatagggaaactggtgttcactctattttttttgtattcgcaatagatgcaaatacagcattctggcttttgtacagtttcttgatatatcctcttatactagattagcttttggtaagacactaaactgtctcgaagactagacaggaaggaaaaccttgaattactctcacataattccactccagatatctcaacagcaatgcatacaaaaagctcctattactccctcaaaagggcatctgagaccgagaatacttagaaatgtgtgcagcgtgtgataatgtggtacactgaagaacaaaagggcaaaagaaaaatgaggctttaacaggcacaatatctaggtcatttatccttggttaatgggtagaaaaacacaatgcggtagtgtcagcaagggacacaaaggcactctggtgtcctgcagaccagcgctcgatgccagaaaccagggtgtggaaaaacccatgtggaattgaaacagacccacttaagcacgcacgcgcgcacgcacggtctcaggagctactgatttgtggacccctttttgacctttggtatttaaagtaaaatataatttgagatctactgttttcacctttttatgtcacctgaaccaacacaaagccatatttccatccagttaaaaagcaggggaagggatgtggacgagagtgtttcgtgtgtgttgccttcctccacacccttcccccaggacgtccgcacacagtccacccccagccagtgtgctgccagacaggtggtctaaattcctcccagactgtgagattcagttcgtttatgctccaagatgaaaatatgccccttaatgattctgggaaagaaacaacctgaaccctccaccttacagatcctgtgattgcttttatttatcatcgtcgttgtctgctgaaagtgaatgggccgtgcacactggaggaaagtgccttgaagagaatattttttgaaagggaattatttgaacacgggaaagtgaaactaggtctgcatgaagtataggaaatttaagtatttaagtaacaaagatgttagcagggagaatttgcttaataaaatgagtcattaaagggtgttttttttaaagttctttgtagtattggaaattttcctatgagcctctgtaaatagagaatataatgtgacactgttaggataaaattctaagagcaatgatgatcttcaaagcaaagccatcagttgctcgtggccagaggacccctgagttgttggggctcactggcttgttatgtgcatcatccggtactcatctgttgacgtggctttaatgtcattcacattttcatattgaaaaatgcattttttttcttccagtgaaattcattcttggtagtagatcttgaatctacctaagtattttattttctttctttctttctttcttttttttttttgttgttgttgttgagacggagtctcgctgtctcccaggctggagtgtagtggcacaatctcagctcactgcaagccccgcctcccactttcacgccattctcctgcctcagcttccttagtagctgggactacaggcgcctgccaccacgcccagctaattttttttgtatttttagtagagacggggtttcatcgtgttagccaggatggtcttgatctcctgatgcttgtgatccacctgcctctgcctctgcctcccaaaatgctgggattacaggcgtgagtaaagtattttcaattcagtcagatactaatgggtatgatcgtgtgcctagcatggaggaagcactgaggtgccaagggttctcctggcattgctccctgatggaagttctgttcttccctgaggaggctgaggcccgggagttggcatcatccccagcagtaagtgcaggaacaggacttgaactcaggtggtctgactgcagaagtctgtgtatgtgctcctaaaatactgtgcttttaggtctctgaaagaaaattatgacataaggataactgaaatttcgctgtttattccccttcataacatcttaagtttgaggttgggaattaagagaaagtcttgaattagagacttagctctggctaaggaaatgaatcccacctacctcatttaaatttggatttattttgccccacaagtatttctattttataaagaaatcaagtctttaaaaagaatttgtccaaataagttacagagagagtaaattgccagcctggtatttgaaccccaattgatgtaactccaaagcccaggctcctaaccactatgctagtgtaattaacattcatcagcaacattgggtgctgtgtgctagaggctgtgctgggaatatagaaatgaaagcaaacagactagtcccctgctgtcatgcagcttacatcctagtacgaagagatgcataatagaatacaaataaaatgtttgcagggcaaggaagactcttaaataaggtgataggatggccaggaaaaagctctctatggaggagacagctcacacctgagtgatgagaagcagtaggcagactatattctagttggagaattgtccagacaaaaggaatgacaaacgcaaagaccttgagctggtaatgagcttggaataaggagtggagaggccatctgccttgaaaagttgggaggcatggtcagattacatagggcctggatggctctggtggaggatttgggtttcatgctgagtgctgtagaaagtcttctgaaggttttatgcagaaaaatggtcattttcatgtttttaaaggatcattatgtctgcagttcaaaaaactcccttgtaaaggggagtcagcaattccagctgggagatggctgtagcaaccttgggtcaagtttagtgggcagtaatggagaaggaaagccatggatggacttgggatatgttttgaagaggtagaccctccaatttaaatgaacttttcagtgaataatttgtattaattcttcaggactactactaaaaactaacagataaagaatgttcaccatgctaatttttttaaataagaatgttgtgattagtgttagaagaagatactgggaaaataaatttttccatcatgtacattataaaattttctttttagttcaatgaaaattgttaattgtctgtgggaagagttttagacattaatcctgaccggtagaggaggtgagagtgagcattgttgaagcaatgtgtgttacagcaaacatctctgtgtctctagggccatcaataaatttaaattaggaagcaaaacaatgtaaatgacttctactaacaagcacttaaaagaatacatcttattcattcaacttggctctctaatgagcaattttatattttcttaagcacaggtaagatttaccacagttttacagacatagtaaaataagctatatttggcaaaatagatgaataaattaccttcgggaatactttacctaatgtaagactcttaagcatttcattattgagatttttggtaggggagtcacttaatttgaagattttctggtaagggttaggatgatcgttttctaagtattctggactatttaagttattttatgcagtgcaacatagcgccaccctcccaataggtctatttgtttataaaccttgttttggatctacagatgtagatttgaattttaatttggatctccttaatcaaatgtgtactatgtaatttaaatgaaattaaataataagctagtgataaaatttgaaatattttgacatctaatatctttaccttccgaacgatttactctttttttttgagatggagtctcactttgtcacccaggctggagtgcagtggcacaacctcggctcactgcaacctttgccttccaggttcaagattctcctgcttcagcttcctgagtagctgggcccatagacatctgccaccatgcccggctaatttttgtatgtttagtagagatgggatttcaccatgttggccagactggtctcgaactcctgacctcaagtgatctgcctgcctcggcctcccaaagtgctgggattacaggcatgagccaccgtgcctggcagaatgatttactcttaaaatttgtttagctcctaagcaggttgacattttcttcacttgaacaaagatggcagaatcccatttcacatgttggcaggcatgctatttaagtgtgctggtgcctctccacagtaggatcctgctgtgagccttcccttctcatgaggtccttcctgggctcccagataaatgtcatgataaatttggagttgtagctaaagggcagcctaatagatttctaatatataataaatagtagcactaggtcaaaatactgcttaggaatcactttatactccaggtggcttcctccattgtcccctcgccgcctctgcattttgatctgaaagctcgatttcaagattacaaatgagagaaacctgattctcttctgtgacaggagccaggtactgcaatggtttgcaatccaaaacctcataattgtcagcctcagttcaagagacttcaactgggatataggctggatgactgaaacctaagcaggctgtaaagttaatagttttggggagtgcgcatgacagtttggaaaactcatcctgtttaacatgtttcaccatgtttccctaggagtcgggaagctcaacatttcagaattcagcatttgtgtttgttaataggcactggtgagttaatccacaccacaccctggtaagttaggccagtcttgttgccaccagccctttaccaggtgaggcagggtcatttgcccaaggccaagtagtacacaagtgtggtggccagaactagaatttggacttttccagcggacgtgatggctagctgtgggccatctgtcttaggataaacccaccatcaatgttaattcaggtctaggatcttaaacaaaaacctaaaatagatcaagctacaagatattttaataaccgatggtgtgatctgaagagcaaatcagaaagttccagaatctcatgctgcattacagaagtgattattgaagaatggctgaaagatgttcaagtaaaaaaaaaaaaaagcaattaacaagtaggctttatatccatgctgagttaatgatatgatctatgcaactgacagtctaaatatttctgcatgttactgaggatattcactaggatttctggatagtgaatattgccctttcttctaccttgtatctgaatggccctaaaagccagccccagcttgtagaaatcgagatgacaaagtctggaacctatggctcctacaaggatggaaaatagccccagcagaacagtgttgcttcatctgtccccacccacagggctttcctaggctattgtagctctcatagcggatttgcatatctgtagctgcagagctaatgttctctctctaggctcagggggccctgcaaggcagctccatggtcctttccattttattgtaagagttggtggaaaatgagaggcggccattgtgtctgactgcggaggcattgttcttccccagacgaggctggcctctttctcagctcccggtttctgctcctccagccatggctagcttctgaggagcagctggactaactcagaattgccccaagggttacttaaaaccatgaaaagaaattttactctccaaaatgtaaagttacaaactgccccccaaacaccttttcttggcagtcccagtttgtacagaacctgtgtgttctgatagtaacgcagccgtggcaactcaacaacaaagtgctggctcgaacctcagcccccagcccctagcccactttgtgaaaagaatttcattgaccatcagaatatgtggtggtggcagtgggggataaaattgaagcagaaaatgtccctttacatttcaaccataaaaccatctgttgctgaggactgtgcaggtatcaattgtttatgatcattaaaatcttgctgttgaggatagttactacaaaaacctgaatattgtttatgatgtcgatgtcggggaaaccaaagctttttgtatttatgttgctttcttatgtggtttgggggtaggccaaatgagcaaaacaacagtggccttccaaggtgcataggcctaggagaacatgctgtaaaatatatgcaagaagaaaagcaactttgagaatcacttggtgtttcttgtatttggagctcaaatgactaaatggccaaaatgtcatctccagctgacatgcttccagcatgtctgttctggtcagaaagcttacccaaaatagtttacaattttattttgtactacgatatacctgctactggacacgcatctgcagattttaggtgcatgctgatctggcacatttattctcatggattgtatgtacggggcattacgtgctccctgccttcaaggagatgctgaaatccacaacaacttgaagggttagacaaacttactgttttaatagctgttataggtacaaattatcctagccacttgattgtcagttgtggctaaatatgttgaataaggaggaagctactgagcccagagaccctgggagaggacatgtggatttgatcggttgtccttgctccttgtaattttagcttcctgcacctgatcactttatccagagcaggaacagctttaaactaatcttgttttgctttaaatgtaaaccatctaggcttctgaattagtgcaaaaaagaaaaaagtttagtaacttcagttaaatctctaagactcacatctctcctgcatcagcatgatcatgatattccccttctcttagaggtgccaccaacggtgacctaaaaacggaggcagcaatgccctgaggatggcatcctgttgctggtgtccacaaggtgatttccttctggatctggacattcttgcttgatggactaaatgcagccatgttttgctttcggcctttccacattaagtctctgctctcttagggacaaatgttatggagtctttttgtgtattaaggacactttcttttgaaagccatgccaggggttatgctaaacaaagggcataataggcatcattcttgtccttaagtagcaaccaattgggaagtatttaatgggcaattggagggtgtgttggagggtaggggtgagagaaaaagcatatagtcagggttcttccagtgcctaagagtgttgctgaggtaggtaatataaacaacagatctgcccgtgctttgcagatttcagggcatttatccatgcattgtctcaatggatacaacttagaaataggccagttgtgactttagagattaaagaaattaaggttctgtgaggcaaggttagcaagtggtttcgttgaatcttgcaggcaggtctttggactccaaatcacatagtgtggtttctctaccacataatgacagcaaccaggtaactcctgccacacacacacagtggcagccctgtagagcaagttcatctctgagcctcaccttcctcatttgtaaatttggaagcataataatgataatgccttccttctagtgttgtgtgaggattcgaaatcctgaatatggccgggcacagtggttcacacctgtaatcctaacactttgggaggctgagccagatggatcacctgaggccaggagttcgagaccagcttagccaacatggcgaaaccccgtctctactaaaaatacaaaaaattagccaggcatggtggcgggcacttgtaatcctaactacttgggaggctaaggtggaagaattgcttgaacccgggcggtggaggttgcagtgagctgagattgtgccactgcgctccagcctgagcaatagagcaagactgtcttgaaaaagtgaaaaaagaaaagaaatcctgaatatgcaaagttcttagcgtctggcactgaactggcactcaacaaatgatcatttaaaaacttcacatcgtttgacaaattctaaagaagtggtacaggagaatgaagcctaaaaacactgagcaaatggccagggtggttttggcctataaggagtgttctatagaaatgaggcttctgcctgtcctgaaacacaggcagttcttggctgaagacagcagtgcagacttgagcttggagtaggtgggaggaggtaaggcttctagaaagtcggttctcaaacaccagtgagcaatacaagtagccctggggccttgtacacttccagatttggatgaaaattgtttttaaagcttcacaatactcttattccaatacattctaatattttctgttgtattctatttcattcgaataaataaataagagatcattcccctctaaactgacttagtgatgcagtagtggttggtggcctgcactttgaaaaatcctgctgtacaacaagggttcttaacctggggccatggatgggctttgtgggaggggatgtgggtggccctaagtcccttgaatttggatgcatagttatgtgtgcatgtatttttctagagagaggatccctaaatttcgtttggacctcaaagcacctgtgacttcctctctgagagggtaataagagagccagaaaagcagctttgagtgattggggattacttttaatgccacttcagaaatggaaaactgatgaaaaaccagtccctgaagaggaaaaatcacagcaagtggaacattccccccaaaatgcctcctgcccagggtactctcctcccgcttgtgtgacagccagcagttggacagcctcctttttctcctgcaccaagtggggacggtaataccaccttccatgcaggccagttttgaagactgaatgagataatgcctgtagaactacttagactggtacaaaataaacacattcacaatgtcaactattgtgcgtgctgtccctgcgtggtgacagtaccacagagagtgttgtccccattgtatctgtccagtgctttgtgagtgtgtgtttgtttttagtggaatgaattcttttcctcattcatgagcatagaggctgatagaaattccaggcaatctgatctacctcgaggtccctcccctgggccctcacacaaagccagaaaacagaaatgagtcctttctccctgtctggcttctggaggctggccatagggcctgaacggcatccctgccaagctaacacaggttcctgggtgcccaaagtgtgcccgcccctgccagatggcagacagtgcccatagctgccacaccctccaccccagcacactcaggaccatgctcttgttgctactcacccttcagtcaaaaaatcaaacaaaacacaacgggccctggagagctgtcctcaggtttcctccttcccaggaggaagcaaaggtgaaaggaaaaagggtttctgcataaggtgcccacctttggggagtctgaatttctgccctcttattttattaatattatttgctgctatgctgttcagtcgtgaagcccagggccccacacagagtgacgcctctgggtcccgcggtggatggaaagggcggactgcggccgcgctgggcacaggtgggagatggatggggctgcacggtgggcacggagcgcctctgccggaaaccgcctcttccttcccaaactcagttttaaagggcacagcaagtaaggtgctgctggttttaacagctcccatcagttaaagaatgaacgtacacgtacagcgactgagcctgtttgtttctaattggtgtttttataagtagggttcccaacagaagaaggcacatgtgtgaccagcaggactgtgtcctccccagatgaacgtgctagaaccagagcccccagcgcctcaggatgggactgcatttagagacagagcctttaagaggggattaagggaaaatgagttcgtacgggtgggtcctgctccaacctgactggtgtctataggaagagaagataaggacacaggcagagacggagggaagacttcctgagg

SEQ ID NO: 65 - DNA, 3859 bp, Homo sapiens
gcgggggttgagtcgtggtggtgcggacgcgctcgtgctcgggaactatcggattaaacttgaatcgagtgaaattacacaaaggagcgccgcggaggaggcggcccggggacccggacaccctgaaactcaccagagacccgttcgcccccggccaactccgtgcccgtggattcagccccctggccgcagctgccgagccaactccggagcccgctctgcgttttgttttcccctcggcactaggcagcggaggagcccgaccgacccggacctatatccagactttgcctgacactgcagggtccaagagaattaaagaaatatggaatgacatgaagaagattagttaaggattataggctttgagggcaaacacctcagtgaagtgaagcacaggcaagctcctgagctgtggtttggaggagccgtgtgttggaagaagatggcagatccaggaatgatgagtctttttggcgaggatgggaatattttcagtgaaggtcttgaaggcctcggagaatgtggttacccggaaaatccagtaaatcctatgggtcagcaaatgccaatagaccaaggctttgcctctttacagccatcccttcatcatccttcaactaatcaaaatcaaacaaagctgacacattttgatcactataatcagtatgaacaacaaaagatgcatctgatggatcagccgaacagaatgatgagcaacacccctgggaacggactcgcgtctccgcactcgcagtatcacacccctcccgttcctcaggtgccccatggtggcagtggtggcggtcagatgggtgtctaccctggcatgcagaatgagaggcatgggcaatcctttgtggacagcagctccatgtggggccccagggctgttcaggtaccagaccagatacgagccccctaccagcagcagcagccacagccgcagccaccgcagccggctccgtcggggccccctgcacagggccaccctcagcacatgcagcagatgggcagctatatggcacgtggggatttttccatgcagcagcatggtcagccacagcagaggatgagccagttttcccaaggccaagagggcctcaatcagggaaatccttttattgccacctcaggacctggccacttgtcccacgtgccccagcagagtcccagcatggcaccttccttgcgtcactcggtgcagcagttccatcaccacccctctactgctctccatggagaatccgttgcccacagtcccagattctccccgaatcctccccaacaaggggctgttaggccgcaaacccttaactttagttctcggagccagacagtcccctctcctactataaacaactcagggcagtattctcgatatccttacagtaacctaaatcagggattagttaacaatacagggatgaatcaaaatttaggccttacaaataatactccaatgaatcagtccgtaccaagataccccaatgctgtaggattcccatcaaacagtggtcaaggactaatgcaccagcagcccatccaccccagtggctcacttaaccaaatgaacacacaaactatgcatccttcacagcctcagggaacttatgcctctccacctcccatgtcacccatgaaagcaatgagtaatccagcaggcactcctcctccacaagtcaggccgggaagtgctgggataccaatggaagttggcagttatccaaatatgccccatcctcagccatctcaccagccccctggtgccatgggaatcggacagaggaatatgggccccagaaacatgcagcagtctcgtccatttataggcatgtcctcggcaccaagggaattgactgggcacatgaggccaaatggttgtcctggtgttggccttggagacccacaagcaatccaggaacgactgatacctggccaacaacatcctggtcaacagccatcttttcagcagttgccaacctgtcctccactgcagcctcacccgggcttgcaccaccagtcttcacctccacaccctcatcaccagccttgggcacagctccacccatcaccccagaacaccccgcagaaagtgcctgtgcatcagcattccccgtcggagccctttctagagaaaccagtgccggatatgactcaggttagtggaccgaatgctcagctagtgaagagtgatgattacctgccatcaatagaacagcagccacaacaaaagaagaagaaaaagaaaaacaaccacattgtagcagaggatcccagtaaaggttttggtaaagatgacttccctggtggggtagataaccaagaactaaataggaactcactggatgggtcccaagaagaaaaaaagaaaaagaaaaggtcaaaggcaaaaaaagacccgaaggaaccgaaagaacccaaggagaaaaaagagcccaaggaacccaagaccccgaaagcccctaagattcccaaagagccaaaggaaaagaaagcaaaaactgccacgccaaaacccaaatccagcaaaaagtcaagtaataagaaacctgactcagaagcaagtgctttgaagaaaaaggtcaacaagggaaaaacagaaggttctgaaaattcagacttagacaaaacacccccaccatctcctcctcctgaagaagatgaggacccaggtgttcagaagagacggtccagcagacaggtgaagagaaagcgctacactgaagacctggagttcaagatttctgatgaggaggcagatgatgcagatgctgctgggagggattccccctccaacacctcccagtcagaacagcaggaatctgttgatgcagaaggcccagtggtagaaaaaattatgagcagtcgttcagtaaaaaagcagaaggaatctggagaggaggtagaaattgaggaattctatgtgaaatacaaaaacttctcttatcttcattgtcagtgggcatctatagaagatctggaaaaagataagagaattcagcaaaaaattaaacgatttaaggcaaagcagggccagaacaagttcctttcagagattgaggatgagctttttaatccagattatgtggaggttgaccggataatggactttgcacgtagcacagatgaccggggagagcctgtgactcactatctggtgaagtggtgttcacttccttatgaagacagcacgtgggagcggaggcaggacatagatcaagcaaagatcgaggagtttgagaaactaatgtccagggagccggaaacagagcgtgtggagcgacctcctgctgatgattggaagaaatcggagagttccagggagtataaaaacaataacaaactcagggaataccagttggagggagtaaactggctacttttcaattggtacaacatgcgaaactgcattttagcagatgaaatgggtttgggaaaaactatccagtccattacatttctctatgagatatatttgaaaggaatccatggcccttttttagtaattgccccattgtccacaatccccaactgggaaagggaattccgaacctggacagagttgaacgtggttgtgtatcatgggagtcaagctagtcgtcggaccattcagttgtatgaaatgtacttcaaagatccccagggtcgagtgataaaggggtcctataagtttcatgccatcatcactacatttgagatgattttgactgattgtcctgagctgcggaatattccatggcgctgtgtagtcattgatgaagcccacaggctgaagaacaggaactgcaagctgttggagggactcaagatgatggacttggtcagtgaccatattggtgattgcactgaacctgaa

SEQ ID NO: 66 - protein, 1130 aa, Homo sapiens
MADPGMMSLFGEDGNIFSEGLEGLGECGYPENPVNPMGQQMPIDQGFASLQPSLHHPSTNQNQTKLTHFDHYNQYEQQKMHLMDQPNRMMSNTPGNGLDHSQYHTPPVPQVPHGGSGGGQMGVYPGMQNERHGQSFVDSSSMWGPRAVQVPDQIRAPYQQQQPQPQPPQPAPSGPPAQGHPQHMQQMGSYMRDFSMQQHGQPQQRMSQFSQGQEQQGNPFIATSGPGHLSHVPQQSPSMAPSLRHSVQQFHHHPSTALHGESVAHSPRFSPNPPQQGAVRPQTLNFSSRSQTVPSPTINNSGQYSRYPYSNLNQGLVNNTGMNQNLGLTNNTPMNQSVPRYPNAVGFPSNSGQGLMHQQPIHPSGSLNQMNTQTMHPSQPQGTYDPPMSPMKAMSNPAGTPPPQVRPGSAGIPMEVGSYPNMPHPQPSHQPPGAMGIGQRNMGPRNMQQSRPFIGMSSAPRELTGHMRPNGCPGVGLGDPQAIQERLIPGQQHPGQQPSFQQLPTCPPLQPHPGLHHQSSPPHPHHQPWAQLHPSPQNTPQKVPVHQHSPSEPFLEKPVPDMTQVSGPNAQLVKSDDYLPSIEQQPQQKKKKKKNNHIVAEDPSKGFGKDDFPGGVDNQELNRNSLDGSQEEKKKKKRSKAKKDPKEPKEPKEKKEPKEPKTPKAPKIPKEPKEKKAKTATPKPKSSKKSSNKKPDSEASALKKKVNKGKTEGSENSDLDKTPPPSPPPEEDEDPGVQKRRSSRQVKRKRYTEDLEFKISDEEADDADAAGRDSPSNTSQSEQQESVDAEGPVVEKIMSSRSVKKQKESGEEVEIEEFYVKYKNFSYLHCQWASIEDLEKDKRIQQKIKRFKAKQGQNKFLSEIEDELFNPDYVEVDRIMDFARSTDDRGEPVTHYLVKWCSLPYEDSTWERRQDIDQAKIEEFEKLMSREPETERVERPPADDWKKSESSREYKNNNKLREYQLEGVNWLLFNWYNMRNCILADEMGLGKTIQSITFLYEIYLKGIHGPFLVIAPLSTIPNWEREFRTWTELNVVVYHGSQASRRTIQLYEMYFKDPQGRVIKGSYKFHAIITTFEMILTDCPELRNIPWRCVVIDEAHRLKNRNCKLLEGLKMMDLVSDHIGDCTEPE

SEQ ID NO: 67 - DNA, 10401 bp, Homo sapiens
ttgggctccaactcaagtgcgagcgggcgatgggcgcgcgggcgcggggcggctgagcagcggcggcggcggctcggggacggcggcgacccccgcctcccgcccccgccccccgctccggaccgaccacgccgcgctcgccgggagctgcggccgcaccggcgcgaacaaagtgcgttcctcccggcgcggcggcgccagcccgcgcggggaccgccaccgagcgaggacctatatccagactttgcctgacactgcagggtccaagagaattaaagaaatatggaatgacatgaagaagattagttaaggattataggctttgagggcaaacacctcagtgaagtgaagcacaggcaagctcctgagctgtggtttggaggagccgtgtgttggaagaagatggcagatccaggaatgatgagtctttttggcgaggatgggaatattttcagtgaaggtcttgaaggcctcggagaatgtggttacccggaaaatccagtaaatcctatgggtcagcaaatgccaatagaccaaggctttgcctctttacagccatcccttcatcatccttcaactaatcaaaatcaaacaaagctgacacattttgatcactataatcagtatgaacaacaaaagatgcatctgatggatcagccgaacagaatgatgagcaacacccctgggaacggactcgcgtctccgcactcgcagtatcacacccctcccgttcctcaggtgccccatggtggcagtggtggcggtcagatgggtgtctaccctggcatgcagaatgagaggcatgggcaatcctttgtggacagcagctccatgtggggccccagggctgttcaggtaccagaccagatacgagccccctaccagcagcagcagccacagccgcagccaccgcagccggctccgtcggggccccctgcacagggccaccctcagcacatgcagcagatgggcagctatatggcacgtggggatttttccatgcagcagcatggtcagccacagcagaggatgagccagttttcccaaggccaagagggcctcaatcagggaaatccttttattgccacctcaggacctggccacttgtcccacgtgccccagcagagtcccagcatggcaccttccttgcgtcactcggtgcagcagttccatcaccacccctctactgctctccatggagaatccgttgcccacagtcccagattctccccgaatcctccccaacaaggggctgttaggccgcaaacccttaactttagttctcggagccagacagtcccctctcctactataaacaactcagggcagtattctcgatatccttacagtaacctaaatcagggattagttaacaatacagggatgaatcaaaatttaggccttacaaataatactccaatgaatcagtccgtaccaagataccccaatgctgtaggattcccatcaaacagtggtcaaggactaatgcaccagcagcccatccaccccagtggctcacttaaccaaatgaacacacaaactatgcatccttcacagcctcagggaacttatgcctctccacctcccatgtcacccatgaaagcaatgagtaatccagcaggcactcctcctccacaagtcaggccgggaagtgctgggataccaatggaagttggcagttatccaaatatgccccatcctcagccatctcaccagccccctggtgccatgggaatcggacagaggaatatgggccccagaaacatgcagcagtctcgtccatttataggcatgtcctcggcaccaagggaattgactgggcacatgaggccaaatggttgtcctggtgttggccttggagacccacaagcaatccaggaacgactgatacctggccaacaacatcctggtcaacagccatcttttcagcagttgccaacctgtcctccactgcagcctcacccgggcttgcaccaccagtcttcacctccacaccctcatcaccagccttgggcacagctccacccatcaccccagaacaccccgcagaaagtgcctgtgcatcagcattccccgtcggagccctttctagagaaaccagtgccggatatgactcaggttagtggaccgaatgctcagctagtgaagagtgatgattacctgccatcaatagaacagcagccacaacaaaagaagaagaaaaagaaaaacaaccacattgtagcagaggatcccagtaaaggttttggtaaagatgacttccctggtggggtagataaccaagaactaaataggaactcactggatgggtcccaagaagaaaaaaagaaaaagaaaaggtcaaaggcaaaaaaagacccgaaggaaccgaaagaacccaaggagaaaaaagagcccaaggaacccaagaccccgaaagcccctaagattcccaaagagccaaaggaaaagaaagcaaaaactgccacgccaaaacccaaatccagcaaaaagtcaagaaacacattaaaagtgaacactaagcgatccactttgaattctagtaataagaaacctgactcagaagcaagtgctttgaagaaaaaggtcaacaagggaaaaacagaaggttctgaaaattcagacttagacaaaacacccccaccatctcctcctcctgaagaagatgaggacccaggtgttcagaagagacggtccagcagacaggtgaagagaaagcgctacactgaagacctggagttcaagatttctgatgaggaggcagatgatgcagatgctgctgggagggattccccctccaacacctcccagtcagaacagcaggaatctgttgatgcagaaggcccagtggtagaaaaaattatgagcagtcgttcagtaaaaaagcagaaggaatctggagaggaggtagaaattgaggaattctatgtgaaatacaaaaacttctcttatcttcattgtcagtgggcatctatagaagatctggaaaaagataagagaattcagcaaaaaattaaacgatttaaggcaaagcagggccagaacaagttcctttcagagattgaggatgagctttttaatccagattatgtggaggttgaccggataatggactttgcacgtagcacagatgaccggggagagcctgtgactcactatctggtgaagtggtgttcacttccttatgaagacagcacgtgggagcggaggcaggacatagatcaagcaaagatcgaggagtttgagaaactaatgtccagggagccggaaacagagcgtgtggagcgacctcctgctgatgattggaagaaatcggagagttccagggagtataaaaacaataacaaactcagggaataccagttggagggagtaaactggctacttttcaattggtacaacatgcgaaactgcattttagcagatgaaatgggtttgggaaaaactatccagtccattacatttctctatgagatatatttgaaaggaatccatggcccttttttagtaattgccccattgtccacaatccccaactgggaaagggaattccgaacctggacagagttgaacgtggttgtgtatcatgggagtcaagctagtcgtcggaccattcagttgtatgaaatgtacttcaaagatccccagggtcgagtgataaaggggtcctataagtttcatgccatcatcactacatttgagatgattttgactgattgtcctgagctgcggaatattccatggcgctgtgtagtcattgatgaagcccacaggctgaagaacaggaactgcaagctgttggagggactcaagatgatggacttggaacacaaagtgctgctgacgggaaccccactccagaacactgtggaagaactcttcagcttgcttcatttcttggaaccaagtcgcttcccttcagaaaccacatttatgcaagaatttggtgatctaaaaacagaagagcaggtgcaaaaacttcaagctattctaaagccaatgatgttgagacgtctcaaagaggatgtagaaaagaacttggcccccaaagaagaaactattattgaagttgagctaacaaacattcagaagaaatattaccgagccatccttgagaagaatttcacatttctttccaaaggcggtggtcaagctaacgtacctaacctattaaacactatgatggaattgcggaagtgctgcaatcatccgtaccttatcaatggtgctgaagagaaaattttggaagagtttaaagaaacacacaatgcagagtctccagattttcagctccaggcaatgatccaggctgctggcaagctagtgctgattgacaagctgctgccaaaactgaaggctggtggccacagggtgcttatcttttcccagatggtgcgctgcttggacatactggaagactacctcattcaaagacggtacccatatgaaaggatcgacggccgagtaagaggcaacctccgccaggcagctatcgacagattctccaaacctgattctgataggtttgttttcctcctgtgtacaagggcaggaggtttaggcattaacctcactgctgctgatacctgcatcatctttgattcagactggaatccccaaaatgacctccaggctcaggctagatgtcatagaataggacagagcaaatctgtgaaaatctacaggctgattacaagaaattcctatgaaagggaaatgttcgacaaggctagtttgaaactgggcctggataaagctgtgctacagtctatgagtggaagagaaaatgctaccaatggggtacaacagctttccaagaaagaaatagaggatcttctacgaaaaggggcctatggtgcactcatggatgaggaggatgaagggtctaaattctgtgaagaagatattgatcagatcctcctacgtcgaacccacaccattaccattgagtcagaagggaaaggttccacatttgctaaggccagttttgttgcatctggaaataggacagatatttccttggatgatccaaatttctggcaaaagtgggctaagaaggctgaattggatattgatgccttaaatgggaggaacaacctggttattgatactccaagagtgagaaagcagaccaggctctacagtgcagtgaaggaagatgagctgatggagttctcagacttggaaagtgattctgaagaaaagccctgtgcaaagccacggcgtccccaggataagtcacagggctatgcaaggagtgaatgtttcagggtggagaagaatctgcttgtctatggttggggacggtggacagacattctttcccacggacgctataaacgccaactcactgagcaagatgtagaaaccatctgcagaaccatcctggtgtactgtcttaatcattacaaaggggatgagaatatcaaaagcttcatctgggatctgatcacacccacagcggatggccagactcgagccttggtcaaccattccggtttgtcagctcctgtgccaaggggaaggaagggaaagaaggtgaaagcccagagcacacagccggtggtgcaggatgccgactggctggccagctgcaacccagatgccctgttccaggaggacagctacaagaaacacctgaagcatcactgtaacaaggtcctgctgcgtgtccgcatgctgtactacctaagacaagaagtgataggagaccaggcggataagatcttagagggtgctgactcaagtgaagccgatgtgtggatccctgaacctttccatgctgaagttcctgcagattggtgggataaggaagcagacaaatccctcttaattggagtgttcaaacatggctatgagaagtacaactccatgcgagctgaccccgcgctgtgctttctggaacgagtcggtatgcctgatgccaaggccatagctgccgagcaaagaggaacagacatgctagcagatggtggtgacgggggagaatttgatagagaagatgaagacccagaatataaaccaaccagaacaccgttcaaagatgaaatagatgaatttgcaaattctccttcagaggataaggaagaatccatggaaatacatgccacaggcaagcacagtgagagtaatgctgagttaggccaactttactggcctaacacttcaaccctgactacacgtctgcgccggctcattactgcctatcagcgcagctataaaaggcaacagatgaggcaagaggccctaatgaagactgaccggcgcagacggcggcctcgagaggaagtgagagctctggaagcggaaagggaagctattatatctgagaagcggcaaaagtggacaagaagagaagaggctgatttttaccgtgtggtatccacctttggggttatttttgaccctgtgaaacagcaatttgactggaaccaatttagagcctttgccaggcttgacaaaaaatctgatgagagtttggagaaatacttcagttgttttgtggccatgtgtaggcgagtatgtcgaatgcccgtcaagccagatgatgaaccgcccgacctctcctccataattgagccgatcacagaggagcgagcctctcgaactctgtaccgcattgagctgctacggaagatccgcgagcaggttctccatcacccccagctgggagagaggcttaagctctgccagccaagcttggatctgccagagtggtgggagtgtggacggcatgaccgagacttgctggttggtgctgctaaacacggggtcagtcggacggattatcacatcctcaatgaccctgagttatccttcttggatgcacataaaaactttgctcaaaacagaggggcaggtaatacatcttccttgaacccactggcagttggatttgtccagactcctccagtcatctcatctgctcatattcaagatgagagggtactggaacaagccgaaggcaaagtggaggagcctgaaaacccagctgccaaggagaaatgtgagggcaaagaagaggaagaagaaaccgatggcagcgggaaggagagcaagcaggaatgtgaggcagaggccagctctgtgaaaaatgaactgaaaggggttgaggtcggcgcagacactgggtccaaatctatttcagagaaaggttccgaagaggatgaagaggaaaagctggaggatgacgataagtcggaagagtcttcccagcccgaaggagctgtctctagagggaagaattttgatgaagaaagcaatgcttccatgagcactgctagagatgaaacccgagatggattctacatggaggacggagatccttcagtagctcagctccttcatgaaagaacatttgccttctcgttttggcctaaggatagagtaatgataaaccgcttagacaacatctgtgaagcagtgttgaaaggcaaatggccagtaaataggcgccagatgtttgatttccaaggcctcatcccaggttacacacccaccacagtggacagccccttgcagaagaggagctttgctgagctctccatggtcggccaagccagcattagtgggagtgaggacatcactacgtctcctcagttgtcaaaggaagatgccctcaacctctctgtccctcgccagcggaggaggaggaggagaaaaatcgaaattgaggccgaaagagctgccaagaggcgaaatctcatggagatggttgcccagcttcgagagtctcaggtggtctcagaaaatggacaagaaaaagttgtagatttatcaaaggcctcaagagaggcaacaagctctacctcaaatttttcatctctttcttcaaagtttatcttgcctaatgtctcaacaccagtgtctgatgcctttaagactcaaatggaactgctccaagcaggcctttcgcgcacacccacaaggcatctccttaatggctccctagtggatggagagcctcccatgaagaggaggcggggaaggaggaaaaatgtggagggacttgatctgcttttcatgagccacaaacggacgtcattgagtgcagaggatgctgaggtgaccaaagcttttgaagaagatatagagaccccaccaacaagaaacattccttctcccggacagctggacccagacacacggatccctgttatcaatcttgaagatgggactaggctggtgggggaagatgctcctaaaaataaggatttagttgaatggctgaagctgcaccctacttacactgttgatatgccaagttatgtaccaaagaatgcagatgtgctgttttcctcatttcagaaaccgaaacagaaacgacatagatgtcgaaaccctaataaattggatataaacactttgacaggagaagaaagggtgcctgttgtcaataaacgaaatgggaagaagatgggtggagctatggcgcctccaatgaaggatctacccaggtggctggaagaaaatcctgaatttgcagttgctccagactggactgatatagttaagcagtctggttttgttcctgagtcgatgtttgaccgccttctcactgggcctgtagtgcggggagagggagcgagcagaagaggaagaaggcccaaaagtgagatcgccagagcagccgcggccgccgctgctgtggcctccacgtcagggatcaaccctttgctggtgaacagcctgtttgctggaatggacctgacgagccttcagaatctccagaatctccagtcgctccagctggcaggcctcatgggcttccctccaggactggcaacagctgccaccgccggaggcgatgcgaagaaccctgctgctgtgctgcccctgatgctgccaggaatggcgggcctgcccaacgtgtttggcttgggcgggctgttgaataaccctctgtcagctgctactggaaacaccactactgcttctagtcaaggagaaccggaagacagcacttcaaaaggagaggagaaaggaaatgagaatgaagacgagaacaaagactctgagaaaagcacagatgctgtttcggctgctgactctgcgaatggatctgttggtgctgctactgccccggctggattgccctcaaacccgctagccttcaaccctttcctcctgtccacaatggccccgggcctcttctacccatccatgtttctacctccaggactggggggattgacgctgcctgggttcccagcattggcaggacttcagaatgccgtgggctccagcgaagaaaaggctgctgacaaggctgagggaggaccctttaaagatggagagacccttgaaggcagcgatgccgaggagagcctggataagactgcagagtcctccctcttagaagacgaaatagcacagggtgaagagctagactcacttgatgggggggatgaaatagaaaacaatgaaaatgatgaataaccagtaccagttccagttcaagtgtttaaaacttttgacaagtggtagtcctactgtttacactcacagttaatgttcatacctagttttataagctgttctgtaacatagtgtagcaaaaaaaaaagttcaagtcatgttatacaggtgtgtcaaaaggtatcttggtcattaagtattgtgcagtgcattatttattatccctaggagagatgaaatttgagaggtgatcatgtctttttaaggaaacttacataatgctctgctttttttttttctcttggtaccattggtattataataaagagcaatttgtaactgagtggcactaatggaagaaagtgctgctcaaaggaagtatgaagttatatatttaattttttaattttaatttttaatttttttgctgtgaaggtcaagctgaaatttaccatacatatcatacttgctcatttgtttccctttttgactgtatgggggttcccacactcgtgcatacacacacatccatacactctgacaatctccacgctagtgtgaacgcctctgtcccgaggcgcagcaataataaggcagctgttgaatgtgaagggtccctttggaaaattaacctactgggagggttcttgccagacagaactacagttccattgtctcgtggtcttgtaatgcactggtaaaaacaaaataaatagatgaataaataaagagtgagagaagagagaatcaggtaccttttttaaattaaaggactttgttactttagccacaaagctaaaacagcattacctcagctctaaactagccttgaagtttacagacatgactttgtaaatgtattgtttttctttgttgtgatgtccttttatttttttctttgaaaactgctatcatgtaagataaaatgtaaattgctgccaactgtagtaatgatgcttttaataaaagtgacccatgatatgc

SEQ ID NO: 68 - protein, 2991 aa, Homo sapiens
MADPGMMSLFGEDGNIFSEGLEGLGECGYPENPVNPMGQQMPIDQGFASLQPSLHHPSTNQNQTKLTHFDHYNQYEQQKMHLMDQPNRMMSNTPGNGLDHSQYHTPPVPQVPHGGSGGGQMGVYPGMQNERHGQSFVDSSSMWGPRAVQVPDQIRAPYQQQQPQPQPPQPAPSGPPAQGHPQHMQQMGSYMRDFSMQQHGQPQQRMSQFSQGQEQQGNPFIATSGPGHLSHVPQQSPSMAPSLRHSVQQFHHHPSTALHGESVAHSPRFSPNPPQQGAVRPQTLNFSSRSQTVPSPTINNSGQYSRYPYSNLNQGLVNNTGMNQNLGLTNNTPMNQSVPRYPNAVGFPSNSGQGLMHQQPIHPSGSLNQMNTQTMHPSQPQGTYDPPMSPMKAMSNPAGTPPPQVRPGSAGIPMEVGSYPNMPHPQPSHQPPGAMGIGQRNMGPRNMQQSRPFIGMSSAPRELTGHMRPNGCPGVGLGDPQAIQERLIPGQQHPGQQPSFQQLPTCPPLQPHPGLHHQSSPPHPHHQPWAQLHPSPQNTPQKVPVHQHSPSEPFLEKPVPDMTQVSGPNAQLVKSDDYLPSIEQQPQQKKKKKKNNHIVAEDPSKGFGKDDFPGGVDNQELNRNSLDGSQEEKKKKKRSKAKKDPKEPKEPKEKKEPKEPKTPKAPKIPKEPKEKKAKTATPKPKSSKKSRNTLKVNTKRSTLNSSNKKPDSEASALKKKVNKGKTEGSENSDLDKTPPPSPPPEEDEDPGVQKRRSSRQVKRKRYTEDLEFKISDEEADDADAAGRDSPSNTSQSEQQESVDAEGPVVEKIMSSRSVKKQKESGEEVEIEEFYVKYKNFSYLHCQWASIEDLEKDKRIQQKIKRFKAKQGQNKFLSEIEDELFNPDYVEVDRIMDFARSTDDRGEPVTHYLVKWCSLPYEDSTWERRQDIDQAKIEEFEKLMSREPETERVERPPADDWKKSESSREYKNNNKLREYQLEGVNWLLFNWYNMRNCILADEMGLGKTIQSITFLYEIYLKGIHGPFLVIAPLSTIPNWEREFRTWTELNVVVYHGSQASRRTIQLYEMYFKDPQGRVIKGSYKFHAIITTFEMILTDCPELRNIPWRCVVIDEAHRLKNRNCKLLEGLKMMDLEHKVLLTGTPLQNTVEELFSLLHFLEPSRFPSETTFMQEFGDLKTEEQVQKLQAILKPMMLRRLKEDVEKNLAPKEETIIEVELTNIQKKYYRAIKNFTFLSKGGGQANVPNLLNTMMELRKCCNHPYLINGAEEKIEFKETHNAESPDFQLQAMIQAAGKLVLIDKLLPKLKAGGHRVLIFSQMVRCLDIDYLIQRRYPYERIDGRVRGNLRQAAIDRFSKPDSDRFVFLLCTRAGGLGINLTAADTCIIFDSDWNPQNDLQAQARCHRIGQSKSVKIYRLITRNSYEREMFDKASLKLGLDKAVLQSMSGRENATNGVQQLSKKEIEDLLRKGAYGALMDEEDEGSKFCEEDIDQILLRRTHTITIESEGKGSTFAKASFVASGNRTDISLDDPNFWQKWAKKAELDIDALNGRNNLVIDTPRVRKQTRKAVKEDELMEFSDLESDSEEKPCAKPRRPQDKSQGYARSECFRVEKNLLVYGWGRWTDILSHGRYKRQLTEQDVETICRTILVYCLNHYKGDENIKSFIWDLITPTADGQTRALVNHSGLSAPVPRGRKGKKVKAQSTQPVVQDADWLASCNPDALFQEDSYKKHLKHHCNKVLLRVRMLYYLRQEVIGDQADKIGADSSEADVWIPEPFHAEVPADWWDKEADKSLLIGVFKHGYEKYNSMRADPALCFLERVGMPDAKAIAAEQRGTDMLADGGDGGEFDREDEDPEYKPTRTPFKDEIDEFANSPSEDKEESMEIHATGKHSESNAELGQLYWPNTSTLTTRLRRLITAYQRSYKRQQMRQEALMKTDRRRRRPREEVRALEAEREAIISEKRQKWTRREEADFYRVVSTFGVIFDPVKQQFDWNQFRAFARLDKKSDESLEKYFSCFVAMCRRVCRMPVKPDDEPPDLSSIIEPITEERASRTLYRIELLRKIREQVLHHPQLGERLKLCQPSLDLPEWWECGRHDRDLLVGAAKHGVSRTDYHILNDPELSFLDAHKNFAQNRGAGNTSSLNPLAVGFVQTPPVISSAHIQDERVLEQAEGKVEEPENPAAKEKCEGKEEEEETDGSGKESKQECEAEASSVKNELKGVEVGADTGSKSISEKGSEEDEEEKLEDDDKSEESSQPEGAVSRGKNFDEESNASMSTARDETRDGFYMEDGDPSVAQLLHERTFAFSFWPKDRVMINRLDNICEAVLKGKWPVNRRQMFDFQGLIPGYTPTTVDSPLQKRSFAELSMVGQASISGSEDITTSPQLSKEDALNLSVPRQRRRRRRKIEIEAERAAKRRNLMEMVAQLRESQVVSENGQEKVVDLSKASREATSSTSNFSSLSSKFILPNVSTPVSDAFKTQMELLQAGLSRTPTRHLLNGSLVDGEPPMKRRRGRRKNVEGLDLLFMSHKRTSLSAEDAEVTKAFEEDIETPPTRNIPSPGQLDPDTRIPVINLEDGTRLVGEDAPKNKDLVEWLKLHPTYTVDMPSYVPKNADVLFSSFQKPKQKRHRCRNPNKLDINTLTGEERVPVVNKRNGKKMGGAMAPPMKDLPRWLEENPEFAVAPDWTDIVKQSGFVPESMFDRLLTGPVVRGEGASRRGRRPKSEIARAAAAAAAVASTSGINPLLVNSLFAGMDLTSLQNLQNLQSLQLAGLMGFPPGLATAATAGGDAKNPAAVLPLMLPGMAGLPNVFGLGGLLNNPLSAATGNTTTASSQGEPEDSTSKGEEKGNENEDENKDSEKSTDAVSAADSANGSVGAATAPAGLPSNPLAFNPFLLSTMAPGLFYPSMFLPPGLGGLTLPGFPAGLQNAVGSSEEKAADKAEGGPFKDGETLEGSDAEESLDKTAESSLLEDEIAQGEELDSLDGGDEIENNENDE

SEQ ID NO: 69 - DNA, 10399 bp, Homo sapiens
gcgggggttgagtcgtggtggtgcggacgcgctcgtgctcgggaactatcggattaaacttgaatcgagtgaaattacacaaaggagcgccgcggaggaggcggcccggggacccggacaccctgaaactcaccagagacccgttcgcccccggccaactccgtgcccgtggattcagccccctggccgcagctgccgagccaactccggagcccgctctgcgttttgttttcccctcggcactaggcagcggaggagcccgaccgacccggacctatatccagactttgcctgacactgcagggtccaagagaattaaagaaatatggaatgacatgaagaagattagttaaggattataggctttgagggcaaacacctcagtgaagtgaagcacaggcaagctcctgagctgtggtttggaggagccgtgtgttggaagaagatggcagatccaggaatgatgagtctttttggcgaggatgggaatattttcagtgaaggtcttgaaggcctcggagaatgtggttacccggaaaatccagtaaatcctatgggtcagcaaatgccaatagaccaaggctttgcctctttacagccatcccttcatcatccttcaactaatcaaaatcaaacaaagctgacacattttgatcactataatcagtatgaacaacaaaagatgcatctgatggatcagccgaacagaatgatgagcaacacccctgggaacggactcgcgtctccgcactcgcagtatcacacccctcccgttcctcaggtgccccatggtggcagtggtggcggtcagatgggtgtctaccctggcatgcagaatgagaggcatgggcaatcctttgtggacagcagctccatgtggggccccagggctgttcaggtaccagaccagatacgagccccctaccagcagcagcagccacagccgcagccaccgcagccggctccgtcggggccccctgcacagggccaccctcagcacatgcagcagatgggcagctatatggcacgtggggatttttccatgcagcagcatggtcagccacagcagaggatgagccagttttcccaaggccaagagggcctcaatcagggaaatccttttattgccacctcaggacctggccacttgtcccacgtgccccagcagagtcccagcatggcaccttccttgcgtcactcggtgcagcagttccatcaccacccctctactgctctccatggagaatccgttgcccacagtcccagattctccccgaatcctccccaacaaggggctgttaggccgcaaacccttaactttagttctcggagccagacagtcccctctcctactataaacaactcagggcagtattctcgatatccttacagtaacctaaatcagggattagttaacaatacagggatgaatcaaaatttaggccttacaaataatactccaatgaatcagtccgtaccaagataccccaatgctgtaggattcccatcaaacagtggtcaaggactaatgcaccagcagcccatccaccccagtggctcacttaaccaaatgaacacacaaactatgcatccttcacagcctcagggaacttatgcctctccacctcccatgtcacccatgaaagcaatgagtaatccagcaggcactcctcctccacaagtcaggccgggaagtgctgggataccaatggaagttggcagttatccaaatatgccccatcctcagccatctcaccagccccctggtgccatgggaatcggacagaggaatatgggccccagaaacatgcagcagtctcgtccatttataggcatgtcctcggcaccaagggaattgactgggcacatgaggccaaatggttgtcctggtgttggccttggagacccacaagcaatccaggaacgactgatacctggccaacaacatcctggtcaacagccatcttttcagcagttgccaacctgtcctccactgcagcctcacccgggcttgcaccaccagtcttcacctccacaccctcatcaccagccttgggcacagctccacccatcaccccagaacaccccgcagaaagtgcctgtgcatcagcattccccgtcggagccctttctagagaaaccagtgccggatatgactcaggttagtggaccgaatgctcagctagtgaagagtgatgattacctgccatcaatagaacagcagccacaacaaaagaagaagaaaaagaaaaacaaccacattgtagcagaggatcccagtaaaggttttggtaaagatgacttccctggtggggtagataaccaagaactaaataggaactcactggatgggtcccaagaagaaaaaaagaaaaagaaaaggtcaaaggcaaaaaaagacccgaaggaaccgaaagaacccaaggagaaaaaagagcccaaggaacccaagaccccgaaagcccctaagattcccaaagagccaaaggaaaagaaagcaaaaactgccacgccaaaacccaaatccagcaaaaagtcaagtaataagaaacctgactcagaagcaagtgctttgaagaaaaaggtcaacaagggaaaaacagaaggttctgaaaattcagacttagacaaaacacccccaccatctcctcctcctgaagaagatgaggacccaggtgttcagaagagacggtccagcagacaggtgaagagaaagcgctacactgaagacctggagttcaagatttctgatgaggaggcagatgatgcagatgctgctgggagggattccccctccaacacctcccagtcagaacagcaggaatctgttgatgcagaaggcccagtggtagaaaaaattatgagcagtcgttcagtaaaaaagcagaaggaatctggagaggaggtagaaattgaggaattctatgtgaaatacaaaaacttctcttatcttcattgtcagtgggcatctatagaagatctggaaaaagataagagaattcagcaaaaaattaaacgatttaaggcaaagcagggccagaacaagttcctttcagagattgaggatgagctttttaatccagattatgtggaggttgaccggataatggactttgcacgtagcacagatgaccggggagagcctgtgactcactatctggtgaagtggtgttcacttccttatgaagacagcacgtgggagcggaggcaggacatagatcaagcaaagatcgaggagtttgagaaactaatgtccagggagccggaaacagagcgtgtggagcgacctcctgctgatgattggaagaaatcggagagttccagggagtataaaaacaataacaaactcagggaataccagttggagggagtaaactggctacttttcaattggtacaacatgcgaaactgcattttagcagatgaaatgggtttgggaaaaactatccagtccattacatttctctatgagatatatttgaaaggaatccatggcccttttttagtaattgccccattgtccacaatccccaactgggaaagggaattccgaacctggacagagttgaacgtggttgtgtatcatgggagtcaagctagtcgtcggaccattcagttgtatgaaatgtacttcaaagatccccagggtcgagtgataaaggggtcctataagtttcatgccatcatcactacatttgagatgattttgactgattgtcctgagctgcggaatattccatggcgctgtgtagtcattgatgaagcccacaggctgaagaacaggaactgcaagctgttggagggactcaagatgatggacttggaacacaaagtgctgctgacgggaaccccactccagaacactgtggaagaactcttcagcttgcttcatttcttggaaccaagtcgcttcccttcagaaaccacatttatgcaagaatttggtgatctaaaaacagaagagcaggtgcaaaaacttcaagctattctaaagccaatgatgttgagacgtctcaaagaggatgtagaaaagaacttggcccccaaagaagaaactattattgaagttgagctaacaaacattcagaagaaatattaccgagccatccttgagaagaatttcacatttctttccaaaggcggtggtcaagctaacgtacctaacctattaaacactatgatggaattgcggaagtgctgcaatcatccgtaccttatcaatggtgctgaagagaaaattttggaagagtttaaagaaacacacaatgcagagtctccagattttcagctccaggcaatgatccaggctgctggcaagctagtgctgattgacaagctgctgccaaaactgaaggctggtggccacagggtgcttatcttttcccagatggtgcgctgcttggacatactggaagactacctcattcaaagacggtacccatatgaaaggatcgacggccgagtaagaggcaacctccgccaggcagctatcgacagattctccaaacctgattctgataggtttgttttcctcctgtgtacaagggcaggaggtttaggcattaacctcactgctgctgatacctgcatcatctttgattcagactggaatccccaaaatgacctccaggctcaggctagatgtcatagaataggacagagcaaatctgtgaaaatctacaggctgattacaagaaattcctatgaaagggaaatgttcgacaaggctagtttgaaactgggcctggataaagctgtgctacagtctatgagtggaagagaaaatgctaccaatggggtacaacagctttccaagaaagaaatagaggatcttctacgaaaaggggcctatggtgcactcatggatgaggaggatgaagggtctaaattctgtgaagaagatattgatcagatcctcctacgtcgaacccacaccattaccattgagtcagaagggaaaggttccacatttgctaaggccagttttgttgcatctggaaataggacagatatttccttggatgatccaaatttctggcaaaagtgggctaagaaggctgaattggatattgatgccttaaatgggaggaacaacctggttattgatactccaagagtgagaaagcagaccaggctctacagtgcagtgaaggaagatgagctgatggagttctcagacttggaaagtgattctgaagaaaagccctgtgcaaagccacggcgtccccaggataagtcacagggctatgcaaggagtgaatgtttcagggtggagaagaatctgcttgtctatggttggggacggtggacagacattctttcccacggacgctataaacgccaactcactgagcaagatgtagaaaccatctgcagaaccatcctggtgtactgtcttaatcattacaaaggggatgagaatatcaaaagcttcatctgggatctgatcacacccacagcggatggccagactcgagccttggtcaaccattccggtttgtcagctcctgtgccaaggggaaggaagggaaagaaggtgaaagcccagagcacacagccggtggtgcaggatgccgactggctggccagctgcaacccagatgccctgttccaggaggacagctacaagaaacacctgaagcatcactgtaacaaggtcctgctgcgtgtccgcatgctgtactacctaagacaagaagtgataggagaccaggcggataagatcttagagggtgctgactcaagtgaagccgatgtgtggatccctgaacctttccatgctgaagttcctgcagattggtgggataaggaagcagacaaatccctcttaattggagtgttcaaacatggctatgagaagtacaactccatgcgagctgaccccgcgctgtgctttctggaacgagtcggtatgcctgatgccaaggccatagctgccgagcaaagaggaacagacatgctagcagatggtggtgacgggggagaatttgatagagaagatgaagacccagaatataaaccaaccagaacaccgttcaaagatgaaatagatgaatttgcaaattctccttcagaggataaggaagaatccatggaaatacatgccacaggcaagcacagtgagagtaatgctgagttaggccaactttactggcctaacacttcaaccctgactacacgtctgcgccggctcattactgcctatcagcgcagctataaaaggcaacagatgaggcaagaggccctaatgaagactgaccggcgcagacggcggcctcgagaggaagtgagagctctggaagcggaaagggaagctattatatctgagaagcggcaaaagtggacaagaagagaagaggctgatttttaccgtgtggtatccacctttggggttatttttgaccctgtgaaacagcaatttgactggaaccaatttagagcctttgccaggcttgacaaaaaatctgatgagagtttggagaaatacttcagttgttttgtggccatgtgtaggcgagtatgtcgaatgcccgtcaagccagatgatgaaccgcccgacctctcctccataattgagccgatcacagaggagcgagcctctcgaactctgtaccgcattgagctgctacggaagatccgcgagcaggttctccatcacccccagctgggagagaggcttaagctctgccagccaagcttggatctgccagagtggtgggagtgtggacggcatgaccgagacttgctggttggtgctgctaaacacggggtcagtcggacggattatcacatcctcaatgaccctgagttatccttcttggatgcacataaaaactttgctcaaaacagaggggcaggtaatacatcttccttgaacccactggcagttggatttgtccagactcctccagtcatctcatctgctcatattcaagatgagagggtactggaacaagccgaaggcaaagtggaggagcctgaaaacccagctgccaaggagaaatgtgagggcaaagaagaggaagaagaaaccgatggcagcgggaaggagagcaagcaggaatgtgaggcagaggccagctctgtgaaaaatgaactgaaaggggttgaggtcggcgcagacactgggtccaaatctatttcagagaaaggttccgaagaggatgaagaggaaaagctggaggatgacgataagtcggaagagtcttcccagcccgaaggagctgtctctagagggaagaattttgatgaagaaagcaatgcttccatgagcactgctagagatgaaacccgagatggattctacatggaggacggagatccttcagtagctcagctccttcatgaaagaacatttgccttctcgttttggcctaaggatagagtaatgataaaccgcttagacaacatctgtgaagcagtgttgaaaggcaaatggccagtaaataggcgccagatgtttgatttccaaggcctcatcccaggttacacacccaccacagtggacagccccttgcagaagaggagctttgctgagctctccatggtcggccaagccagcattagtgggagtgaggacatcactacgtctcctcagttgtcaaaggaagatgccctcaacctctctgtccctcgccagcggaggaggaggaggagaaaaatcgaaattgaggccgaaagagctgccaagaggcgaaatctcatggagatggttgcccagcttcgagagtctcaggtggtctcagaaaatggacaagaaaaagttgtagatttatcaaaggcctcaagagaggcaacaagctctacctcaaatttttcatctctttcttcaaagtttatcttgcctaatgtctcaacaccagtgtctgatgcctttaagactcaaatggaactgctccaagcaggcctttcgcgcacacccacaaggcatctccttaatggctccctagtggatggagagcctcccatgaagaggaggcggggaaggaggaaaaatgtggagggacttgatctgcttttcatgagccacaaacggacgtcattgagtgcagaggatgctgaggtgaccaaagcttttgaagaagatatagagaccccaccaacaagaaacattccttctcccggacagctggacccagacacacggatccctgttatcaatcttgaagatgggactaggctggtgggggaagatgctcctaaaaataaggatttagttgaatggctgaagctgcaccctacttacactgttgatatgccaagttatgtaccaaagaatgcagatgtgctgttttcctcatttcagaaaccgaaacagaaacgacatagatgtcgaaaccctaataaattggatataaacactttgacaggagaagaaagggtgcctgttgtcaataaacgaaatgggaagaagatgggtggagctatggcgcctccaatgaaggatctacccaggtggctggaagaaaatcctgaatttgcagttgctccagactggactgatatagttaagcagtctggttttgttcctgagtcgatgtttgaccgccttctcactgggcctgtagtgcggggagagggagcgagcagaagaggaagaaggcccaaaagtgagatcgccagagcagccgcggccgccgctgctgtggcctccacgtcagggatcaaccctttgctggtgaacagcctgtttgctggaatggacctgacgagccttcagaatctccagaatctccagtcgctccagctggcaggcctcatgggcttccctccaggactggcaacagctgccaccgccggaggcgatgcgaagaaccctgctgctgtgctgcccctgatgctgccaggaatggcgggcctgcccaacgtgtttggcttgggcgggctgttgaataaccctctgtcagctgctactggaaacaccactactgcttctagtcaaggagaaccggaagacagcacttcaaaaggagaggagaaaggaaatgagaatgaagacgagaacaaagactctgagaaaagcacagatgctgtttcggctgctgactctgcgaatggatctgttggtgctgctactgccccggctggattgccctcaaacccgctagccttcaaccctttcctcctgtccacaatggccccgggcctcttctacccatccatgtttctacctccaggactggggggattgacgctgcctgggttcccagcattggcaggacttcagaatgccgtgggctccagcgaagaaaaggctgctgacaaggctgagggaggaccctttaaagatggagagacccttgaaggcagcgatgccgaggagagcctggataagactgcagagtcctccctcttagaagacgaaatagcacagggtgaagagctagactcacttgatgggggggatgaaatagaaaacaatgaaaatgatgaataaccagtaccagttccagttcaagtgtttaaaacttttgacaagtggtagtcctactgtttacactcacagttaatgttcatacctagttttataagctgttctgtaacatagtgtagcaaaaaaaaaagttcaagtcatgttatacaggtgtgtcaaaaggtatcttggtcattaagtattgtgcagtgcattatttattatccctaggagagatgaaatttgagaggtgatcatgtctttttaaggaaacttacataatgctctgctttttttttttctcttggtaccattggtattataataaagagcaatttgtaactgagtggcactaatggaagaaagtgctgctcaaaggaagtatgaagttatatatttaattttttaattttaatttttaatttttttgctgtgaaggtcaagctgaaatttaccatacatatcatacttgctcatttgtttccctttttgactgtatgggggttcccacactcgtgcatacacacacatccatacactctgacaatctccacgctagtgtgaacgcctctgtcccgaggcgcagcaataataaggcagctgttgaatgtgaagggtccctttggaaaattaacctactgggagggttcttgccagacagaactacagttccattgtctcgtggtcttgtaatgcactggtaaaaacaaaataaatagatgaataaataaagagtgagagaagagagaatcaggtaccttttttaaattaaaggactttgttactttagccacaaagctaaaacagcattacctcagctctaaactagccttgaagtttacagacatgactttgtaaatgtattgtttttctttgttgtgatgtccttttatttttttctttgaaaactgctatcatgtaagataaaatgtaaattgctgccaactgtagtaatgatgcttttaataaaagtgacccatgatatgc

SEQ ID NO: 70 - protein, 2976 aa, Homo sapiens
MADPGMMSLFGEDGNIFSEGLEGLGECGYPENPVNPMGQQMPIDQGFASLQPSLHHPSTNQNQTKLTHFDHYNQYEQQKMHLMDQPNRMMSNTPGNGLDHSQYHTPPVPQVPHGGSGGGQMGVYPGMQNERHGQSFVDSSSMWGPRAVQVPDQIRAPYQQQQPQPQPPQPAPSGPPAQGHPQHMQQMGSYMRDFSMQQHGQPQQRMSQFSQGQEQQGNPFIATSGPGHLSHVPQQSPSMAPSLRHSVQQFHHHPSTALHGESVAHSPRFSPNPPQQGAVRPQTLNFSSRSQTVPSPTINNSGQYSRYPYSNLNQGLVNNTGMNQNLGLTNNTPMNQSVPRYPNAVGFPSNSGQGLMHQQPIHPSGSLNQMNTQTMHPSQPQGTYDPPMSPMKAMSNPAGTPPPQVRPGSAGIPMEVGSYPNMPHPQPSHQPPGAMGIGQRNMGPRNMQQSRPFIGMSSAPRELTGHMRPNGCPGVGLGDPQAIQERLIPGQQHPGQQPSFQQLPTCPPLQPHPGLHHQSSPPHPHHQPWAQLHPSPQNTPQKVPVHQHSPSEPFLEKPVPDMTQVSGPNAQLVKSDDYLPSIEQQPQQKKKKKKNNHIVAEDPSKGFGKDDFPGGVDNQELNRNSLDGSQEEKKKKKRSKAKKDPKEPKEPKEKKEPKEPKTPKAPKIPKEPKEKKAKTATPKPKSSKKSSNKKPDSEASALKKKVNKGKTEGSENSDLDKTPPPSPPPEEDEDPGVQKRRSSRQVKRKRYTEDLEFKISDEEADDADAAGRDSPSNTSQSEQQESVDAEGPVVEKIMSSRSVKKQKESGEEVEIEEFYVKYKNFSYLHCQWASIEDLEKDKRIQQKIKRFKAKQGQNKFLSEIEDELFNPDYVEVDRIMDFARSTDDRGEPVTHYLVKWCSLPYEDSTWERRQDIDQAKIEEFEKLMSREPETERVERPPADDWKKSESSREYKNNNKLREYQLEGVNWLLFNWYNMRNCILADEMGLGKTIQSITFLYEIYLKGIHGPFLVIAPLSTIPNWEREFRTWTELNVVVYHGSQASRRTIQLYEMYFKDPQGRVIKGSYKFHAIITTFEMILTDCPELRNIPWRCVVIDEAHRLKNRNCKLLEGLKMMDLEHKVLLTGTPLQNTVEELFSLLHFLEPSRFPSETTFMQEFGDLKTEEQVQKLQAILKPMMLRRLKEDVEKNLAPKEETIIEVELTNIQKKYYRAIKNFTFLSKGGGQANVPNLLNTMMELRKCCNHPYLINGAEEKIEFKETHNAESPDFQLQAMIQAAGKLVLIDKLLPKLKAGGHRVLIFSQMVRCLDIDYLIQRRYPYERIDGRVRGNLRQAAIDRFSKPDSDRFVFLLCTRAGGLGINLTAADTCIIFDSDWNPQNDLQAQARCHRIGQSKSVKIYRLITRNSYEREMFDKASLKLGLDKAVLQSMSGRENATNGVQQLSKKEIEDLLRKGAYGALMDEEDEGSKFCEEDIDQILLRRTHTITIESEGKGSTFAKASFVASGNRTDISLDDPNFWQKWAKKAELDIDALNGRNNLVIDTPRVRKQTRKAVKEDELMEFSDLESDSEEKPCAKPRRPQDKSQGYARSECFRVEKNLLVYGWGRWTDILSHGRYKRQLTEQDVETICRTILVYCLNHYKGDENIKSFIWDLITPTADGQTRALVNHSGLSAPVPRGRKGKKVKAQSTQPVVQDADWLASCNPDALFQEDSYKKHLKHHCNKVLLRVRMLYYLRQEVIGDQADKIGADSSEADVWIPEPFHAEVPADWWDKEADKSLLIGVFKHGYEKYNSMRADPALCFLERVGMPDAKAIAAEQRGTDMLADGGDGGEFDREDEDPEYKPTRTPFKDEIDEFANSPSEDKEESMEIHATGKHSESNAELGQLYWPNTSTLTTRLRRLITAYQRSYKRQQMRQEALMKTDRRRRRPREEVRALEAEREAIISEKRQKWTRREEADFYRVVSTFGVIFDPVKQQFDWNQFRAFARLDKKSDESLEKYFSCFVAMCRRVCRMPVKPDDEPPDLSSIIEPITEERASRTLYRIELLRKIREQVLHHPQLGERLKLCQPSLDLPEWWECGRHDRDLLVGAAKHGVSRTDYHILNDPELSFLDAHKNFAQNRGAGNTSSLNPLAVGFVQTPPVISSAHIQDERVLEQAEGKVEEPENPAAKEKCEGKEEEEETDGSGKESKQECEAEASSVKNELKGVEVGADTGSKSISEKGSEEDEEEKLEDDDKSEESSQPEGAVSRGKNFDEESNASMSTARDETRDGFYMEDGDPSVAQLLHERTFAFSFWPKDRVMINRLDNICEAVLKGKWPVNRRQMFDFQGLIPGYTPTTVDSPLQKRSFAELSMVGQASISGSEDITTSPQLSKEDALNLSVPRQRRRRRRKIEIEAERAAKRRNLMEMVAQLRESQVVSENGQEKVVDLSKASREATSSTSNFSSLSSKFILPNVSTPVSDAFKTQMELLQAGLSRTPTRHLLNGSLVDGEPPMKRRRGRRKNVEGLDLLFMSHKRTSLSAEDAEVTKAFEEDIETPPTRNIPSPGQLDPDTRIPVINLEDGTRLVGEDAPKNKDLVEWLKLHPTYTVDMPSYVPKNADVLFSSFQKPKQKRHRCRNPNKLDINTLTGEERVPVVNKRNGKKMGGAMAPPMKDLPRWLEENPEFAVAPDWTDIVKQSGFVPESMFDRLLTGPVVRGEGASRRGRRPKSEIARAAAAAAAVASTSGINPLLVNSLFAGMDLTSLQNLQNLQSLQLAGLMGFPPGLATAATAGGDAKNPAAVLPLMLPGMAGLPNVFGLGGLLNNPLSAATGNTTTASSQGEPEDSTSKGEEKGNENEDENKDSEKSTDAVSAADSANGSVGAATAPAGLPSNPLAFNPFLLSTMAPGLFYPSMFLPPGLGGLTLPGFPAGLQNAVGSSEEKAADKAEGGPFKDGETLEGSDAEESLDKTAESSLLEDEIAQGEELDSLDGGDEIENNENDE

SEQ ID NO: 71 - DNA, 10402 bp, Homo sapiens
gcgggggttgagtcgtggtggtgcggacgcgctcgtgctcgggaactatcggattaaacttgaatcgagtgaaattacacaaaggagcgccgcggaggaggcggcccggggacccggacaccctgaaactcaccagagacccgttcgcccccggccaactccgtgcccgtggattcagccccctggccgcagctgccgagccaactccggagcccgctctgcgttttgttttcccctcggcactaggcagcggaggagcccgaccgacccggacctatatccagactttgcctgacactgcagggtccaagagaattaaagaaatatggaatgacatgaagaagattagttaaggattataggctttgagggcaaacacctcagtgaagtgaagcacaggcaagctcctgagctgtggtttggaggagccgtgtgttggaagaagatggcagatccaggaatgatgagtctttttggcgaggatgggaatattttcagtgaaggtcttgaaggcctcggagaatgtggttacccggaaaatccagtaaatcctatgggtcagcaaatgccaatagaccaaggctttgcctctttacagccatcccttcatcatccttcaactaatcaaaatcaaacaaagctgacacattttgatcactataatcagtatgaacaacaaaagatgcatctgatggatcagccgaacagaatgatgagcaacacccctgggaacggactcgcgtctccgcactcgcagtatcacacccctcccgttcctcaggtgccccatggtggcagtggtggcggtcagatgggtgtctaccctggcatgcagaatgagaggcatgggcaatcctttgtggacagcagctccatgtggggccccagggctgttcaggtaccagaccagatacgagccccctaccagcagcagcagccacagccgcagccaccgcagccggctccgtcggggccccctgcacagggccaccctcagcacatgcagcagatgggcagctatatggcacgtggggatttttccatgcagcagcatggtcagccacagcagaggatgagccagttttcccaaggccaagagggcctcaatcagggaaatccttttattgccacctcaggacctggccacttgtcccacgtgccccagcagagtcccagcatggcaccttccttgcgtcactcggtgcagcagttccatcaccacccctctactgctctccatggagaatccgttgcccacagtcccagattctccccgaatcctccccaacaaggggctgttaggccgcaaacccttaactttagttctcggagccagacagtcccctctcctactataaacaactcagggcagtattctcgatatccttacagtaacctaaatcagggattagttaacaatacagggatgaatcaaaatttaggccttacaaataatactccaatgaatcagtccgtaccaagataccccaatgctgtaggattcccatcaaacagtggtcaaggactaatgcaccagcagcccatccaccccagtggctcacttaaccaaatgaacacacaaactatgcatccttcacagcctcagggaacttatgcctctccacctcccatgtcacccatgaaagcaatgagtaatccagcaggcactcctcctccacaagtcaggccgggaagtgctgggataccaatggaagttggcagttatccaaatatgccccatcctcagccatctcaccagccccctggtgccatgggaatcggacagaggaatatgggccccagaaacatgcagcagtctcgtccatttataggcatgtcctcggcaccaagggaattgactgggcacatgaggccaaatggttgtcctggtgttggccttggagacccacaagcaatccaggaacgactgatacctggccaacaacatcctggtcaacagccatcttttcagcagttgccaacctgtcctccactgcagcctcacccgggcttgcaccaccagtcttcacctccacaccctcatcaccagccttgggcacagctccacccatcaccccagaacaccccgcagaaagtgcctgtgcatcagcattccccgtcggagccctttctagagaaaccagtgccggatatgactcaggttagtggaccgaatgctcagctagtgaagagtgatgattacctgccatcaatagaacagcagccacaacaaaagaagaagaaaaagaaaaacaaccacattgtagcagaggatcccagtaaaggttttggtaaagatgacttccctggtggggtagataaccaagaactaaataggaactcactggatgggtcccaagaagaaaaaaagaaaaagaaaaggtcaaaggcaaaaaaagacccgaaggaaccgaaagaacccaaggagaaaaaagagcccaaggaacccaagaccccgaaagcccctaagattcccaaagagccaaaggaaaagaaagcaaaaactgccacgccaaaacccaaatccagcaaaaagtcaagtaataagaaacctgactcagaagcaagtgctttgaagaaaaaggtcaacaagggaaaaacagaaggttctgaaaattcagacttagacaaaacacccccaccatctcctcctcctgaagaagatgaggacccaggtgttcagaagagacggtccagcagacaggtgaagagaaagcgctacactgaagacctggagttcaagatttctgatgaggaggcagatgatgcagatgctgctgggagggattccccctccaacacctcccagtcagaacagcaggaatctgttgatgcagaaggcccagtggtagaaaaaattatgagcagtcgttcagtaaaaaagcagaaggaatctggagaggaggtagaaattgaggaattctatgtgaaatacaaaaacttctcttatcttcattgtcagtgggcatctatagaagatctggaaaaagataagagaattcagcaaaaaattaaacgatttaaggcaaagcagggccagaacaagttcctttcagagattgaggatgagctttttaatccagattatgtggaggttgaccggataatggactttgcacgtagcacagatgaccggggagagcctgtgactcactatctggtgaagtggtgttcacttccttatgaagacagcacgtgggagcggaggcaggacatagatcaagcaaagatcgaggagtttgagaaactaatgtccagggagccggaaacagagcgtgtggagcgacctcctgctgatgattggaagaaatcggagagttccagggagtataaaaacaataacaaactcagggaataccagttggagggagtaaactggctacttttcaattggtacaacatgcgaaactgcattttagcagatgaaatgggtttgggaaaaactatccagtccattacatttctctatgagatatatttgaaaggaatccatggcccttttttagtaattgccccattgtccacaatccccaactgggaaagggaattccgaacctggacagagttgaacgtggttgtgtatcatgggagtcaagctagtcgtcggaccattcagttgtatgaaatgtacttcaaagatccccagggtcgagtgataaaggggtcctataagtttcatgccatcatcactacatttgagatgattttgactgattgtcctgagctgcggaatattccatggcgctgtgtagtcattgatgaagcccacaggctgaagaacaggaactgcaagctgttggagggactcaagatgatggacttggaacacaaagtgctgctgacgggaaccccactccagaacactgtggaagaactcttcagcttgcttcatttcttggaaccaagtcgcttcccttcagaaaccacatttatgcaagaatttggtgatctaaaaacagaagagcaggtgcaaaaacttcaagctattctaaagccaatgatgttgagacgtctcaaagaggatgtagaaaagaacttggcccccaaagaagaaactattattgaagttgagctaacaaacattcagaagaaatattaccgagccatccttgagaagaatttcacatttctttccaaaggcggtggtcaagctaacgtacctaacctattaaacactatgatggaattgcggaagtgctgcaatcatccgtaccttatcaatggtgctgaagagaaaattttggaagagtttaaagaaacacacaatgcagagtctccagattttcagctccaggcaatgatccaggctgctggcaagctagtgctgattgacaagctgctgccaaaactgaaggctggtggccacagggtgcttatcttttcccagatggtgcgctgcttggacatactggaagactacctcattcaaagacggtacccatatgaaaggatcgacggccgagtaagaggcaacctccgccaggcagctatcgacagattctccaaacctgattctgataggtttgttttcctcctgtgtacaagggcaggaggtttaggcattaacctcactgctgctgatacctgcatcatctttgattcagactggaatccccaaaatgacctccaggctcaggctagatgtcatagaataggacagagcaaatctgtgaaaatctacaggctgattacaagaaattcctatgaaagggaaatgttcgacaaggctagtttgaaactgggcctggataaagctgtgctacagtctatgagtggaagagaaaatgctaccaatggggtacaacagctttccaagaaagaaatagaggatcttctacgaaaaggggcctatggtgcactcatggatgaggaggatgaagggtctaaattctgtgaagaagatattgatcagatcctcctacgtcgaacccacaccattaccattgagtcagaagggaaaggttccacatttgctaaggccagttttgttgcatctggaaataggacagatatttccttggatgatccaaatttctggcaaaagtgggctaagaaggctgaattggatattgatgccttaaatgggaggaacaacctggttattgatactccaagagtgagaaagcagaccaggctctacagtgcagtgaaggaagatgagctgatggagttctcagacttggaaagtgattctgaagaaaagccctgtgcaaagccacggcgtccccaggataagtcacagggctatgcaaggagtgaatgtttcagggtggagaagaatctgcttgtctatggttggggacggtggacagacattctttcccacggacgctataaacgccaactcactgagcaagatgtagaaaccatctgcagaaccatcctggtgtactgtcttaatcattacaaaggggatgagaatatcaaaagcttcatctgggatctgatcacacccacagcggatggccagactcgagccttggtcaaccattccggtttgtcagctcctgtgccaaggggaaggaagggaaagaaggtgaaagcccagagcacacagccggtggtgcaggatgccgactggctggccagctgcaacccagatgccctgttccaggaggacagctacaagaaacacctgaagcatcactgtaacaaggtcctgctgcgtgtccgcatgctgtactacctaagacaagaagtgataggagaccaggcggataagatcttagagggtgctgactcaagtgaagccgatgtgtggatccctgaacctttccatgctgaagttcctgcagattggtgggataaggaagcagacaaatccctcttaattggagtgttcaaacatggctatgagaagtacaactccatgcgagctgaccccgcgctgtgctttctggaacgagtcggtatgcctgatgccaaggccatagctgccgagcaaagaggaacagacatgctagcagatggtggtgacgggggagaatttgatagagaagatgaagacccagaatataaaccaaccagaacaccgttcaaagatgaaatagatgaatttgcaaattctccttcagaggataaggaagaatccatggaaatacatgccacaggcaagcacagtgagagtaatgctgagttaggccaactttactggcctaacacttcaaccctgactacacgtctgcgccggctcattactgcctatcagcgcagctataaaaggcaacagatgaggcaagaggccctaatgaagactgaccggcgcagacggcggcctcgagaggaagtgagagctctggaagcggaaagggaagctattatatctgagaagcggcaaaagtggacaagaagagaagaggctgatttttaccgtgtggtatccacctttggggttatttttgaccctgtgaaacagcaatttgactggaaccaatttagagcctttgccaggcttgacaaaaaatctgatgagagtttggagaaatacttcagttgttttgtggccatgtgtaggcgagtatgtcgaatgcccgtcaagccagatgatgaaccgcccgacctctcctccataattgagccgatcacagaggagcgagcctctcgaactctgtaccgcattgagctgctacggaagatccgcgagcaggttctccatcacccccagctgggagagaggcttaagctctgccagccaagcttggatctgccagagtggtgggagtgtggacggcatgaccgagacttgctggttggtgctgctaaacacggggtcagtcggacggattatcacatcctcaatgaccctgagttatccttcttggatgcacataaaaactttgctcaaaacagaggggcaggtaatacatcttccttgaacccactggcagttggatttgtccagactcctccagtcatctcatctgctcatattcaagatgagagggtactggaacaagccgaaggcaaagtggaggagcctgaaaacccagctgccaaggagaaatgtgagggcaaagaagaggaagaagaaaccgatggcagcgggaaggagagcaagcaggaatgtgaggcagaggccagctctgtgaaaaatgaactgaaaggggttgaggtcggcgcagacactgggtccaaatctatttcagagaaaggttccgaagaggatgaagaggaaaagctggaggatgacgataagtcggaagagtcttcccagcccgaagcaggagctgtctctagagggaagaattttgatgaagaaagcaatgcttccatgagcactgctagagatgaaacccgagatggattctacatggaggacggagatccttcagtagctcagctccttcatgaaagaacatttgccttctcgttttggcctaaggatagagtaatgataaaccgcttagacaacatctgtgaagcagtgttgaaaggcaaatggccagtaaataggcgccagatgtttgatttccaaggcctcatcccaggttacacacccaccacagtggacagccccttgcagaagaggagctttgctgagctctccatggtcggccaagccagcattagtgggagtgaggacatcactacgtctcctcagttgtcaaaggaagatgccctcaacctctctgtccctcgccagcggaggaggaggaggagaaaaatcgaaattgaggccgaaagagctgccaagaggcgaaatctcatggagatggttgcccagcttcgagagtctcaggtggtctcagaaaatggacaagaaaaagttgtagatttatcaaaggcctcaagagaggcaacaagctctacctcaaatttttcatctctttcttcaaagtttatcttgcctaatgtctcaacaccagtgtctgatgcctttaagactcaaatggaactgctccaagcaggcctttcgcgcacacccacaaggcatctccttaatggctccctagtggatggagagcctcccatgaagaggaggcggggaaggaggaaaaatgtggagggacttgatctgcttttcatgagccacaaacggacgtcattgagtgcagaggatgctgaggtgaccaaagcttttgaagaagatatagagaccccaccaacaagaaacattccttctcccggacagctggacccagacacacggatccctgttatcaatcttgaagatgggactaggctggtgggggaagatgctcctaaaaataaggatttagttgaatggctgaagctgcaccctacttacactgttgatatgccaagttatgtaccaaagaatgcagatgtgctgttttcctcatttcagaaaccgaaacagaaacgacatagatgtcgaaaccctaataaattggatataaacactttgacaggagaagaaagggtgcctgttgtcaataaacgaaatgggaagaagatgggtggagctatggcgcctccaatgaaggatctacccaggtggctggaagaaaatcctgaatttgcagttgctccagactggactgatatagttaagcagtctggttttgttcctgagtcgatgtttgaccgccttctcactgggcctgtagtgcggggagagggagcgagcagaagaggaagaaggcccaaaagtgagatcgccagagcagccgcggccgccgctgctgtggcctccacgtcagggatcaaccctttgctggtgaacagcctgtttgctggaatggacctgacgagccttcagaatctccagaatctccagtcgctccagctggcaggcctcatgggcttccctccaggactggcaacagctgccaccgccggaggcgatgcgaagaaccctgctgctgtgctgcccctgatgctgccaggaatggcgggcctgcccaacgtgtttggcttgggcgggctgttgaataaccctctgtcagctgctactggaaacaccactactgcttctagtcaaggagaaccggaagacagcacttcaaaaggagaggagaaaggaaatgagaatgaagacgagaacaaagactctgagaaaagcacagatgctgtttcggctgctgactctgcgaatggatctgttggtgctgctactgccccggctggattgccctcaaacccgctagccttcaaccctttcctcctgtccacaatggccccgggcctcttctacccatccatgtttctacctccaggactggggggattgacgctgcctgggttcccagcattggcaggacttcagaatgccgtgggctccagcgaagaaaaggctgctgacaaggctgagggaggaccctttaaagatggagagacccttgaaggcagcgatgccgaggagagcctggataagactgcagagtcctccctcttagaagacgaaatagcacagggtgaagagctagactcacttgatgggggggatgaaatagaaaacaatgaaaatgatgaataaccagtaccagttccagttcaagtgtttaaaacttttgacaagtggtagtcctactgtttacactcacagttaatgttcatacctagttttataagctgttctgtaacatagtgtagcaaaaaaaaaagttcaagtcatgttatacaggtgtgtcaaaaggtatcttggtcattaagtattgtgcagtgcattatttattatccctaggagagatgaaatttgagaggtgatcatgtctttttaaggaaacttacataatgctctgctttttttttttctcttggtaccattggtattataataaagagcaatttgtaactgagtggcactaatggaagaaagtgctgctcaaaggaagtatgaagttatatatttaattttttaattttaatttttaatttttttgctgtgaaggtcaagctgaaatttaccatacatatcatacttgctcatttgtttccctttttgactgtatgggggttcccacactcgtgcatacacacacatccatacactctgacaatctccacgctagtgtgaacgcctctgtcccgaggcgcagcaataataaggcagctgttgaatgtgaagggtccctttggaaaattaacctactgggagggttcttgccagacagaactacagttccattgtctcgtggtcttgtaatgcactggtaaaaacaaaataaatagatgaataaataaagagtgagagaagagagaatcaggtaccttttttaaattaaaggactttgttactttagccacaaagctaaaacagcattacctcagctctaaactagccttgaagtttacagacatgactttgtaaatgtattgtttttctttgttgtgatgtccttttatttttttctttgaaaactgctatcatgtaagataaaatgtaaattgctgccaactgtagtaatgatgcttttaataaaagtgacccatgatatgc

SEQ ID NO: 72 - protein, 2977 aa, Homo sapiens
MADPGMMSLFGEDGNIFSEGLEGLGECGYPENPVNPMGQQMPIDQGFASLQPSLHHPSTNQNQTKLTHFDHYNQYEQQKMHLMDQPNRMMSNTPGNGLDHSQYHTPPVPQVPHGGSGGGQMGVYPGMQNERHGQSFVDSSSMWGPRAVQVPDQIRAPYQQQQPQPQPPQPAPSGPPAQGHPQHMQQMGSYMRDFSMQQHGQPQQRMSQFSQGQEQQGNPFIATSGPGHLSHVPQQSPSMAPSLRHSVQQFHHHPSTALHGESVAHSPRFSPNPPQQGAVRPQTLNFSSRSQTVPSPTINNSGQYSRYPYSNLNQGLVNNTGMNQNLGLTNNTPMNQSVPRYPNAVGFPSNSGQGLMHQQPIHPSGSLNQMNTQTMHPSQPQGTYDPPMSPMKAMSNPAGTPPPQVRPGSAGIPMEVGSYPNMPHPQPSHQPPGAMGIGQRNMGPRNMQQSRPFIGMSSAPRELTGHMRPNGCPGVGLGDPQAIQERLIPGQQHPGQQPSFQQLPTCPPLQPHPGLHHQSSPPHPHHQPWAQLHPSPQNTPQKVPVHQHSPSEPFLEKPVPDMTQVSGPNAQLVKSDDYLPSIEQQPQQKKKKKKNNHIVAEDPSKGFGKDDFPGGVDNQELNRNSLDGSQEEKKKKKRSKAKKDPKEPKEPKEKKEPKEPKTPKAPKIPKEPKEKKAKTATPKPKSSKKSSNKKPDSEASALKKKVNKGKTEGSENSDLDKTPPPSPPPEEDEDPGVQKRRSSRQVKRKRYTEDLEFKISDEEADDADAAGRDSPSNTSQSEQQESVDAEGPVVEKIMSSRSVKKQKESGEEVEIEEFYVKYKNFSYLHCQWASIEDLEKDKRIQQKIKRFKAKQGQNKFLSEIEDELFNPDYVEVDRIMDFARSTDDRGEPVTHYLVKWCSLPYEDSTWERRQDIDQAKIEEFEKLMSREPETERVERPPADDWKKSESSREYKNNNKLREYQLEGVNWLLFNWYNMRNCILADEMGLGKTIQSITFLYEIYLKGIHGPFLVIAPLSTIPNWEREFRTWTELNVVVYHGSQASRRTIQLYEMYFKDPQGRVIKGSYKFHAIITTFEMILTDCPELRNIPWRCVVIDEAHRLKNRNCKLLEGLKMMDLEHKVLLTGTPLQNTVEELFSLLHFLEPSRFPSETTFMQEFGDLKTEEQVQKLQAILKPMMLRRLKEDVEKNLAPKEETIIEVELTNIQKKYYRAIKNFTFLSKGGGQANVPNLLNTMMELRKCCNHPYLINGAEEKIEFKETHNAESPDFQLQAMIQAAGKLVLIDKLLPKLKAGGHRVLIFSQMVRCLDIDYLIQRRYPYERIDGRVRGNLRQAAIDRFSKPDSDRFVFLLCTRAGGLGINLTAADTCIIFDSDWNPQNDLQAQARCHRIGQSKSVKIYRLITRNSYEREMFDKASLKLGLDKAVLQSMSGRENATNGVQQLSKKEIEDLLRKGAYGALMDEEDEGSKFCEEDIDQILLRRTHTITIESEGKGSTFAKASFVASGNRTDISLDDPNFWQKWAKKAELDIDALNGRNNLVIDTPRVRKQTRKAVKEDELMEFSDLESDSEEKPCAKPRRPQDKSQGYARSECFRVEKNLLVYGWGRWTDILSHGRYKRQLTEQDVETICRTILVYCLNHYKGDENIKSFIWDLITPTADGQTRALVNHSGLSAPVPRGRKGKKVKAQSTQPVVQDADWLASCNPDALFQEDSYKKHLKHHCNKVLLRVRMLYYLRQEVIGDQADKIGADSSEADVWIPEPFHAEVPADWWDKEADKSLLIGVFKHGYEKYNSMRADPALCFLERVGMPDAKAIAAEQRGTDMLADGGDGGEFDREDEDPEYKPTRTPFKDEIDEFANSPSEDKEESMEIHATGKHSESNAELGQLYWPNTSTLTTRLRRLITAYQRSYKRQQMRQEALMKTDRRRRRPREEVRALEAEREAIISEKRQKWTRREEADFYRVVSTFGVIFDPVKQQFDWNQFRAFARLDKKSDESLEKYFSCFVAMCRRVCRMPVKPDDEPPDLSSIIEPITEERASRTLYRIELLRKIREQVLHHPQLGERLKLCQPSLDLPEWWECGRHDRDLLVGAAKHGVSRTDYHILNDPELSFLDAHKNFAQNRGAGNTSSLNPLAVGFVQTPPVISSAHIQDERVLEQAEGKVEEPENPAAKEKCEGKEEEEETDGSGKESKQECEAEASSVKNELKGVEVGADTGSKSISEKGSEEDEEEKLEDDDKSEESSQPEAGAVSRGKNFDEESNASMSTARDETRDGFYMEDGDPSVAQLLHERTFAFSFWPKDRVMINRLDNICEAVLKGKWPVNRRQMFDFQGLIPGYTPTTVDSPLQKRSFAELSMVGQASISGSEDITTSPQLSKEDALNLSVPRQRRRRRRKIEIEAERAAKRRNLMEMVAQLRESQVVSENGQEKVVDLSKASREATSSTSNFSSLSSKFILPNVSTPVSDAFKTQMELLQAGLSRTPTRHLLNGSLVDGEPPMKRRRGRRKNVEGLDLLFMSHKRTSLSAEDAEVTKAFEEDIETPPTRNIPSPGQLDPDTRIPVINLEDGTRLVGEDAPKNKDLVEWLKLHPTYTVDMPSYVPKNADVLFSSFQKPKQKRHRCRNPNKLDINTLTGEERVPVVNKRNGKKMGGAMAPPMKDLPRWLEENPEFAVAPDWTDIVKQSGFVPESMFDRLLTGPVVRGEGASRRGRRPKSEIARAAAAAAAVASTSGINPLLVNSLFAGMDLTSLQNLQNLQSLQLAGLMGFPPGLATAATAGGDAKNPAAVLPLMLPGMAGLPNVFGLGGLLNNPLSAATGNTTTASSQGEPEDSTSKGEEKGNENEDENKDSEKSTDAVSAADSANGSVGAATAPAGLPSNPLAFNPFLLSTMAPGLFYPSMFLPPGLGGLTLPGFPAGLQNAVGSSEEKAADKAEGGPFKDGETLEGSDAEESLDKTAESSLLEDEIAQGEELDSLDGGDEIENNENDE

SEQ ID NO: 73 - DNA, 10444 bp, Homo sapiens
gcgggggttgagtcgtggtggtgcggacgcgctcgtgctcgggaactatcggattaaacttgaatcgagtgaaattacacaaaggagcgccgcggaggaggcggcccggggacccggacaccctgaaactcaccagagacccgttcgcccccggccaactccgtgcccgtggattcagccccctggccgcagctgccgagccaactccggagcccgctctgcgttttgttttcccctcggcactaggcagcggaggagcccgaccgacccggacctatatccagactttgcctgacactgcagggtccaagagaattaaagaaatatggaatgacatgaagaagattagttaaggattataggctttgagggcaaacacctcagtgaagtgaagcacaggcaagctcctgagctgtggtttggaggagccgtgtgttggaagaagatggcagatccaggaatgatgagtctttttggcgaggatgggaatattttcagtgaaggtcttgaaggcctcggagaatgtggttacccggaaaatccagtaaatcctatgggtcagcaaatgccaatagaccaaggctttgcctctttacagccatcccttcatcatccttcaactaatcaaaatcaaacaaagctgacacattttgatcactataatcagtatgaacaacaaaagatgcatctgatggatcagccgaacagaatgatgagcaacacccctgggaacggactcgcgtctccgcactcgcagtatcacacccctcccgttcctcaggtgccccatggtggcagtggtggcggtcagatgggtgtctaccctggcatgcagaatgagaggcatgggcaatcctttgtggacagcagctccatgtggggccccagggctgttcaggtaccagaccagatacgagccccctaccagcagcagcagccacagccgcagccaccgcagccggctccgtcggggccccctgcacagggccaccctcagcacatgcagcagatgggcagctatatggcacgtggggatttttccatgcagcagcatggtcagccacagcagaggatgagccagttttcccaaggccaagagggcctcaatcagggaaatccttttattgccacctcaggacctggccacttgtcccacgtgccccagcagagtcccagcatggcaccttccttgcgtcactcggtgcagcagttccatcaccacccctctactgctctccatggagaatccgttgcccacagtcccagattctccccgaatcctccccaacaaggggctgttaggccgcaaacccttaactttagttctcggagccagacagtcccctctcctactataaacaactcagggcagtattctcgatatccttacagtaacctaaatcagggattagttaacaatacagggatgaatcaaaatttaggccttacaaataatactccaatgaatcagtccgtaccaagataccccaatgctgtaggattcccatcaaacagtggtcaaggactaatgcaccagcagcccatccaccccagtggctcacttaaccaaatgaacacacaaactatgcatccttcacagcctcagggaacttatgcctctccacctcccatgtcacccatgaaagcaatgagtaatccagcaggcactcctcctccacaagtcaggccgggaagtgctgggataccaatggaagttggcagttatccaaatatgccccatcctcagccatctcaccagccccctggtgccatgggaatcggacagaggaatatgggccccagaaacatgcagcagtctcgtccatttataggcatgtcctcggcaccaagggaattgactgggcacatgaggccaaatggttgtcctggtgttggccttggagacccacaagcaatccaggaacgactgatacctggccaacaacatcctggtcaacagccatcttttcagcagttgccaacctgtcctccactgcagcctcacccgggcttgcaccaccagtcttcacctccacaccctcatcaccagccttgggcacagctccacccatcaccccagaacaccccgcagaaagtgcctgtgcatcagcattccccgtcggagccctttctagagaaaccagtgccggatatgactcaggttagtggaccgaatgctcagctagtgaagagtgatgattacctgccatcaatagaacagcagccacaacaaaagaagaagaaaaagaaaaacaaccacattgtagcagaggatcccagtaaaggttttggtaaagatgacttccctggtggggtagataaccaagaactaaataggaactcactggatgggtcccaagaagaaaaaaagaaaaagaaaaggtcaaaggcaaaaaaagacccgaaggaaccgaaagaacccaaggagaaaaaagagcccaaggaacccaagaccccgaaagcccctaagattcccaaagagccaaaggaaaagaaagcaaaaactgccacgccaaaacccaaatccagcaaaaagtcaagaaacacattaaaagtgaacactaagcgatccactttgaattctagtaataagaaacctgactcagaagcaagtgctttgaagaaaaaggtcaacaagggaaaaacagaaggttctgaaaattcagacttagacaaaacacccccaccatctcctcctcctgaagaagatgaggacccaggtgttcagaagagacggtccagcagacaggtgaagagaaagcgctacactgaagacctggagttcaagatttctgatgaggaggcagatgatgcagatgctgctgggagggattccccctccaacacctcccagtcagaacagcaggaatctgttgatgcagaaggcccagtggtagaaaaaattatgagcagtcgttcagtaaaaaagcagaaggaatctggagaggaggtagaaattgaggaattctatgtgaaatacaaaaacttctcttatcttcattgtcagtgggcatctatagaagatctggaaaaagataagagaattcagcaaaaaattaaacgatttaaggcaaagcagggccagaacaagttcctttcagagattgaggatgagctttttaatccagattatgtggaggttgaccggataatggactttgcacgtagcacagatgaccggggagagcctgtgactcactatctggtgaagtggtgttcacttccttatgaagacagcacgtgggagcggaggcaggacatagatcaagcaaagatcgaggagtttgagaaactaatgtccagggagccggaaacagagcgtgtggagcgacctcctgctgatgattggaagaaatcggagagttccagggagtataaaaacaataacaaactcagggaataccagttggagggagtaaactggctacttttcaattggtacaacatgcgaaactgcattttagcagatgaaatgggtttgggaaaaactatccagtccattacatttctctatgagatatatttgaaaggaatccatggcccttttttagtaattgccccattgtccacaatccccaactgggaaagggaattccgaacctggacagagttgaacgtggttgtgtatcatgggagtcaagctagtcgtcggaccattcagttgtatgaaatgtacttcaaagatccccagggtcgagtgataaaggggtcctataagtttcatgccatcatcactacatttgagatgattttgactgattgtcctgagctgcggaatattccatggcgctgtgtagtcattgatgaagcccacaggctgaagaacaggaactgcaagctgttggagggactcaagatgatggacttggaacacaaagtgctgctgacgggaaccccactccagaacactgtggaagaactcttcagcttgcttcatttcttggaaccaagtcgcttcccttcagaaaccacatttatgcaagaatttggtgatctaaaaacagaagagcaggtgcaaaaacttcaagctattctaaagccaatgatgttgagacgtctcaaagaggatgtagaaaagaacttggcccccaaagaagaaactattattgaagttgagctaacaaacattcagaagaaatattaccgagccatccttgagaagaatttcacatttctttccaaaggcggtggtcaagctaacgtacctaacctattaaacactatgatggaattgcggaagtgctgcaatcatccgtaccttatcaatggtgctgaagagaaaattttggaagagtttaaagaaacacacaatgcagagtctccagattttcagctccaggcaatgatccaggctgctggcaagctagtgctgattgacaagctgctgccaaaactgaaggctggtggccacagggtgcttatcttttcccagatggtgcgctgcttggacatactggaagactacctcattcaaagacggtacccatatgaaaggatcgacggccgagtaagaggcaacctccgccaggcagctatcgacagattctccaaacctgattctgataggtttgttttcctcctgtgtacaagggcaggaggtttaggcattaacctcactgctgctgatacctgcatcatctttgattcagactggaatccccaaaatgacctccaggctcaggctagatgtcatagaataggacagagcaaatctgtgaaaatctacaggctgattacaagaaattcctatgaaagggaaatgttcgacaaggctagtttgaaactgggcctggataaagctgtgctacagtctatgagtggaagagaaaatgctaccaatggggtacaacagctttccaagaaagaaatagaggatcttctacgaaaaggggcctatggtgcactcatggatgaggaggatgaagggtctaaattctgtgaagaagatattgatcagatcctcctacgtcgaacccacaccattaccattgagtcagaagggaaaggttccacatttgctaaggccagttttgttgcatctggaaataggacagatatttccttggatgatccaaatttctggcaaaagtgggctaagaaggctgaattggatattgatgccttaaatgggaggaacaacctggttattgatactccaagagtgagaaagcagaccaggctctacagtgcagtgaaggaagatgagctgatggagttctcagacttggaaagtgattctgaagaaaagccctgtgcaaagccacggcgtccccaggataagtcacagggctatgcaaggagtgaatgtttcagggtggagaagaatctgcttgtctatggttggggacggtggacagacattctttcccacggacgctataaacgccaactcactgagcaagatgtagaaaccatctgcagaaccatcctggtgtactgtcttaatcattacaaaggggatgagaatatcaaaagcttcatctgggatctgatcacacccacagcggatggccagactcgagccttggtcaaccattccggtttgtcagctcctgtgccaaggggaaggaagggaaagaaggtgaaagcccagagcacacagccggtggtgcaggatgccgactggctggccagctgcaacccagatgccctgttccaggaggacagctacaagaaacacctgaagcatcactgtaacaaggtcctgctgcgtgtccgcatgctgtactacctaagacaagaagtgataggagaccaggcggataagatcttagagggtgctgactcaagtgaagccgatgtgtggatccctgaacctttccatgctgaagttcctgcagattggtgggataaggaagcagacaaatccctcttaattggagtgttcaaacatggctatgagaagtacaactccatgcgagctgaccccgcgctgtgctttctggaacgagtcggtatgcctgatgccaaggccatagctgccgagcaaagaggaacagacatgctagcagatggtggtgacgggggagaatttgatagagaagatgaagacccagaatataaaccaaccagaacaccgttcaaagatgaaatagatgaatttgcaaattctccttcagaggataaggaagaatccatggaaatacatgccacaggcaagcacagtgagagtaatgctgagttaggccaactttactggcctaacacttcaaccctgactacacgtctgcgccggctcattactgcctatcagcgcagctataaaaggcaacagatgaggcaagaggccctaatgaagactgaccggcgcagacggcggcctcgagaggaagtgagagctctggaagcggaaagggaagctattatatctgagaagcggcaaaagtggacaagaagagaagaggctgatttttaccgtgtggtatccacctttggggttatttttgaccctgtgaaacagcaatttgactggaaccaatttagagcctttgccaggcttgacaaaaaatctgatgagagtttggagaaatacttcagttgttttgtggccatgtgtaggcgagtatgtcgaatgcccgtcaagccagatgatgaaccgcccgacctctcctccataattgagccgatcacagaggagcgagcctctcgaactctgtaccgcattgagctgctacggaagatccgcgagcaggttctccatcacccccagctgggagagaggcttaagctctgccagccaagcttggatctgccagagtggtgggagtgtggacggcatgaccgagacttgctggttggtgctgctaaacacggggtcagtcggacggattatcacatcctcaatgaccctgagttatccttcttggatgcacataaaaactttgctcaaaacagaggggcaggtaatacatcttccttgaacccactggcagttggatttgtccagactcctccagtcatctcatctgctcatattcaagatgagagggtactggaacaagccgaaggcaaagtggaggagcctgaaaacccagctgccaaggagaaatgtgagggcaaagaagaggaagaagaaaccgatggcagcgggaaggagagcaagcaggaatgtgaggcagaggccagctctgtgaaaaatgaactgaaaggggttgaggtcggcgcagacactgggtccaaatctatttcagagaaaggttccgaagaggatgaagaggaaaagctggaggatgacgataagtcggaagagtcttcccagcccgaaggagctgtctctagagggaagaattttgatgaagaaagcaatgcttccatgagcactgctagagatgaaacccgagatggattctacatggaggacggagatccttcagtagctcagctccttcatgaaagaacatttgccttctcgttttggcctaaggatagagtaatgataaaccgcttagacaacatctgtgaagcagtgttgaaaggcaaatggccagtaaataggcgccagatgtttgatttccaaggcctcatcccaggttacacacccaccacagtggacagccccttgcagaagaggagctttgctgagctctccatggtcggccaagccagcattagtgggagtgaggacatcactacgtctcctcagttgtcaaaggaagatgccctcaacctctctgtccctcgccagcggaggaggaggaggagaaaaatcgaaattgaggccgaaagagctgccaagaggcgaaatctcatggagatggttgcccagcttcgagagtctcaggtggtctcagaaaatggacaagaaaaagttgtagatttatcaaaggcctcaagagaggcaacaagctctacctcaaatttttcatctctttcttcaaagtttatcttgcctaatgtctcaacaccagtgtctgatgcctttaagactcaaatggaactgctccaagcaggcctttcgcgcacacccacaaggcatctccttaatggctccctagtggatggagagcctcccatgaagaggaggcggggaaggaggaaaaatgtggagggacttgatctgcttttcatgagccacaaacggacgtcattgagtgcagaggatgctgaggtgaccaaagcttttgaagaagatatagagaccccaccaacaagaaacattccttctcccggacagctggacccagacacacggatccctgttatcaatcttgaagatgggactaggctggtgggggaagatgctcctaaaaataaggatttagttgaatggctgaagctgcaccctacttacactgttgatatgccaagttatgtaccaaagaatgcagatgtgctgttttcctcatttcagaaaccgaaacagaaacgacatagatgtcgaaaccctaataaattggatataaacactttgacaggagaagaaagggtgcctgttgtcaataaacgaaatgggaagaagatgggtggagctatggcgcctccaatgaaggatctacccaggtggctggaagaaaatcctgaatttgcagttgctccagactggactgatatagttaagcagtctggttttgttcctgagtcgatgtttgaccgccttctcactgggcctgtagtgcggggagagggagcgagcagaagaggaagaaggcccaaaagtgagatcgccagagcagccgcggccgccgctgctgtggcctccacgtcagggatcaaccctttgctggtgaacagcctgtttgctggaatggacctgacgagccttcagaatctccagaatctccagtcgctccagctggcaggcctcatgggcttccctccaggactggcaacagctgccaccgccggaggcgatgcgaagaaccctgctgctgtgctgcccctgatgctgccaggaatggcgggcctgcccaacgtgtttggcttgggcgggctgttgaataaccctctgtcagctgctactggaaacaccactactgcttctagtcaaggagaaccggaagacagcacttcaaaaggagaggagaaaggaaatgagaatgaagacgagaacaaagactctgagaaaagcacagatgctgtttcggctgctgactctgcgaatggatctgttggtgctgctactgccccggctggattgccctcaaacccgctagccttcaaccctttcctcctgtccacaatggccccgggcctcttctacccatccatgtttctacctccaggactggggggattgacgctgcctgggttcccagcattggcaggacttcagaatgccgtgggctccagcgaagaaaaggctgctgacaaggctgagggaggaccctttaaagatggagagacccttgaaggcagcgatgccgaggagagcctggataagactgcagagtcctccctcttagaagacgaaatagcacagggtgaagagctagactcacttgatgggggggatgaaatagaaaacaatgaaaatgatgaataaccagtaccagttccagttcaagtgtttaaaacttttgacaagtggtagtcctactgtttacactcacagttaatgttcatacctagttttataagctgttctgtaacatagtgtagcaaaaaaaaaagttcaagtcatgttatacaggtgtgtcaaaaggtatcttggtcattaagtattgtgcagtgcattatttattatccctaggagagatgaaatttgagaggtgatcatgtctttttaaggaaacttacataatgctctgctttttttttttctcttggtaccattggtattataataaagagcaatttgtaactgagtggcactaatggaagaaagtgctgctcaaaggaagtatgaagttatatatttaattttttaattttaatttttaatttttttgctgtgaaggtcaagctgaaatttaccatacatatcatacttgctcatttgtttccctttttgactgtatgggggttcccacactcgtgcatacacacacatccatacactctgacaatctccacgctagtgtgaacgcctctgtcccgaggcgcagcaataataaggcagctgttgaatgtgaagggtccctttggaaaattaacctactgggagggttcttgccagacagaactacagttccattgtctcgtggtcttgtaatgcactggtaaaaacaaaataaatagatgaataaataaagagtgagagaagagagaatcaggtaccttttttaaattaaaggactttgttactttagccacaaagctaaaacagcattacctcagctctaaactagccttgaagtttacagacatgactttgtaaatgtattgtttttctttgttgtgatgtccttttatttttttctttgaaaactgctatcatgtaagataaaatgtaaattgctgccaactgtagtaatgatgcttttaataaaagtgacccatgatatgc

SEQ ID NO: 74 - protein, 2991 aa, Homo sapiens; identical to SEQ ID NO: 68

SEQ ID NO: 75 - DNA, 44645 bp, Mus musculus
  misc_feature (1)...(44645): n = A,T,C or G
gctgggagcgcgcgtgctcctcgggctgtgagtgcgcaggcgcattcgctggttctctgcgggcgccaattctggagagcagaggctggtaagagcctggggttgccgaggtctggaggcggcaggcgtcgggaggtcccggcagccggctcgagcgggcttctcgggggcttgttgggaggtctcgcccatccccgagatccccggcgtgtggctgtcctgcagaagtgacgcggcctggccggattggcctcggcgaccctgtccccgccgtcctgtgggtctgtccctcccgaggctgatgtcccgagggtaccttagcaggaaaaagaagtctgggacttgacggtctggccccttgtcgggatgtgcctgctatctgtgcgtggcctcctgagaaagttgctgagctgctcttgcaggtggcacagcagtcgcctgctgtttaagggggagatagcccgaatggtggcactgggaggcagaggcaggaggatctcaggtttccaggccagcctgttctacattggagagttttaggctagccagagcaacacggtgagacctcgtgtttcactgtgtttcacacaggacttccgaaaatgtagtatccctcactctctcctcccttctcctgcccacatttgtccaccccgactaccttctctagtcaagtgggttcctgctttctgccaaccgaactctaaggatggaaggacattgaaaggactagaaatgatctttgctcgcatagcaattttgttctgaataacaagtgaatggcatttcctcataagctcgtttgttggaataacatgcttgcagaaccatactgtacataattctactggaacttgttgctcatcactcacccagggaacgtatctttttctgtttctcagttcaaataacaatattcatttcatctcacaagacctctccagagaacccccctcctcattaaccctacccccttaggtaatttttgttgttgttgtttctgttgttgatctgtggctttaaaaatgtatggttaaatacaatgcagggtgttctttcaattctttttttttttttaattttttattaggtatcgtcctcatttacatttccaatgctatcccaaaagtcccccatacactcacccccactcccctccccacccactccccctttttggccctggcgttcccctgtactggggcatataaagtttgcaagtccaatgggcctctctttccagtgatggccgactaggccatcttttgatacatatgcagctagagtcaagagctccggggtactggttagttcataatgttgttccacctatagggttgcagatccctttagttccttggctactttctctagctcaatttatttattttttttattaatttgtagtaccatacatgtgtgctggctagtttactgtcaattcgacaagctagagtaggaagctttagttgaagagaacttcaactaaaaaaaaaaaaaatgctcccgggctggagagatggctcagtggttaagagcactgactgctcttctgaaggtcctgagttcaaatcccagcaaccacatggtggctcatgaccatctgtaatgagatctgacgccctcttcgggtgcatctgaatacagctacagtgtacttagatataatagtaaataaaccttaaaaaaaaaaaatgctcccaccaggctggcttattggcaagactggtgcttttctttcttttttaaaaaataattttttttcagacagggtttttctgtgtagctctgattgtcctggaactggatttatagaccaggttggccttgaacttggagatttgcttgcctctgcctcaaaaatgctgggataggaagcatgcgtcactatacctgattgcattttgattgatgattgatgtaagagggcctagttcatcagagaggctctgtgaaagtgccaacatgtagcagggagacgctgactgaaatctaaaaattagtcatttattctgactcttaaagatagttctgggggggggggcctgaggaagttaacagttaagagtgcttgcttctgttatagaggacctgatttcgattcccagcccctgcctctaattctagctccaggcagtttgccacctctggcctctgagggcacctgcacacttgtggacttacacacacacacacaaaattaaaaaagaatcttaaagattcctataagtacagacctgtcatcctagtgcttaggattctgaggcaggagaacctagaataaggttggtgaccagcaacacagtgagatcctgtctctacatctaaaatactatcatcagccaggccgtgtttggacttgaagaggaagtccttcctgagaaggccctttgtgtttgggcagctctcatttccttagactgcctcctcggtgtttatctacttatattgatgttgggtattgaactctggacctaccactggcctgcactcctatcacgttttcttgccaacaatcaacgtgcctgttaaatgtgccatcattcacaggcccatgcagaactgagggtgttagttatccattgccttcttgtcagtgagcacacacttgattctacccctcccctcacagttaagtacagtgctttgaatgtatttgaatttacaaatttttgttaggtctggagttagattttctctatagttgctagagaaaactttttgggcttgagtttcatctgtcgtgtagctggtcttccaccattgtgcgtttggccagctggggcggcgtgatacctctgaggcttcctagctttggtacattcatgatgctgataattcagcttatcaaaaggcttggggtgtttgtttgtttgtttgtttgtttgttttaattttcctgaagaagtacctagaaaaccagatgatctggaacagaggacagttcatctaacccagtcgttatggctctcagtttgctgtctgtcaccatgataagcaccataaccatggccaaccttagggaaatgttattttattttgtagattatagtgagaactgagggccccttctctctccctcccctagcccctcttcttttcccatggcaacttccctggccttggtccttggggccagtgaactcgttcacctgagagcagcttcccaataaacctgcctttaaacaaaacaaaacgatccccaagcctttgtctgttttaccgttagacacattgcactgagttttacagaacggccctttgcttgcagtatatatctcaatcctgagggacaggagtcctctgtagctctcccagtccactccgccaaagcctccccacatttctgatgtgttctttgttggggtgctgtgctgagttaaatcttggttcttcctgtttttctccctaggctacaaagacataatcaagttttcactgttttgaagcacagcatcgtttacaatcctctcaagctcctaatggtgacatcgctttgaagaaggagacccgtgactgactttggagcaagcatggagagctggccgtggatggcagtcgtggtcttactaggacttacggtgcggtggacggtctctctcagttcctactcaggtaggaactacactgatcctgtctcagagattggggagtagtcctacttgactgaaattgaggaatttgagtctttattgttatgattaaggaaatatatacatctaattataatgaaaaagtgtaagaggtaaatatactgcctgatacaggagacaaaaacgtcctctagcttggaggatgacagactgaggtgtgattatgtcttgaggtagtccttgaagatggtctcagtcaagggcctgtgtttgctggtggagaagcaggttactagactgagaaagggaatcggtcactgttaggtgtgataatgtagttatatttgaggtacaagggtaacagaagggactgatgaaagcacaccagagtggacttgagataagatgtctgatttaaggatttgagggaaaccgaagaaaatacagctaccactatgtaatattagagtgaccttaaagactaaaaaaaatatatatatatatatatttttttaaaaaaaggtcttcaaaaggaataaaagtgggaggaaaaagtgaaaaattgattgtgtgtgtctgtggagaagtagcctggggagaaaaaagaaccaagatgtaactcagcacagccatttttggaaatagctggagttttggtttaacatttatctaggcaatctggttgtagaattttctggtaataaaaaagatggtgggaagaaggtcagaggtagagaggcagaatagaacgagtagcaagtgcatgctgagcggtgactggcactgtacacttcagtatttaacagaaccactgaagatgggagatagccaaatgtcaaacgcaagatggggcagtcctgaggagtgtggacatttagctcacactgatcattcgccaggacgatgcatctgaacataatttggaataagaaagaaagtgggctggtgagatagctcaagccacctacatttggctcctggcacccacttggtgctactaactggctgtggctccatttccagaggatccagcatcctctcctggcctccgtaggcaccaagcacatgtggtacacagatatacatgcaggcaaaacatctatacatatcaaaaaaaatataaaagaacaataaaaaccaagacaactattaaatgacaacagggttcagatgtggtcacttgattccagccagtatatttacctcttacacttttgtgactctgcttcctgaggcttctgaggaagaggaggccctgaccattgtgacccgagtcattgtgacagccccctccatacatgcaaacatggatgttgatttgtgccagaaacttttcttccaccctgcccctcagatgaatttgtatttttgagaaagtttaaaattgcttcattgtacctactatcttgaaactcagcagatactcaataaatgataattagatgttctttttaataaaataaaattgcttgaatgttgtgcagtaaaacatgggctcaaattttaattattttacctgttagttgcctaatcttggagaagttatttaacttctctgaacgtttatataaggcaggagtgtcaataaatacttcagcaggttgcctgagggattaatgcaaataataagtatgagctgtgttctctatataggaagagtcagctcatggtcatgcctcacctctatcgatcatcacagtagatcatttaacttcagatttggccagatgtgctcacaacacctgaaatcctagcactcactcaggaggtagaggcaggaagatcaggaattcagggccagctttggctatagagtgagttcagagccagcctggtttatacgagagtttgcctaaaaaacaaacaaataaacaacaacaacaacaacaaaaccttccaaatattagtttgttgtatagccaaaaagaggtcttggtatttattaaggctttaataataataaagaatgataaatagtatatttcctagagaagatatgcaaatatatattacttttaaattaaagtgactggatttggaacagtagacattttctaattcagatgagaaaatcttagtatgtaacattttagtatattctaaaagattttactaggcagaaaatggttgagaagaacattctggtggaagaaaacatgaaacaaagcaagaagaattgaagaatacagagtatgtgtgtgtgtgtctgtgtgtgtgtgtgtgtgtgtgtgtgtgttgagacaaatgagtcagactgattgtgagcgtagaaaggacataagatcatacttgttttaagagttagttctagaatcaacctagaatttgggtgaggacaggcaaatgggattatctatgtgcagtggccacagcatgcttaccaagtttattacaagtattgtttcatggagctggctatgtggttcacgtcaaccaccaggcaaacaaacggaacaaaggagttgtataggagccacgtaagcctcctagtttcctaactatagcaacagaacttagcggctccctaaggagatgtgaagtcaaagaaacccttaaacctgagtattttgctctaggtctggtaaggagtagacaagttcaatccctgatgccacataagctaggtaagttggtgcataccaatagtctcagctctggggaggtagaagcagaaagatcaggagtccaaggtcattgttggttatgctgagagtttaccagagcacttcttgcttgatggtcttgtgacttgctttagggaaaggttagagagacctgtctgtgcctgctgtttctcggattccttcagcttaacatctgcattgtatctcgggctgtactctgggtagcatgtccaaatccttgtatagaaattcaggttagcttgctttagttttactgaattaaacttcctttgaaatgcatacaccatttagaaaactacttaaatactctattgtactttaatttcttctaaaattgatccccattttgtttttagtcttgcttttccatagaactaagatactgaatattatctgttacattaaataagctatggggaatagacagctttttatttaggatagtttgttatttctcacagagatttacacagagtgcctcttgcagtctacctaaacaattataacaacgtttgatttttgtttgtcatctcccctgactccaaccacaaattatattggtagctaaggaaaaagtcattttaaaaaatcagcttttgcaaaatatcatttattaaaaaccgtgacagcatgagatttagttggttggtttcctttggcttaaccactcctgtttgtgaacggctgtgtattcttacagaggtaagagaagaagttcataggaaaatacagtccactcttctctgggaacatttaaagctcactgtaaagtgtgtgttgctgacaggctgcgtgtttatatttaattaccattttgaatatgttagcatttgctaaagtgaacctttttagtgctcctggggctgacagagctggggtctgtgggtgcgcattggtcgtcggtgcgctgtctttatatggttctcgctccccttaaccactgtggagggaatccttttgcccttctgagtgaagctccctcaggcgcagttgggctgtccttctgggttgctttgagggcactttagcagttttaaaaacttaagtactaatttcatagccagtgtcagctgaatttattgaagtaggtcaggctctgggtaacaacttgtttcccaaccctgaagagagtcgttatccgttcttctgtttgttagagagcagtcataaattcttcacatcgactgccctgtttccagagtagttttaggacatctagatagtttgattttttttctttctttaggtatagggaattaccaaaatattttttgaatttattatcctaatggcattgaaaaaagaaaaagaaaccctctttttgtcttcccaaagaaactatatattcagtggttgtagtcactgaactagattcacacacatcacacatgtaaaaaatgtaaataactggttggagaattcttttcctttaagaaattactaggagaaattatttttctcttcctgttgcgtttaattgagtccattttaagattagtacatgcctaccatgacgcttactttgatttatggaaaacaaaattttctgtctccaggaactaacattcatacttggctttcaattaggaaatagcatggccatgtgacacacatgatatggaaatgtacatattgtgagaagtcactaattaaccgtttatattttagtttgtaaggggaggctcatgggggatttaggatttgaaatgattttgtgtgtactttgggacaaggcttgtgtatcctaggctggactagtctagcctgtgttgtccagagtggccttgcagttgtgatcttcctgcctttccactcctgtgtgctgggattacgagatgcaccactgtgcctaatttgttttgagacagagtctcactatgtactcctggctggcctgaagtagagcaggctgatctcaacctcacagagatctttctacctcttcttcccaaatagaggaataaaggtgtatgctacatccttgccccattcatccttaacttctgaagtgattcttgtattacactcaactcaacttttgtttttggcactagggattgaaccttgcacatgctagatatatccatcccctaaggtgattgaagaacttatgtagcatgtgagtgtgagtgcagatgtgaggacaccccgagggagggagtgggttctcccctactccctcattagggcagggatgcgcttactgtttcaggctagctggcccaaaggcgtctggatgcttctctctacctcctcccctgctttagagatcctgggattgcagatgtgcactaccatattcagctttttatatgggttccagggatcgagttcagaccagcaggatttagtggcaagcactttagccgcagagccctctccctggtcctctgaggtggttcttgaagtagcatgtatgacctgatagaagtcataggtagaatagagagtaaataatgaacagaagttttaaagtgccaaacagtaaaggtgtttgggggcaagagccaatacatgggctttatattcaaacagccttggcataactagtctcccaccacaggtggatgctgcacattcattaagtgagaaaggaaggactcacattggttgaatgaaaagccttgcggtgtcacactaactacaccagtgtctttgctgtatcagctgtcactgggagtctgccaggtactccgagaggcactaggcgaacacgtcctgaggagacaaagttgagtaaacattctgagagacaggggagttgcatatgtacaagtgggtttgaactgtgggtcatttcttgtgccagttactcatgtacatatttatacacatgtatttatagtgtatagaactgttagtctgctttccccataatttcagattgtctccttagaaattctactactggtagaatctagccaacaaatgcaaacaactttactaaatctgggttagatttcagtgagcagagtcacattattcagtgtgacatatcttttgactaggttagaagcgtatatggctattttgatttctaccttatttgttgacttaaaaacctatgactctattgtacttttctgggcttcctcacttttcagtggtcaactactggtcaaataggtgcttactgtttgctagatggagatttgtcatctgtgtgggcatgacagggtaggagttaagaatgtgcgtttaggggctggagagatggctcagcagttaagagcacaggctgctctgtcagaggacccagattcaatttctagcacccacatggcagctacaatcgtctctaacgctagttccaggggatctgacaccatcacacagacatacattgaggcataacgctgttgcatataaaataaaaataaaccattaaaaatgtactcctaaaaaaagattaaaaatagagaacgtgttctagagccagcctgctggctgagatccagagcctgcttttactacttagagactgtttcccagtctttttttttttttttggttttttcgagacaggatttctctgtatagccctggctgtcctggaactcactttgtagaccaggctggcctcgaactcagaaatccacctgcctctgcctcccaagtgctgggattaaaggcgtgtgccaccatgcccggctattttcccagtcccaaattagggaaataataacacttagttcatggggtcattatatttagcactagacatacatgttagttattaaaggcttattatcccttatttataacttttgaagataacaaattacaagcttttttaaaaaaatctatttgcttattgtgtgtgcagtgcttggtgtgtggaagtcaggacaacttagtaattggttctctcttccaccatgtgtggtctagggattgacttcaggtttggtggcagattgctttagctgctgagatatctcattggcctttgagtttttatataaatcatttgatagtagtctgacccttatcaataagtacatagcctgtttttaattctgtgttcaaccttaagttttttattttcagtttgtaaaggcagatgtttgtagttaatttatcatacttttttgaagtatttgcgttgctacttttcttattgctgtgatgaaatacctgacatgaaaccacatgtgtttatctgccctccagtttgagggttggcaagtcactgtggggaaggcactgcggcagcaatgggaacagcctgctcaggttgaatccccatggggaagagaagggccctggagtagggtgtggctagcaagcctcaaaggtcctgccccattgacccagttcctcaagtctctacctctgaagggttccacagccttcgaaaactgctcctccagctgtggaccaagtgctcagccatgcacgtttcacatgcaaaccactgtgttggtggcagtttttctccgaaagtccaagtcaacctggtggttggcaagatgaatcattgggtagaagtgcttgcatgcacgctgtacaactcgagtctctggatcccataaggtggcaagagatagatacctgcctcttgagagtcgtcctctgatttctacacattacaactctgtattcctgattgttctggaactcactatgtagaccaggctggctttgaattcataaagattatctagcctctgcctccccagtgctgagattaaagctgtgtgagcaaattaaaattgacaaaacaaaacaaaacaaaaaaaccaattgtgtataccctgtactactaataaactgagtggtgctacagtggccctgcttcctgagtgtctgctgtgctaggctctgtattgggtcttcacctatctggtatttgctctagcatgtggtcacttggtaacttgcagtagtggattcaggcctcatcgttgaccttggtaactcctgcattccttctctagctcatgtcccacacagtatgctaaaagttcattattattctcttttgcttttcattctaggtgctggaaaaccacctatgtttggtgattatgaagctcagaggcactggcaggaaattacccttaatttaccagtcaaacagtggtatggataattttggtttggttttattgtttattatagttaatatagattatatgatattgtttaaaagaaaaacacaactttgttcatctcttacatattggatctcatctttgaagtttcacagtcctgaaaattatccatatacatacccagttagctagtttttgcttttaatctaaaacttctaatttttaaacatctttaaattctatttattcttatcacgtgtgatgatatgggggttcacccatgccacagtgtgcctctggtgtcagaggacagctctgtggagttggtcttctccttccacatttacataggttccagggataaaattcaggatgtcaggctttgtacagcatttttacctatgagacatcctgccacgccctaaactacaagtctgatacaagaacaatgtatgtcttgaaaacccatctggatgggtataagctagaaacagcatcatgagcagacagtatctttgccgtttcctaatctgtacctttttcactatagcttactgtgatatcatcagctctaggtaacacagagaggtcttggcaatgataactggctatgtgtgaggctgaaaggaatacaaaggagctttgaatttgttttcaactgaaaattttacttctgtccctttggccatctctgattacactgcacactggcacactacagaccccagttaccatctctcgaagggaggaatattcgtttgtctcctcttacatggtcttgtttctgtggttctgtctgtagtgtaaaggaaaggtcactctacccatcagtggtttcatggtgtggcttgtatggtctcgtgctttatagtactgagaacatcatagaaattgttgttattctcaaccactaaaacatggtccctaaccttagtttcatatacacatctacctggaggaatcttagtgctgtagtatgaagagtgcaggtcagaggtcagaccccagctctgtccattgctgctgtgacctttgcagatttctaactttctcttgtagttttatcacttgcagaatggaagtgatcggctgcatacttcactggtcagtaagggctttattaaggcacttcacacatgtgtgttctcacaacccttacctcccccctttccctctgctggttccctttctccccagccaagagcccctttctgctttcatgccttacatattccacagccctttctttgaaaaggaatcaaacatattttgtgtgtctgtgtgtgggcatgtgcacgattgagtccagaggatggtgttggatgcctggagctggagtcagaggcagttgtgagcctctcaacgtgggtactgggaaccacactgttcctctccagatctccagcctccctcccattcctcctgcccctcaagatcttttctcttttcatgctctctttctagtttctctaccagtatgagaattaaaattaaggacccacatatgagagaagatggatcagtagctgagagctacatcctgatacaggcagagagagaactgggcctggcatgcacttttgaaacctacgagaccaccctcagtgacacacttcctccaacaaggccaccgtccttctgatcttatcagttccattcctgatgactaagtactggaatgtatgagcctctgggagccattcttagaaacttgcacttgtgagacagggcctccaccactctgctgtcttctttcatgcttctcttttcttttctccttttggacagtcccaccttgtagttgaggctggcctggagtggtaattctgttgtcttaccatcctgagtagctgtgattactggccatgtgcctatgagcctgactccctttcttaggaattactctaagattggggagcatagtccttaaccttgccgtcttcccggatgtgtgagtgcatgttcacagcttactgtcatctcagcacctctttcactcatcatctacagtgaatctcaaggtgaaagtaaatgagaagcagccttttctttacaagctagacaccaaatcaagttgttctgatcaaaatgtgatcttcagattactttatctcccattgctgaatccatcccagtagttcagtggttaatggtaagttagaactcctgctaagtacttaggttttgccagatggtaacttaacttcacatgtttaactcagttgtttagcttcggttgatccactccactgctgctgctgttcttggtgatcatcccatagtattggcatctccaatacactggggtcttctactgcaactaggctttaccaatagcttctcataggctctcttcatggtgccaagcctcaactcctttacatgaccccttcagtcctggaccttcaattgccactgaggctgcaccttcaccaatggcctctcacagtgccaagcgtcaggtgttcttgatcatgccttcaaaactagtaccacctaggtgactcttacaaattaccaagtacagctgcagcatgagttacaaccacggctatcttctttgtgctctcagaaaacacttcccagattccccctcagtgaagctgttctcttgactaatttcttagctccagctaaccagcatcagttgtctcagtagtcccttctattctggactctaaagccagagccaggtggccaaagctgcttgctgtagctggaacatggccccttgttctgtgcattaccactagctttctgttttccaactccttcattgcctaagcttggctgccctggaacttgctctgtagactgactttgaactcagagatgtgcatgcttgtctcctaagcaccaggattaaaggtttggtccaccaagcctgaattaaagtttttcttcacctagaatttgctctgttctaggctggccttgagctcaaagatctgcctgtctttgcctcctgggattaaaggcttgtactaccgtgccttgacctaaacttagctgggtgtggtcttgcttcaaggtcccttaattcaatttaatatctttgaacacaggattcagtgccattttacttcctgatgcctctttaatactcgaaccatatattttatatttttcctttcccagcttgctacgcttgtttaaaatgttctttatgagacttaaccagagaacaaaatctatgatgggcgtttctgagacttcctttgttaatgcaattaatctgagtctcttcaccttagcctcaggcagactctttagacaagagcaaaaaatagctacattcgtcaccaaaataccacaaaaacagtttcaaggccacatattgagattctccactgaaacctcttgggccaggtccacacaattcaaatcactctcagttacaaagtcttccatggtcctactaggacagcacattaagctctttttaaagcattccactgctttccaaatccaaagtcccaaaatctacatttttccaaacaaaagcatggtcaggcctatcacacaataccccactcctggtaccaacttctgtcttagtttgggttttactactatgagcagataccatgaccaaggcaactcttataaaaacatttaattggtgctggcttacaagttcagcagttcagtccattatcatcaaggcaggagcatgatagtgtccaggcaggcatagtacagcaggagctgagagttctacatcttcatccaaaggcaaacagtgaaagaccagcttccaggcagtttgcaagagggtcttaaagccacactcactgtgacatacctactccaaggctactcctccaaatagtaccattccctgggccaaacattcaaaacactacggtgtacataaattgttccagtgactgagagtaaagtggatggaagaagttgcttagctacaaaggacacaactaagaaatatattcatataaacttaattttcttcttagaggcacagtgccttttttacaattccttcacatctttaactggaggtaccaggcacctttatggactctagaccaggttttccccattggttcacggactcttttatgtagagggactgagttacatatgctagctgaattatttacaaagtcttgatcaagcctgcttatccaggaagtcttccccttcccataagccatatcttcatgtgtttttttgaaactggccttcagtttttttaagattattattaaaagtgctgtttttcgatcttggtccgggacccgccgaacttaggaaattagtctgaacaggtgagagggtgcgccagagaacctgacagcttctggaacaggcggaagcacagaggcgctgaggcagcaccctgtgtgggccggggacagccggccaccttccggaccagaggacaggtgcccacccggctggggaggcggcctaagccacagcagcagcggtcgccatcttggtccaggacccgccgaacttaggaaattagtctgaacaggtgagagggtgcgccagagaacctgacagcttctggaacaggcagaagcacagaggcgctgaggcagcaccctgtgtgggccggggacagccggccaccttccggaccggaggacaggtgcccacccggctggggaggcgacctaagccacagcagcagcggtcgccatcttggtccgggacccgccgaacttaggaaattagtctgaacaggtgagagggtgcgccagagaacctgacagcttctggaacaggcggaagcacagaggcgctgaggcagcaccctgtgtgggccggggacagccggccaccttccggaccggaggacaggtgcccacccggctggggaggcggcctaagccacagcagcagcggtcgccatcttggtcccgggactccaaggaacttaggaatttagtctgcttaggtgagagtctgtaccacctgggaactgccaaagcaacacagtgtctgagaaaggtcctgttttgggccttcttcttcggccaggaggaggcccaaatacaagatatctgcgcaccttccctgtaagagagcttgccagcagagagtgctctgagcactgaaactcagaggagagaatctgtctcccaggtctgctgatagacggtaacagaatcaccagaagaacaatctctaaacagagtcaactataactactaactccagagattaccagatggcgaaaggtaaacggaggaatcttactaacaggaaccaagaccactcaccatcaccagaacccagcacacccacttcgcccagtccagggaaccccaacacacctgagaacctagacctagatttaaaagcatatctcatgatgatggtagaggacatcaagaaggactttaataaatcacttaaagaaatacaggagaacactgctaaagagttacaagtccttaaagaaaaacaggaaaacacaatcaaacaggtagaagtccttacagaaaaagaggaaaaaacatacaaacaggtgatggaaatgaacaaaaccatactagacctaaaaagggaagtagacacaataaagaaaactcaaagcgaggcaacactagagatagaaaccctaggaaagaaatctggaaccatagatttgagcatcagcaacagaatacaagagatggaagagagaatctcaggtgcagaagattccttagagaacatcggcacaacaatcaaagaaaatggaaaatgcaaaaagatcctaactcaaaatatccaggaaatccaggacacaataagaagaccaaacgtacggataataggagtggatgagaatgaagattttcaactcaaaggtccagcaaacatcttcaacaaaattattgaagaaaacttcccaaatctaaagaatgagatgcatatgaacatacaagaagcctacagaactccaaatagactggaccagaaaagaaattcctcccgacacataataatcagaacatcaaatgcactaaataaagatagaatactaaaagcagtaagggaaaaaggtcaagtaacatataaaggcaagcctatcagaattacaccagatttttcaccagagactatgaaagccagaagagcctggacagatgttatacagacactaagagaacacaaactgcagcccaggctactatacccagccaaactctcaattatcatagagggagaaaccaaagtattccacgacaaaaccaaattcacgcattatctctccacgaatccagcccttcaaaggataataacagaaaaaaaccaatacaagaacgggaacaacgccctagaaaaaacaagaaggtaatccctcaacaaacctaaaagaagacagccacaagaacagaatgccacctttaacaactaaaataacaggaagcaacaattacttttccttaatatctcttaacatcaatggtctcaactcgccaataaaaagacatagactaacaaactggctacacaaacaagacccaacattttgctgcttacaggaaactcatctcagagaaaaagatagacactacctcagaatgaaaggctggaaaacaattttccaagcaaatggtatgaagaannnnnnnnnnnnnnnnnnnnnnnnnnnnnnnnnnnnnnnnnnnnnnnnnnnnnnnnnnnnnnnnnnnnnnnnnnnnnnnnnnnnnnnnnnnnnnnnnnnnnnnnnnnnnnnnnnnnnnnnnnnnnnnnnnnnnnnnnnnnnnnnnnnnnnnnnnnnnnnnnnnnnnnnnnnnnnnnnnnnnnnnnnnnnnnnnnnnnnnnnnnnnnnnnnnnnnnnnnnnnnnnnnnnnnnnnnnnnnnnnnnnnnnnnnnnnnnnnnnnnnnnnnnnnnnnnnnnnnnnnnnnnnnnnnnnnnnnnnnnnnnnnnnnnnnnnnnnnnnnnnnnnnnnnnnnnnnnnnnnnnnnnnnnnnnnnnnnnnnnnnnnnnnnnnnnnnnnnnnnnnnnnnnnnnnnnnnnnnnnnnnnnnnnnnnnnnnnnnnnnnnnnnnnnnnnnnnnnnnnnnnnnnnnnnnnnnnnnnnnnnnnnnnnnnnnnnnnnnnnnnnnnnnnnnnnnnnnnnnnnnnnnnnnnnnnnnnnnnnnnnnnnnnnnnnnnnnnnnnnnnnnnnnnnnnnnnnnnnnnnnnnnnnnnnnnnnnnnnnnnnnnnnnnnnnnnnnnnnnnnnnnnnnnnnnnnnnnnnnnnnnnnnnnnnnnnnnnnnnnnnnnnnnnnnnnnnnnnnnnnnnnnnnnnnnnnnnnnnnnnnnnnnnnnnnnnnnnnnnnnnnnnnnnnnnnnnnnnnnnnnnnnnnnnnnnnnnnnnnnnnnnnnnnnnnnnnnnnnnnnnnnnnnnnnnnnnnnnnnnnnnnnnnnnnnnnnnnnnnnnnnnnnnnnnnnnnnnnnnnnnnnnnnnnnnnnnnnnnnnnnnnnnnnnnnnnnnnnnnnnnnnnnnnnnnnnnnnnnnnnnnnnnnnnnnnnnnnnnnnnnnnnnnnnnnnnnnnnnnnnnnnnnnnnnnnnnnnnnnnnnnnnnnnnnnnnnnnnnnnnnnnnnnnnnnnnnnnnnnnnnnnnnnnnnnnnnnnnnnnnnnnnnnnnnnnnnnnnnnnnnnnnnnnnnnnnnnnnnnnnnnnnnnnnnnnnnnnnnnnnnnnnnnnnnnnnnnnnnnnnnnnnnnnnnnnnnnnnnnnnnnnnnnnnnnnnnnnnnnnnnnnnnnnnnnnnnnnnnnnnnnnnnnnnnnnnnnnnnnnnnnnnnnnnnnnnnnnnnnnnnnnnnnnnnnnnnnnnnnnnnnnnnnnnnnnnnnnnnnnnnnnnnnnnnnnnnnnnnnnnnnnnnnnnnnnnnnnnnnnnnnnnnnnnnnnnnnnnnnnnnnnnnnnnnnnnnnnnnnnnnnnnnnnnnnnnnnnnnnnnnnnnnnnnnnnnnnnnnnnnnnnnnnnnnnnnnnnnnnnnnnnnnnnnnnnnnnnnnnnnnnnnnnnnnnnnnnnnnnnnnnnnnnnnnnnnnnnnnnnnnnnnnnnnnnnnnnnnnnnnnnnnnnnnnnnnnnnnnnnnnnnnnnnnnnnnnnnnnnnnnnnnnnnnnnnnnnnnnnnnnnnnnnnnnnnnnnnnnnnnnnnnnnnnnnnnnnnnnnnnnnnnnnnnnnnnnnnnnnnnnnnnnnnnnnnnnnnnnnnnnnnnnnnnnnnnnnnnnnnnnnnnnnnnnnnnnnnnnnnnnnnnnnnnnnnnnnnnnnnnnnnnnnnnnnnnnnnnnnnnnnnnnnnnnnnnnnnnnnnnnnnnnnnnnnnnnnnnnnnnnnnnnnnnnnnnnnnnnnnnnnnnnnnnnnnnnnnnnnnnnnnnnnnnnnnnnnnnnnnnnnnnnnnnnnnnnnnnnnnnnnnnnnnnnnnnnnnnnnnnnnnnnnnnnnnnnnnnnnnnnnnnnnnnnnnnnnnnnnnnnnnnnnnnnnnnnnnnnnnnnnnnnnnnnnnnnnnnnnnnnnnnnnnnnnnnnnnnnnnnnnnnnnnnnnnnnnnnnnnnnnnnnnnnnnnnnnnnnnnnnnnnnnnnnnnnnnnnnnnnnnnnnnnnnnnnnnnnnnnnnnnnnnnnnnnnnnnnnnnnnnnnnnnnnnnnnnnnnnnnnnnnnnnnnnnnnnnnnnnnnnnnnnnnnnnnnnnnnnnnnnnnnnnnnnnnnnnnnnnnnnnnnnnnnnnnnnnnnnnnnnnnnnnnnnnnnnnnnnnnnnnnnnnnnnnnnnnnnnnnnnnnnnnnnnnnnnnnnnnnnnnnnnnnnnnnnnnnnnnnnnnnnnnnnnnnnnnnnnnnnnnnnnnnnnnnnnnnnnnnnnnnnnnnnnnnnnnnnnnnnnnnnnnnnnnnnnnnnnnnnnnnnnnnnnnnnnnnnnnnnnnnnnnnnnnnnnnnnnnnnnnnnnnnnnnnnnnnnnnnnnnnnnnnnnnnnnnnnnnnnnnnnnnnnnnnnnnnnnnnnnnnnnnnnnnnnnnnnnnnnnnnnnnnnnnnnnnnnnnnnnnnnnnnnnnnnnnnnnnnnnnnnnnnnnnnnnnnnnnnnnnnnnnnnnnnnnnnnnnnnnnnnnnnnnnnnnnnnnnnnnnnnnnnnnnnnnnnnnnnnnnnnnnnnnnnnnnnnnnnnnnnnctgtttttctaaattgtgatagtatcagacacaaattgtttttttgcatgtattttgttgtattagtataattgatttactaaagtctactaagaatagagcaacaatatgtcccagggacctggggcagccctgtttgtatttgatgtcatagggtaactattaatgtcttaattagttaaacaattaaacttaattttaattaagtggcatgagatgttaaattatgtcttgaatattgataatggtgccttctattttccaggtattttaacagtagtgataacaatttactgtactggggattggattacccacctcttacggcctatcatagcctcttatgtgcatatgtgtgagttcttcttttttaatatacctgaatatttatgctcttagatgctgtgtgatctgacttattaaaagagttattgtttgtaacttcaattgttttacaagcttaaggatcactctcagaatttgaacatttctatagcttgtatacatgctagaaagaatgcaaggcttacatttgttttggagaagagatgttaccaactactaattggctgccgagcagtgtctaatataagactgctttcatttttctgaagtagccaaataaatgaaaactgtaggtccaaataaccttaactgctctgcttagttagaaacttgtacgattagtgtcccccaaccccccacccgccacaccgctcttttcttttttaaatgaagtagttcatagacaaggacttctgttttggtggggacccagttcacctctgtagcagtttctcttagacttgaagtgtgtcagcaaaaattttaggaaattctttactttgttacgatttattattccaacttttaactgtttgatgctttataagatgaatgttcatagttggaagtaaggctcctgaacttgatgatggttagttatgcttcgtaggattcagagcactagctatgactgaaaagcttcatttaccggtaataatgactgagctttaataaaattcatgatcattatgtttattaaaggcattgtcatgttacctaaagagaatgtttttaaaacgtgatgtgatgaaatgtgacgtcagattggtttttatactaggatggtgtgggtcagacgtctgcacactgcatggttttactggaagatgagcagggcagaggctactgttctgtatcctcagtgaatttacctgattaatacaaggagtaaagcttcagttttgaccctgtcatcagcaacagagaattcctaaagtcctgtgttctcagatgtcctaattactaagcctgagcggaataaagtgcatgtgtatatgtttgatctgcagggcaaagtttataaacccagactgggttgctctccacacatcacgaggctatgagagtcaggcacacaagctcttcatgcgtgccacaggtaaatcagcagttggtactggctcagaatttcaattctttataaccatttgggtaaactgataaaagtactcaattgaaaaaagtcttagctctctctccacccatctcctccttccgctgccaccttgctgttttctttctcaataaacttcacatggaactgtaaaaaaaaaaaagaaaaaagaaaaaaaaaagtcttactcttgtttctttttgagacagtgtctcactatgtaactctggctgttctagagcttactatgtagaccaggattatcttgaacccacagaggtccacctgcctctgcctcctgagtgctgagattaaaggcatgtgccaccatgcccagctattgctctaatggatttgaaatttatagttatgcatatgcatgtaaatactgtagactaaaagtatttgtaacctttacaccaagagtaaaagtgaatctgggtatttcatttttattatatcacttgatcctgtgagaaatcaattgaaacgaacagtcttactcttatttaaagccgaggaaactaccaaggcacagttgcaggaggcaggaaccttgtcataggtcagatagtaagaaactgaaactgtagttgtctgtactgctgcttcggtgcactaatcccaggctccttcagccttctgaaggcagccttcatacattgtgtgggctgtacattaaacaggccactaaacaccgcccccccacccccaagggacgttggggattaaacaaagggacttaagatgttagtgaagcacctccccctgagctatatccccgtcagcaaggttaattgagcatcgttgagtgcttgcttctctaggagactgacagtaacgcgctttgatttctgtaaaagcattacataactaagactctattctagctcataccttttgttgttaattagcctaggtacacagtgtggtcccctgtcatagactctcaggcccaggaggtgacccgtgtctgtctgtctgtctgtccttttcatatctctcctctttttagtgctttaacctttttttttttactgcatattaatcctgtggttcacagcatccaaactagtatctgcatttccaagagttacagcttttggggcagctctaaagagagtggtaggcattaaaaaatttctttcttaaatcaggatagtagactttttggatagcactgttgtcctttgttctaaaaggactactgtttttttgtttttttgttttttttttctgttttgtccctgttttgttgtccccccaccatcccatcccatgctggacacacacacacacacacacacacacacacaaaactatcttgtgtgtatttccaccttacccaggcctcttaagctccttttttattttatttttttttgagacggggtcttgctgtgttttattgtctcatggccagtctggaactcattatgaagcccaaggcttcatcctgctgatgtgtaaaataatgttcatgagactttctccaacttttttctatgcattaacttataaaagtttatttatttttataaatagtagcactaaaggttctcctttgagttgttcttttgagcaggacatttggagtatccagacggagagaatatgctgtgtcttcctgtgctttgagcgttcatttgatgcccaactcaaagcggcaagagcacagctctgacatcgtctagtgatgcagcattataactaggcataggcagagggagtggaggcataggaggacagtggaggctgtaggaggacggtggtggaggctgtaggaggatggtggtagagctgtaggaggacagtggaggctgtaggaggatggtgatggaggctgtaggaggacagtggtggaggctgtaggaggatggtggtagagctgtaggaagacagtggaggctgtaggaggatggtggtagagctgtaagaggacagtggaggctgtaggaggacggtggtggaggctgtaggaggatggtggtagagctgtaggaggatagtggaggctgtaggaggatggtgatggaggctgtaggaggacagtggtggaggctgtaggaggacggtggtggaggctgtaggaggatggtggtagagctgtaggaagacagtggaggatgtaggaggatggtggtggaggctgtaggaggaccatggcggatggcttgctggaaccggatgacctcatctcatctgcttgtgtttcagttcttgctgctgatttgctcatttacgtacccgcggtgcttttgtactgttactccttaaaagaaatctcacctaagagaaaggtaactgctaaccctgcttgacatttcatctctgagtcagtgtgttattactagcctattcaggatcgactttgaggaagccctgctctttgggagtatataggataatgaatattttatcttctattgagtaatttgcatttaaaaaccaacagtttaacttacaacaattactttaagtgctttctagtaataacaggatgcgttgaactttaggactgctgcactggtaacccaccctgctttacttgttgctaagctcataatcagaattttgagctggcttgtgacaaggactcaactaaaaggcattttggaaagtttgtgtgtctgcccacagtcatgatcaagtctccttccttgagaattttacatcgactgattagatagccaatcattagatcaaaactgtctttctggatgtggtgttgagggcatctttaattccagcattgtgggagtcagaggcaggtgcatttctgtgagtctgaggacagcctggcctacttagtgagttctaagacagccagcgctacatagtgagagtcaacagataaaaagttcctttcagtaatttaaagtattttctattgccttcatgaaaattttagtgtcttaataggggcttttgaagtagaatattctgattaaggaagtacgtttttgccatgttagatgcacagtacacatcactctactgtagtaatgatctcttatccaccatacttttctttacagattgctagtgcgttatgcatattgctgtatccaggtcttattcttatcgactatggacattttcagtatcctttattaaattagacataaaaccagttacatattatgatctaggctcactgcatagcattgccatctgctgttgctgtatatgctactgtgcttatacaaactcttttcacttgatagaaagggttgaaataagtcaggtgttaattaaatcttaaagcttttgagttgtgttatttttgtggggatactttttaaatgattattctttttgttgttgttgttgtttttcgagacagggtttctctgtatagccctggctgtcctagaactcactttgtagaccaggctggcgtcgaactcagaaatctgcctgcctctgcctcccaagtgctgggattaaagtcgtgcaccaccacggcccggcgtaaggtatttattgccagtagtataattactgtttttttgtgtctatgtatggatgtgtgtatgtggagatcagggcccagcttgcaggagttggttctttccttccaccgtgtgggttgtaggaatcaggtcagcaggtttggtagcaagccccttcacccactgaaccatgtcaccggttctaattgctctctttcttatttaccgcgtgggctctaaaaatgcagcgattcccttatgcacagggaggtgtctttctcgttgttgtggacactgtgcggatccatcattttcttttttaaagctcatattctttaatttccttgttaactttcttgcttgtctcctttctgtctgatcttaatagctagttgttaggtttcttttttctttttttttttaaatgttcctcttctgcatgtttgccttctggttttgctttatagaaaattaccctgtctttgccatgaacacctcgattccatttgtcttcttagacatattttgaaattctaattaaagttttccttcttttccgcccctttttcttttgattctttatctgattgacatatagaataaaagcagcatacagagacagcagtaattttgttgtcataattaaacttgctaccaggatagtcttgttctctagatttggcaccttttaataatacttttaataatacttttaataatacttttgtgaagtggtttaacagaacaagtctatggtatctatatttataattctcagttgctgtgtagcgatttagtatacttgagattgctttgtatatattctttgtagacattctttatcactttagtgctttcaggtcatatttagaagtaagcttttattctagatatatgctatttttaaatcacgcaagaaatatgctctgtatgatgtaaactgtctcttaattattgagctaatttccttgacacgggaacatatataattctgtgagtcttggctttgcgttgtggggtgttcttggagtatcttgggactgggacctgctagggtcactggcattttgcttagctctaaattataagcagatggaactttaccactccctgccatttttttgctttttacttggcaagtgttttaaaaaaggcctcaaaggaaaggggtgagtaccttttaaagcatagaattcaagattttcagagaatttatttgcatgcttctctggaggaaggtggtctttgtcttcggtggtttctcctaaatgtgctggccatgggtgaatgggaggaaagctgttgcgccatagacttgtagatcttcataactacaggacggattggtcagcttacactggaggcagtgtgggagggtttgccagagccctgctgtagagtgctgtcactttagagcttgtcatgctatctgcttattagaaatactcctacttgacagttttctttatggctgcatcccttcaggcctttagcaaaggcatccaagctaaatgctaattaggatactcatgcgtccttagctggagaaacgagtcttttatcaattgaaaatttcagctatgttgtgagtggtgtcccattttaaatctttattggtagtgctggtagacgatactgttagatttgtagttattctattagatgccagtcacaccccttgtctctgtcttaccgctcacctcgcctctctgttctaggcttgcattgttcattaggatagcctgtactgtcctggcttctttccttctgtgttggctgccgttcttgacagaaagggagcatgccctgcaggttgttagaagactcttccctgttgaccgtggactgtttgaggtatgatcgaatggatccatcctttctgttgctgacctcctctgtaaccttgaggagcccgtgtaggcgatacccggaacaggaacttccgtttcctcctccagtcagttatttaataactgccaatgtagtgcccctagctcagttggcactttttagtgccttatttgaataggtaatgtttttgccataactaggtccataattcaattgtacattctttctagtcagattggtccataacaaaagaacattagatgccgcagccaccaagttagttaacaagcccactactgtgttggttcatgatctcttagtttgccacaattatttgttaagctgataatcctgtttgccttagaaagatctcatcatttcttatgaaatatataaccttcacctgtggtaatttttaatgagaacctttcatttaattctnnnnnnnnnnnnnnnnnnnnaacttttattgcatgaaataatttgatcatttagaattagtaattaagctaaacaaaccatttatttctggagcaaaaggtcttttaataaacttagagacaacatatttatagataatttgcttttgaataacatttcttttgaaaagaattagaaagcatttctaagttttgagtagataatttctataaaatatttgaaagagactacgtattatgtttattgctgtgaaggtagaggggtgtgtgacagtgtcaatgtatagtactgttgatccccattgtggctaacatcactcattacgtgctagaccctaccacataattttcacgatccctaaaatggtcgttgttcctgtcgtacagatagaaaactgaggccgggcattcataaacctgctttgtggcagagttgttatttcaaatcttaataaccttaacagcaaagaaaaacttgatttaaaaaaaaatacaatagctaccttttatatgctgtacctccaatttcagaaagtgtccatgatgctaagtgtgggatagtgtcaggtcaggcatcatagtgtatcaccagtcccccaagtgtctatgatgctaagtgtgggatggtgtcaggcacattcatagtgaatcaccagccccaccagtctagatctggtctttgacccggaagaggaagtgggcagaacacttgttagaggccatcactctcttgatgtcgtcctgcctggacccctgtgagagtcacagctgtgagtggatagattttattatctagggagctgaaatagcaaattttatcttgagtgagcctagcacaatttctaatgttttaaaacttcttgatttattagccattagtgttggcattactcgtatctattagataatgtgacaggaagttaaatttgtaataaaatggggcaaatgtaattaatatttattttataaatttggggagctttttgcttatattctgctttttgaagaatatcaagtgtttattaggatatagattatagtttactcatgctttacataatctgtatttcaaaagagaaaaatgtttgaggctgggagtgtatatttttagtgcttgaggagtttaatgtacgttcttatgaatgtgaatgaaagtttcatgtcttgaaagtttattacctggagattataggctgtacttcatggggtttaatatttccttcaattatatcaaaatgtaaaagtaacaactctttttctaaaggataaagtcgctaatatttggtgcagcgttaatgtctttctgaagattaaggacactttgcctcgccacatccagatagcgatcaggtaactaacaaagtttctatatagtactgtataagtcactcttcaaaaacactacagtactatgctacttatctgagctgcttactagtggctttccacttagtacagtaaaattctgtgtcctgcacctccttccccccaaacaaagttttttgtatagccctggctgtctggcaactttctttgaagccctggctggcctcagagatccatccacctgcctctgcctccccagctgggattaaagatgtgacccaccatgcccagcttgctcctctcctttgctctccctcttcccctccccagttcgaattattttatgtggacatttgtcctatttttttctttaaatagaacatactttaactatgatttagtattattttgaagattcatgatttttataggtgtgcagctaacatcagccagaaaaatacagcaagttagagagaattgtgtttgtgtgagtttatcacggtacttggctaatgcagttgtgaggagttgtgggggtctggctaaggaagcaaccagtccacagggtacgtcaggaatatcttgggaaggaaatggaactggcccacagtgactatcaggagggcttccaggacattgattgctaagcccccaggacagactcatcattgcttgacatcattagcagatagtattgcctttcttgtgggctctgactctcagaatagaccctgtagcccaccctctcaggaagtgtgcagaaagggaggttggggacttaagcctcaccactcacaagttacagaaccacccaaagtgaggaggtgaggttttgtgttgagacattatctgtcttcgggctttatgggctgtttgtcacagttctgagatggcccgtgtttagcttttctccttattcatcagccacatctaagagaagctgtatagctcactcctgtagtagtagtcagagactattaatctcagagtcataggtttgagccccatgctggatgccaactgtagcagtagccaattaatctctatttaaatcagcccggtgctggcacatttctcactacccagccaatgttttgggttctaaaatgaaagacacatacacatggccttatattttaatatgtcttaaacaggtcaatggccaggtcacttttaaaccttcacacagataacacattctctcctctgatattcctgagttattacttactaaaacctgtattccacattggctatcccggacccaggcctcttgggctgagttcaccaacacctatgtcagggctgtgttctctgtccagcatgtcaggtctggcatctactttcctggcatggtggctttcttttccctccctcagtcccttgtctgggaatgctaaaagtttcgcctctgtctccctgcctaaccattgaccaccagaaattttatttaccaatcaaaaccaacgggaggcagggaccctcagtgtcttatgtgtggattcttctacaattttggggacccaactaacataatacaaatattagactaaaccacaacatactctcttatgattggttctttctggagttgaaaaagatttgtcaacttttgcggagtgagggccaggactcttctggaagtaaagtttttgaatatttgtgttgaaaatacagtgttgtctccttaggcctatggggttttctctttctttctttctttctttctttctttctttctttctttctttctttctttctttctttctttctttctttctttcttctttctttctttctttctttctttctttctttctttctttctttctttctttctttctttctttctttttggtttttcgagacagggtttctctatgtagccctggccctcctggaactcactactgcctgcctctgcctcccaagtgttgggattaaaggtgtgcgccaccacgcccggcctgatggtgttttcttattttctagtgtttggtaattgccctgcaactatgacacatgatattacatattacatgatatatcatatgtgatattaaatgctgaatgacatatacagtacttagtattgtttgatttgtattatgtaagaattgtgtacaaaagtgtatacatatttcaatgtgttgttttattcacattttaatttaaaatttaataaataataaagtttaatctgagatcatcttggattattgaataatataatctttactttaaaagttaattgttttagctagatttctaattaaaaaaaacctatttccttgccttttagcttttgctttacacttttgagcttgcttcctgcatgtataaaactgacagttcgaccctcttgtaaaggattcagatttactctggtaagtttctcatttttcttaagagacttagttcttgctatagctgacatttttaaagacacctgtaatcacttgcttggggtaggactgagtgggctgcagaacaaagcactgatcatctgacacactggcctccgtccttgcaaatgctggattaggccgagcagtcagaaccttcagttccgttcactttaagaaccggtgggtgttttgctttgtattgattggttgatgagggtcacaaaggcggtaataacgtctgtccgtctgacgctgttgagcaggtggcactatgttctgctggtgccgactgagtctgtgatgtgctggtggaaggagagatcttggaggaggactatagacttgctgagcaagtgggatttcagtcagctttgggaggctagacaaggcttggaacttctggacagctgaaggcagaagacagacagcaggatgggaatggatgttacatgtgtccctgtctgtttctgtgtgtcacgggtgggtgagaaaaatataaaaaaatgggaaaaatttcagaagatgtcagatgtttggttgagaagtgtgcataggacaggcacagaaacaggtttgggaagagaagataatggaaacgtttgggttgtttgaagcataaagggataagtgacatggttggggtgaggtggcgggaaggagtctaactgatgccttaggaacgacggatttcactgcagtccagattttattgtaagggcactaggaagccagtggggtttgaaacgggtacgatgtgattgaaggttactgtgagatagcagtgctgtactggtccagctgacatgtaccttgcgttgccaacattgacagagcagaacggagcaaaggggatggctgctgtatgtaggaagtgtcagcacatttacagagtgatgtgtagggtctaagttgtgcttaagcagcaggacacacacagacagatgacttcataaaacacatgtttcactgggcgtacttttttttttaaaaacactacaatagagctcttttgttttcagttttagattttgacctttttatgtttcatacttaacaagtttacatatattttgtgtgtgtgtgtgtgtgtgccatagtgtgtgtgtgtgtaaaacagggtagcttgtgggtgttggctccctttttctatcaagtggatcctggaggtggtacccgtcatcaggctgagcagcacaggcctttgctgtctgagccatctggctgactccatactttaagtagttttccaagttccaagaggtgatggggtttggttgttgtattccttcctgtacttggtagttttgtttattagtagctgagttccagaattattttagatggttctctatacccttttaatagttttggttttgtttttcatttattaattactatgttttggggatgggagctttgcttgtacctcagcaggtcaaaggacaaattgtgggagccagttctctcttccaccatgtggggcctggggcctggggattaaatttggtcatcaggcttggtggcaagcaccttattcccactgcaccctctcaccagctcaataattattactggctttttaatttacacacttaaatttagttaagtaatatgtatattctggctgggtgtggtggcacacgcctttaatcccagcacttgggaggtagaggcaggtgaatttctgagtttgaggccagcctggtctacagagtgagttccaggatagccagggatatacagagaaaccctgtctcgaaaaaaacaaacaaacaaacaaaatagataaaaataaaaaaaattgcatattctgtgtttgatttttgcctccaggtagtaggcataatatttgaactgcgtgttttatttagatttgtaactacactgatatatttctcacactgttgaatcatgtcttactttcttctttcttaaaggttagctgtgcgctatcattctttctgttttctttccaagtacatgaaaagtccattctcttggtatcattgtaagtagaaatctttgaactatacatttattataatgttcattgtataaggatgtttataaaaatgttaatttaaatgtaaaataagaccacacaatagttttgaatatatttatcttagtcattctcagaaggataatgctttaattttactttataaaatacattttaaatcaaaacagttgacaaaattattattgatatattctcatgttttccaggtcttcatattttctctatactaatcaaattatacttcataatttctctatacatccttcaaagtggctttcttgcttctcctctttgccttttgtatttcattcatttccacatcgatccgttagccttattctctccatttaccttcatgatatctttcatatgttgtgttctgttttttgtcctctgcttccctacaccacagtagatgaaggtttcagatcctcttggtaatccttaaagagattgttttgttaaagaacattacagttttccatttgtcatagcaaagaaaaactgggtaaaactggggatgtgttatcctaatactataatattgtataagcttagagtagnnnnnnnnnnnnnnnnnnnnnnnnnnnnnnnnnnnnnnnnnnnnnnnnnnnnnnnnnnnnnnnnnnnnnnnnnnnnnnnnnnnnnnnnnnnnnnnnnnnnnnnnnnnnnnnnnnnnnnnnnnnnnnnnnnnnnnnnnnnnnnnnnnnnnnnnnnnnnnnnnnnnnnnnnttgggactacaggtgtgtaccaccactgcctggctccaagcttaaatctttatactggttgacatgaagaaaaaaacctttaagaaacctttcctttaagaaaggggctgtgttagttctgtggctgtgataaagcaccatggccaaggcgaccaatggaaggaaggctgtgtctaggcatatggttccaaagggatgagcatccatccccatcatgatggaagcatggtggaaggcaggcatggtggctggagtatcaagctgagagctcacattttaatcataagcgtgaagcagagagggcacgcctgaatgtcacattcttttaaacgtcaaagcccagctccaatgacatacttcctccagcaatgctacacacatgttctaaacctctccaaacagcgcaaccaagtagggaccaagtgtaaacacctgagtctatagggggcgctcttatccaaaccatcacagcgggaggatgctcaagctttttggaacctttttaaacagaagaggggcgagattaatagtaatggcaccagtaattcaacagctgtcactcttcgaaaactttattttgtattgctaaaaataaatattaggggatacttgcagagaacagtgaaattaatcattggcttgagtcacacggctaagtgtcagctgtggagctaggactaagaccgtctaactagtcagcttctcgttgagcatggatgcagtcaaatccagaagacctcagacaaaggctgtggtagataccagagacaccagaaaagtggtggctccgtttatcagcatcgtgttcccagttctctgtccttgccctttccatgtagcttctaattattcatctttcatttttctatcagttgaatatttttaacctgtccctttataattcacctttgttgtcctttctccattaacatggcatcctgttcctcataactgtagtttgtaaccggctgaggagcatggaacatgaagaagtttgaaaatggttgcctcgggagtcactttgtgcttgcagagtagaaggaaatgctttctctggtcttttcctcaagggactgtacatgtggcacacgaagtgtttgctagtgacctagtcaagtggctgttggctagacgtgtggagaagttgacacttcctgaatagtcacatgcagaccttttttcttttaaactaatcttgaaaatcagacatgcagagtatatttattttttccaggctcggagtaaaattatattctgtaacattaaaatgctttttcttgtcattttagaccagtttgcttagttttaactgaaattcctttcatgtcaacctggtttttactagtttcaacatttaggtgagtcaaaccaatttccatgtaatatttccagtacgattattacagtcgttgaaaaatttacaccgtagctattgatgcttttgcggctttattttcctttacagcatgctgcctcttctattaaaggatgaactcctgctgccctcggttgtgacagtgatggcatttgtaatagcttgtggcactttctttccaatgttggagaacacttccgaagaacaactgcagttgaagtcctttgctgtctctgtaaggaggcaccttccgggcttcacatttttgcccagaattatgcagtgtttggtaagttaggcagcagcttgctttccagtatttaatttctgcatgtatactgcttgcctagcaatacatgtggaggttagagggtaacttttgggagttggctgtttccttctaccatgtgtgttctagggcttgaactcagattgtcaggcctggtggcaagtgtctttaagtgccgttccatcttactggctctgttcagttttaaaggagtatattttttagcatattactagtttttttgtaagttactgaatttttgttgttgttggataggatcatactcattatgtagcccaggctagtccagaacttactatgtagcacatgcagcatttgaactttgcccttcctgccttggccttttatatgttaggatcatagacttgaaaggccatttataccctgttgagatgtgttctataatgcatccatataacttacacattttactggggttaagtatgcgggtgcttataactatcattatcatctaattttagatgagttttaatcatactccccgcaaaatgtccctacacagtggcagtcatttctaattataacatcattgctaaccccaaccgtggacagcattaatctgctttttgtctgtaatgtgcctcttctgaatattgcatattaagggaatgtcatagtcatttcaggctgctgtaacaagggaaggctgactggatgcttaagcaacagccattgacttccccagtctgaagctggaggcactggccgtcagggttggtctctagtgagtctgctcttcctggcagagctctcatttgcttctcttcacatgcctctaccttgtctgctatcttcctttattataaagattatagtcataattgcctttctaaaagccagagtccaagtatagtcaattaaggggttcaggcttcaatgtgtgaatttcttgttttacatgtattggtgtgtgtgtacttgaatacatgtgtgtgtgcctgtaccatgggacctgtgtagagttcagaggacaacttgttaagagtcagttcaggccaggcagtggtggtgcacgcctttaatcccagaggcaggcagatttctgagttcaaggccagcctggtctacagagtgagttccaggacagccagggctacacagagaaaccctgtttcaaactgccccaccccaccaaaagtcagttcagttctttccccatgtgagattcaggggtagaactggggttgttgggcttgacagagctagcacctgtacctgttgaatcatcttgctgctgggacacagttgggcccatgacatggaatcataaaatgtggtcttcatgactggtttctttcatggcatagtcagtcatgctatgtcactgtttagtcatatatcattatttagatttatttccaaattatatctcattaacatgttactctccctccccccaatcagttaatggcagtaggctgattttgttattgtgagtaatactgttaggaacatctgtgtacaaaacctgaaccccagttttcattcctttggaacatatagcttggactagagttgctgggcgctgtggtaactcaatgcctgctatttcagaaatggcctgtgaggctctatattgccatgacatgtgaaggaggacacagtgccatgcccttgatggcactgctgctctcttcagttatagctaccctattagttgtcagtggtgtcactacacttcagtttgcagtttcctactgaagatgttccatatctttccatgtcctttctggctgtttgtgtatcttttgggaaaattactcaaatctttgttcctcctctccccatcatggtaataagatttgcacactctaggctacctttctttttcttttttccttctttttttattagatattttctttattaacatttcaaatgctatcccaaaagttccctatacctttcccctcccccctccccgctcccctactcacccactcccacttcttgcccctggcgttcccttgtactggggcatataaagattgcaagacctaggggcctctcttcccaatgatggccaactaggccatctttagactacctttcaatgacagctatagcttcagccacttttgcctatttttaattcagttgtgtattctatttttgaattgcacagccttttatacattatttaaaatgtgtgtttttgattggatgagagacatggctcaagttaagaatatataggctactgcagatgacctgagtttaatgatgtgaaagtaaatatccgccagttcagattagttctcctctttttctttttcttgttgtggctgaataaaactctactgtatatatgtaccatattttctctattaattttttggtccattcctgggctggttctgcttctttgccattgtgatcactataacagtaagcttggttgggcagcagtcagtgtagctgtgggacactcactgacttgcagtctgtggctctatctgcaggagtgtaagaggtagctgatacagcagctcgtaggtgcgtttggttttgtttgtgcttgtttgtaggcatcctgcacactcagttctctagtggctgctgtagcttctctcacccccagcagtgtatccgttccactgtcccacagccttacccacaggtggtcatttcttttcatcaggacagtcattccttctagggaaagatgacaatcataaaggagttttaatttgcattaatcggatgacttaggatggtgaacactttttcaaatatttattagccatttgtatttcttttgagatctgagtgtttggttcaccattggatgatttttttaatgttgttttatgtttaaagttttctatgtattataaagatggctcttctccacccccaccatagttttctatgtattataaagatggctcttctccacccccaccataggctttttcttactttggtgactgtttccttttcatttccaaagttttgggtcttatatcctcctgaattgatttttacccaggataagatatggatataattgcatttttctacatttgcatatccagatctccaacacgatttctgaagaggctttttcccatgtgggcttttgacacctttgccaaagatgagttggttgtagatatttgggttaatttctgggctctctttttattggtatgcttgcttatttttgtgcatttatatgaagtttagggtcccccctttctttgaagaatgccattggaaatttaaaagagagtgttgttgaatatatagattgccttaaataacaaccatttttacaatatcattttttgacatgcagtttgttttgagacaaagttttatgtagctcaagattgccttgaactcactgtgtatgtgaaagtagctttgaactaccaatcttcctgcctctgtcttctaagtgttagaattactggcatatgtgagcatgcctggtatttaggctgcattctttcttgatcatgttttttctctccctcaatcctcccagatctttccagatcttccccacctctctacccaccagctttacagtctatcatctttaaaacaaacacaaagcaacccccattcacacaaaagacaatgaaacagcaaaagactagcaagacaaaaattacccaaacaaaacggaaaaaaaaaaaaagtctacaaaaatattgagtttgttttgtgtttggcaactactacttggcatggagcctgctctgaagtgtgattaatatactcaatgaaactcctttggagaaaattggtttttcctttgccagtgggtatcaattgctgatagcttattggttaggagagagaacccttgtccatttccccttttcagtgctgggacacatccggtttgaacctgtgcatgctgccataggctgtgtgagttcatatgtgcatcaaccctgttgtgtctggcagacactgctttcttggagtaatccattacctttggtttgtataatctttctgactcctttacttcttaaagcccagagcttcgggagatttgggagtggggcctttgaccaagacatcctatcctgtttatgattgctccaaagtctcttattttctgcacattgttttttagttgtgagttcctgtgttcccatctactgtaagaagttgtttctctgaagaaaggctaaatgaggtattaatctatgagtatagcagaacatgatcaggagccatttattgtattgctgtgttcctttagcagaatcatagtagtgtgctttcctgtaggttcatgacctattttgtctcaggttcttggccactttagcattgtcacctatgggttccatctcctagagttggccttaagccagtcagagagaggttgcttacttccatagcagttgtgccactgttacaccattctgccttacaggtagacgctgctgtaggtcacagggcatgaagctgggagacactgatgatggtctctcaaccgtggtgatgtgcagagtactttacagtgttagacagcacagtacatgaacatctcactgagcatctgggcagctttgcactgatggtgatccatatgggagaacactggtgatgtagacattaagaggcaaacaagaaaaacaaggatagaataactttcttactcagaggtttacgtggaaagcaagatgtaaaatttattttgtgagcatatgcctggatacttggatgtatgcagaactgtaccctctgtgacagccccagggcggttgttaggtgggaagtatcataggctcctcagtttattcaattcattgagttacttactgtgcactcagtgcagtacatagtacattgcaggttgaaagtacaatgagaaaaacagaacccaaaagttattctagtgggacaatcagtgatgctagcatgtaggaaacagacaacacagtgtttactggtcacacgtggagacacaaatctaatgagattagaatgtggttcttcagccgtgagtcccagttctgatgctcagtagccacacacgctaatagcctcctagactggagagtgcagaaaaacattcttgtagaaaagttgtattcacaacatgttctagagaagccagttactacttagttaccataaatgtgtacttttattactgattttgacacttaatccaataagaccttgtaattttatttaatgtgcctctaacttttcaagtccagagaactatgtcttataatttaccatagtactagctcattgaaaatattcagtgaatgtaattttccattgatcatagaaaaaaaatcagacaggttctcctggttagtctagaattttatattccattgggcctgggtaaaggaatgccattaccttaagtagtgatatcaggtattccttgttagggccttattcttcagtgccttgtggcatgaagtgagataggtagagggtctgaggcttggccacaactatggtttcaggaaaggaaaacccagggccctggaagccagcagcctcctcagacagcaggagctcatggtcttgccttggttgtgtccacacagaagatgcccttatacttacacagttttagaagacatgtcctccaatgacacttcctagccttggaggaaaaaaaattatacttgccaggaagccattgcatgactttgccagacccctgattttcttgaaaacagttcagtactgatgtcgtggagtggaaccagagcacagcgggaaaagcagaaggaaggcaggtgttcccgtgagtgccgtaaggaaggctgtctgttgagccctatgtatgtggggcatcttacactgaaccaaagaacactttcatgctgcaaagaggactaggtatttcccatcagatatgaaacattcatggagtcccaagagaaaaaatgcactgaataaaacaatgggaatgccatgttccatttcacagtgttcttcatgcagaaaacccaagaagcatgtgcaggagcctggacaggaactgcgtactatggtaggtgagggcactggatctgctgtgcaaggctcccacagcagagctttgtgagaacccaggtaatgccacccagaattttcttaagtagatttttgctgttctttgttatgttttagtcaatcgctttaattctggtgtactcaaatccaaatttccaatcagaatttatcttcattatattgaatgaaccatggtaaagtgtgcctgtaacacacagtttgatgcagggaattctatagacagaagtttcttttaagagaaataactaacttgaaaatgaagtctaaaaacattacataacaagcagttacatagactcatgaatcgaagggtatttatctcagatgtaagcattggtaccactttctgtgaactaatttattttccccccagaaaatccatctccagggctattacaggagacaggaggacaagaggatggaactactgtagtgtcattgtcactttgaaaatctttgcagccaaattgagttgtgtgactgtaatgatggatctttaaaatttttttgccaaattaataatttggaaacatactagaaaatgtatgtcaaaaccgcattgttctcaaagtgcacacttcaggagttacttctgtatttgaatgctgtacatagtaactgttggacacctactgattcttattaattatacaaccaactgacaaaaactggtgtcaactcaggcacttggtgtgactgcacacccctcctggatgtcttttaaattcatggcttctttttcccatgaattgcaacatcatacacatatccatgtattctgctaagcacataaatacaacctgctcagtctgagtgatgttatttgtaagtttcagggaccatttggtattggattaccagtagtatgctcttccctggggaagaatatatttctctcactctcagcattccttgcctgtagttctttgtaaaggattgagcccttgtgggctttccccaaccacaatagcatgcatctctattgctggtgtccttgttcagctcttgtttaggtagccatgttggtcagactatgggtatagcctctgatattactaggaaacatggtatcaacagcaaactctctgatcctctggctctttagaatttttgcatcctctttgcaatgattctggagccttaagtgtgggagttgttttgtaaatttatccattaagactgggctgtacaactaagcatacagttggttgtggttttctgtagcaatcttcttctgcttcaaagagaagtttccttgatgaggggtcaggactatacttaaatattatgggtaaatatttagaatgtcgttagggattttgctggtttagtaaagtggtagttacaagttctcattcaagatccattacttcactagccctgagtattggctaggtttctagttccaggcatggtatctctcttgttggtaagtccagttagagagctactggttaccaccaaggtatgtgtgccactactgcacccttagggttagagtgccatggtggtcatagttgtggctcataagtgtcatcatatttgggtaggactgttggtttcttccctccactgaaagcttgcatgagaccttctaaaccatgaaaactagtcctcataaagggggttttcaaatcagttccagcttgggcctctgggtactgcatctgaaatgcatggtgccttcagcaatggggatgtaccttccacttttgagggacagtcaagggttaatagcaataacatgtaatgttttaggagtctcttgcacaaaccttcacagactcaaaagaaggcttcttggggctattggttttttgttttttttgtttttaatggtcttttgcttttggggacagcattatcagcttggctacgaaaattttatttaaactatatatatttatacagagacttacatgtttagtgggcttttttttttcatagttaatagtacgattccttaacacttattcagacatagtgttattttccccccatctttcccttccccttctctaactagagtccgcgccccagttatcattcactccatccagatcactggtaccctgtcactgctctattgctctcccatactcccagattggccatgtcctccttgctgtcctgcattctgcagtcactctagactatgagtcacatttgaagccaggagtctcatatgagagagaacgtgtgacatttgtccttctggggtctgagttcatggtattttccagttctgtccatttacctgcaaatttcaacttctttaaacagctgaatggtacttcatagtgtacatgcactacattttcattatgcattcattggttgttgaaagaaaagctgccccctttggaatattgtctaatagtgtaaataaatatgcctcccctaagatcaattttttaatgaggactaatttagtaacttctaaaattatgcttgtaaatatgtgtaattagttaacagctcaaatatttgggagcaaggaattaggtagcccactatccaggtaagaacgagaaagccacacttgttggaaggtgaagctttggtgtcatgtgacatttgggacagcaaaggtgagtgattctctcttttcccttacagtttctttcttcagtcatcaccatggtcctcctgacgattttgagtgtaacactggaccctcctcagaaattaccagacttgtttcctgtacttatatgttttgtttcctgtgtaaattttgtattcttcttggtatactttaatattgtaatcatgtgggattccaaaaatggaagaaatcggaagaaaattgagtag

SEQ ID NO: 76 - DNA, 1733 bp, Mus musculus
gctgggagcgcgcgtgctcctcgggctgtgagtgcgcaggcgcattcgctggttctctgcgggcgccaattctggagagcagaggctggctacaaagacataatcaagttttcactgttttgaagcacagcatcgtttacaatcctctcaagctcctaatggtgacatcgctttgaagaaggagacccgtgactgactttggagcaagcatggagagctggccgtggatggcagtcgtggtcttactaggacttacggtgcggtggacggtctctctcagttcctactcaggtgctggaaaaccacctatgtttggtgattatgaagctcagaggcactggcaggaaattacccttaatttaccagtcaaacagtggtattttaacagtagtgataacaatttactgtactggggattggattacccacctcttacggcctatcatagcctcttatgtgcatatgtggcaaagtttataaacccagactgggttgctctccacacatcacgaggctatgagagtcaggcacacaagctcttcatgcgtgccacagttcttgctgctgatttgctcatttacgtacccgcggtgcttttgtactgttactccttaaaagaaatctcacctaagagaaagattgctagtgcgttatgcatattgctgtatccaggtcttattcttatcgactatggacattttcaatataattctgtgagtcttggctttgcgttgtggggtgttcttggagtatcttgggactgggacctgctagggtcactggcattttgcttagctctaaattataagcagatggaactttaccactccctgccatttttttgctttttacttggcaagtgttttaaaaaaggcctcaaaggaaaggggcttgcattgttcattaggatagcctgtactgtcctggcttctttccttctgtgttggctgccgttcttgacagaaagggagcatgccctgcaggttgttagaagactcttccctgttgaccgtggactgtttgaggataaagtcgctaatatttggtgcagcgttaatgtctttctgaagattaaggacactttgcctcgccacatccagatagcgatcagcttttgctttacacttttgagcttgcttcctgcatgtataaaactgacagttcgaccctcttgtaaaggattcagatttactctggttagctgtgcgctatcattctttctgttttctttccaagtacatgaaaagtccattctcttggtatcattaccagtttgcttagttttaactgaaattcctttcatgtcaacctggtttttactagtttcaacatttagcatgctgcctcttctattaaaggatgaactcctgctgccctcggttgtgacagtgatggcatttgtaatagcttgtggcactttctttccaatgttggagaacacttccgaagaacaactgcagttgaagtcctttgctgtctctgtaaggaggcaccttccgggcttcacatttttgcccagaattatgcagtgtttgtttctttcttcagtcatcaccatggtcctcctgacgattttgagtgtaacactggaccctcctcagaaattaccagacttgtttcctgtacttatatgttttgtttcctgtgtaaattttgtattcttcttggtatactttaatattgtaatcatgtgggattccaaaaatggaagaaatcggaagaaaattgagtag

SEQ ID NO: 77 - protein, 503 aa, Mus musculus
MESWPWMAVVVLLGLTVRWTVSLSSYSGAGKPPMFGDYEAQRHWQEITLNLPVKQWYFNSSDNNLLYWGLDYPPLTAYHSLLCAYVAKFINPDWVHTSRGYESQAHKLFMRATVLAADLLIYVPAVLLYCLKEISPKRKIASALCILLYPGLILIDYGHFQYNSVSLGFALWGVLGVSWDWDLLGSLAFCLALNYKQMELYHSLPFFCFLLGKCFKKGLKGKGLALFIRIACTVLASFLLCWLPFLTEREHALQVVRRLFPVDRGLFEDKVANIWCSVNVFLKIKDTLPRHIQIAISFCFTLLSLLPACIKLTVRPSCKGFRFTLVSCALSFFLFSFQVHEKSILLVSLPVCLVLTEIPFMSTWFLLVSTFSMLPLLLKDELLLPSVVTVMAFVIACGTFFPMLENTSEEQLQLKSFAVSVRRHLPGFTFLPRIMQCLFLSSVITMVLLTILSVTLDPPQKLPDLFPVLICFVSCVNFVFFLVYFNIVIMWDSKNGRNRKKIE

SEQ ID NO: 78 - DNA, 89605 bp, Homo sapiens
caggagtttgagaccagcctggccaacgtggtgaaaccccattttctactgaaaatacaaaaaaattagccgggggtagtggtgtgtgcctgtagtcccagctactcgggaggctgaggcgggagaatcgctttgaacctgggaggcagaggctgcagtgagctgagatattccactgcactccagcctgggtgacagagcaagattctgtctcaaaaaaaagaaaaaaagaaaaacaaagaaatatttaaccttatctttcatgtttaactcatttttcccatgccaagaatcatggtctctaaacaccagccatgatggaatttgaatagcatatatatcttcattttctttatcccactttacacatatagtagtctcagaataacaattccaaccctaatacccacaatacgattactaacaattatttaattattttaacagatttttttttcccttaaggtatatcaaactaggaattaaccatcaaattactgtgttttttccttttcgtttctttgagacaggatcttactgtgtcgtctaggctggagtgcagttgcacaatcatggctcacctcatcctcaacctcctgggcttcatgtgatcctcccacctcagcctcccaagtagctgggaccacaggtgtgtgccaccacacccagataattttttaaatttttttgtagagatgggatctccctatgttgtccaggctggtcttgaactgctgggctcaagtgatcctcgtgcctgtgcctcccaaagtgctgggatagcaggcatgagccactgcacctaggccctactgtgttttttctgtttattcttcttctttttttttaatggagtctcgttatgttgcccaggctggcctcaaactcctgggctgaagtgatccttctgcctcacagcctcccaagtaactgggattacagctgggccattatgctggctaaattatatgttttaaagtcacttggaacagtctctttgtgtagcagagccatcagctggatatatagttaagttattttatttcactttatttttgaattttaggaatttattttttccattttaattttgctttatcattaatttaatcagcaaatttcatattctgacttcctttaaatagccctaaaaatgaataaaagttagctaagatctatgttcagatacttatctgctgtatctcttagggaaattgtgcagtgtctcacaccagcatttccaaaagtgtgtttcatggaccattcttcagggcgagaagtgggaggtggggtgggtgtgaagataggagtctatagtcacatgagtctaaaaatcctatattctcttggagaatcatgatgtacataacatataaaaggctttgaaagccaggtgcagtggcatgtgcttatactcctagcttcttgggaggctgaggcaggaggattaccttaagccaggattttgagggtagcctggcaacatagtgagaccctgccttaaaaaacaggcaccaagaagatctgaagtaaggaagctttcttccttagatttgtgtaacctagtgttttaaaatttatttgtctgggccgggtgtgatggctcacgcctgtaatcccagcactttgggaggccaaggcaagcggatcacctgaggtcaggagttcgagaccagcctggccaacatggtgaaacctcatctctactaaaaatagaaaaattagctaggtatggtggtgggcgcctgtaatcccagctactgaggaggctaaggcaagagtattgcttgaacccaggaggcggaggttgcagtaagctgagattgcgccactacactgcagcctggatgatagagtgaaactctgtctcaaaaaataaataaataaaatttatttgtctgtatgaagagactgtcctcacacctttttttctcttcttttttttttctgttttaataaagttaaagagtaaaataaaaattcacaagctgcttccttgtccatctgcctacctccatcccctaattgcagtctttgacactggttcgttatccgtcaccccattcacacagacactggatgtccaactgagaaaacagaactgcagtaagtacacggagacatgatgtgaattgcatccacattcaagattaaactgagtgactctgcattttctgggttctaggtggttgcccttcattaggcaaatagaaaaaaattccctggaccagacgcttcaaagctgaagccccaagaccactgaagaatgccttgaagatactatttgcatcaaaatcacccatattcatgccctccttgtccaggtcctgtccactgtcctagcgagtctttttcttgggatcagagaagatggtaaaggcctctccaatttccttgaacttcccctcctccttctgaacctcagcactgcctccactgtgccaatctggatggtgcatcaaggcccatttgtgataagctttcttggtctcgtcctcagaggcattattgtccactcccagaatcttgtagtaatctttcttcttactcttcttcagtttcagctgtgcattttttaggagctgtttgtgttcttttgttttctctgtctgatacactttttcataattgtgcactgcttcttcatactgtttggtgttcatgtaacactgagctcttctcaagcaggcttttaaataggtgtcattgagcttcactgtatttgtgcagtcttgtattgcattatctagtttcctaagcttagaattaaccataacccaattatagtagagtttagcttagtttttatattgttggggtttatccccaggggtcatgtgtacagttcgtatgctagcttgtaatttccttccttaaatgctttatttctgtcttctttctttgctttgagtgctttgggatttctgcaagcaacgcaggccctctcatggagccatcctaagagcctatacaaaaactgaaatgacttgtcaatacaatcttcataataaaggcaaagaccttatacatacagaggatctgcattggtggactccatttgtaaaatgtcactggccacagattgtgcttctggataatgacccagcattactaaatattctgctttgaggattttgaagcaatggcaggcaggggcaagtgctcgggcacagtccatgcagagaacaaccttcctaatatcatgcttctcaaaatctgtttttgctaacttctcatattccattattgaattggcattcttgaactcctgttattcctgagcatttttatgatccagttctagggctctctggaaactaacatgtggccatggcattctctagagagagggggcacttgccccctcctagatgtccctgaacaaaactgtcatccaatctcaatgactggtgtgcatctccaagagcttcctggaaccttccaagcataatcgatgtggctgcttgattactgtagtagctagcatttttaggacatatgcctatggcttttgtataataattataagcttcattgtagtatttcttggcataatatacatttccttgttccttgaaagactctccttcccatggtgtacagttagacttctagcttccctagaagtgaagttctgatgggcagccaccaagtctaacttgtctggtttctattagcacatggctctgcatctggcatagacagagcagatgctcagaaaacatttgacgaataaatgatattgagtaaaggaagtgttacttactatggtagcctttagagagagattttgttggcctggcgtgatagctcatgcctataatcctagcactttgggaggctgaggtgggcagatcacctgaggtcaggagtttgagaccaacctggccaacatggtgaaaccccatctctactaaaaagacaaaaattagccaagtgtggtggcacatgactgtaatcccagctactcgggaggctgaggcaggagaattgcttgaacatgggagatggaggttgcagtaagtcgagatcgtgcccctgcgctccagcctaggcaacagaatgagattctgtctcaaaaaaaaaaaaaaaaaaagaaagagagagagaacatttgggcatcagagacaccagaacagcagtctgcaactagggagcctagaaccttcctgttttttgtgtgtgacaatagttattatctcactgaatgagagttctgtagaacatgctttggggaaatgtcactctcaagttttcttatatgtcagaaggggataataacacctgttctaccattgtctcagagttactgtgaagatcaagtgagctggatatgaaagactttggctaatgcctatactgaaacatgacaatgtaagtttaactctaacattctgctactcaggtgaacttatgccctacatggggcaagagtataatgagacttagaggttacagaataatggaaaatgagtcattttgacccataaaagggtcaattaaggaacaggtactgataagaaaatagattctatttaaaagaatagttatgatcaggtgaatggctttcagttaaaatcagagaagatctgaaacttatatagaaaagggcttgttttcttactgagtggaagtgatctaggaaagggactagaaactattataaaagtatgatttgtgtgaggaagtttgcctagctgattaaatattgacagtaccttcaataaagtatataatagtttgttaaggttgctgtaacaaaatagcacaggctgcgtggcttaaacaacagaaatttattttctcagagttctggaggcttgaagtcagagatcaaagtgtctgcagggttgatttcttttgaagcctctctccttgtcttgcagatggccctattctcctgtcttcacatggtctttcttctgtgcgcatgcatatctgtgttcaaatttccattcttgcaaggatccaggcatgttgggctagggcccatcctaatgtcctcacttaatattaattacctctttaaaatccctatttccaaatatagtcacattctaaggcactggggattaggacttcaacatatgaattttgagggctacaattcaggccaaaacaagttatatgcaatttgtaccatgagattatctttactctacatacatgaaatggccaccagaggttgctccttttgcaaaagacatggcagaaagacaagtaagtaaggggatttgaactctgattttttggctggtgagaaataaaattgttagttgggctcttgcccatttctagtttcatcccaacttttctgtagtggattacagatggccggaaattctttcctaccttcccactgagaggcagaatctatttccactctccttgtatcatggctaggttgctgtgtgacttgtaaggctggggtgtaagagatctgcaacttttgcctttgccgcttggaatgctctctctgggaagtgagctgccgtgtaaaaagtttgcgaaactttctgaagagagaagccctgtggagagagggctgaagctgttcacggatgtttcagcctgagctgatctcccagctgaatgcagcctcatgagtgacctcagacaatcccagtggaacagatgaaccacctacctgaaccctgcctagattcttgatccatagaaacatgagcaaataaaatcattgctatataagccgctaaattttggagtaatttgttacacagcagtagataattgaagccatcacctattagtcaaactgactttagagattaatagtattcatttcatattctttcccatctgcctttaaaatgcaccaactttttttttctttttttttcccaatggagtctcgctctgtcgcccaggctggagtgcagtggtgcgatctcggctcactgcaagctccgcctcccgggttcacaccattctcctgcctcagcctctcgagtagctgagactacaggcacccaccaccacgcccggctaattttttttgtatttttagaagcgatggggtttcaccgtatctcctgaccttgtgatgtgcctgcctcggcctcccaaagtgctgggattgcagccgtgagccagcgggcctgggcaacaacaacttttttttttttttttgagacggagtcttgctgtgttgcccaggctggagtgcagtggcgcgatctcggttcactgcaagctcctcctcccgggttcacgccattctcctgcctcagcctcccgagtagttgggactacaggcgcccaccaccatgcccggctaattttttttttgtatttttagtacagacggggtttcactgtgttaaccgggatggtctcgatctcctgacctcgtgatccacccgccttggcctcccaaagtgctgggattacagacgtgagccattgcgcccagccaacaacttttaagatggattatacattagtgtaatttgatttcagataatttttttttatttttttgagacagggttgtgctctgtcactcaggctagagtgcattggtgcaatcatggttcactgcagcctcaacctccctgggctcaagtgatcctcccatctcaacctcctgagtagctgggactacataagcacaccaccacacctggctaatttttatatactttttgtagagacagggtttcgccatgttgctcagtctggtcttcaactcctgggctcaaaggatctgcctgcctcagcctcccaaagtgctgggattacagctgtgagatactgtgtctggtcgtggtttcagagaaaattttcagataagaacagtaggcttctggtggggatgcaaatatatatatgtatgggctgctatatggtaggaggaagaagacacttcaaagaaaggctatgaaaaagtgagcacatgttaaagacaaatgataatagctattatttattgattgcatactatatgccaggcagtatattcaagttttatatgcatgatttcattttactctcattaaaattcaaagaagatgacattattattaattcttttttttttgtaggtgaagtaattatgccagagacattaggagactttaccaagttcacacagctagaaagtagaagaactaagatttaaatccaaacctgtttgttttcagagtcagagactagttcttaatcacctttctacactgcctctaaacttgatctgctctacaattttgctatggcttatcctttttgcttatagtaaatgctatcattcaaaatgcattttctgaacatctgttatgtaaaggcactggatattcacatgtgaaagatgatacctattgaaggtaaagagcaggagaaggtatatagatggcagtggtgagacaattcagctatgagttagtgactgtgatgtctcttccgctatttattcatgaacattttgagcattaactttttgttaaatactgggtcagaagctgttgggttgagaaacaggaaggagagattgataccaacttccatcactttaagatgtatactttttacatattaatatttctgaaattatatgttttacagtaattactagcttaaatggtagcattgttttcttcctcagtggtacataaaataatggtgctttttacaagtggtggaactttagattcaataaagtatgatttttggtctgccaaacatggttcttgttcaccagatgcttaatatttatgatcctgcaatgtaatggatttctccctacatttgtaaccatgtaacatccttcaccaatgtgcctttctccttttggcctgagataatgcatttattcaagtatggttgtttattttctctctatactgtctccatcattattcagcaaatgaaacactttcatctctctatcttcaccccaatttctttcctgggctctgattcataactgacacctgagtattacaactttcttgtctttatgttaccgtgaactcaatacaatgaaccatctttccctccaagccagattattctccaggcttcccaagatctatcagttcttgggaactgtaatgcacacttgaaaccttgggagccatccttgattcttccctctcctttgtttcacttgtacatatctagtatgctattaagacctgtacacgaggccaggtgcagcagctcacgcctgtaatcccagcactttgggaggccgaggcaggcagatcacctgaggtcaggagttcgagactagcctgaccaacacagagaaaccctatgtctactaaacatacaaaattagccaggtgtggtggtgcatgcctgtaatcccagctactcgggaggctgaggcaggagaattgcttgaacccgggaggtggaggttgtggtgagccgagatcgtgccattgctccccagcctgggcaacaagagaacaagagcgaaactgcgtctcagaaaaaaaaaaaaaagacctgtacatgtttcttcttgcattgatctctccctttgcagttccactattgccatctcagtccaagcccttgtctaatcatgcgtggactgctatagtctccctctgattcatctgatccattttcaccactttaagttttctctaacactgtaactgtactgtatacttgactccctgctaaaagtcatttaatagccccttactgatcactggatacattccagacaccatagcctggtattcaaggctctctacaattaccagtcctttccagcttcatcacccaccacctaaactagaggaaatgttctacacttttcagctgccacaatatttggcttgaaccatttcctttgtctagattcttactctcattctctgggcttatccagccaggctttccttcaaagctcagctgactcctccaggaaaagcatttcctgatggtttgcagtttacagtgaaccctcttctcctaactcctacagtgcttagtgcatatgtaagtaatgtaacatttagtatgtgtttccttctatagctttttatccttttatgcataaaaatgtctttccaatgagaattaaatgccttgagggcagggacctgccatatttctccatattcccagtgctgatggtcttttagatataatcatattttagacctggaagttcacctagccctactgatttctttcacagttgaagaaactgaggcccagagagaagttattcagactcagtagaaagccatagtcctagccaaatatttgctaacacttacaaattataggggttggcttacgtagaatggcaagattcagaagtggggaatgagggcactctctgaacaaaggaaggcaagtaaaaatcatcacagccgtccatgcgtgattggacagaagcctagactgagatggaaatagtggaactggaaaggaagggatcaatgcaaaaggaaaagtgtgcaggtcttactaacttactagataggtatttttggcaagtttgggaccaggtgattcaagctgcccgctggggcacgtgtagtggctactcgagggcagggctgtccttttgcacaacgcacaggctctcgcaaatggttggatgttcaatgtttcttactttagggggctgcccagtcttcttcttcgcaggcatgtggctagaagaaagtgaagcaggttggctttctggctcctcgagggcacaggcccagaggtggtgaggaccggccaaggctctctgctcagtgcagcaagccagggcccgcccctgacaggaatccgttggctaagcagccgctccggccttggccacgatcccaggaaagaagagcaaggggctttccacctgcccctagcctaacccggggctggggacctctcgggttccatcggctcttgccccgcctcctaagccggccgcctcctgtccaggccaggttgcccgcccctcccctcacgctcgacgggctcgctcccgcaccgggcgcgcgggtggtgcgcgggcacacggaggcggaaggccggaggggcagtccgccgcgggggcgagcgcgcatgcgccttcctgggacccacggcaggcgcgaatcccagcggccggcgggcggcggggtaagagcatgggatcccggaggttccggaccccaggccagtgtggggaggtgccgggggctcggacgcgccacgagccggcgcagagctggcgacccgtctcccagctccgctccactcccagggacgcgacgcgaggcctccccagcccttcctgcagggtcgcttgtgggtcgggtgaggggacgcggtgatagtggtggcacttgcaggctggggcggtcctggcacccttgtccttgcggttctgagggcctggccctcaagaggaggggcggagaaacgcgagaagggatccctttcgccccatatacacgcccgggatagctgcactcctcggtgttgtgtccactgcggtggaaggacctttcagactaaaaggagcaaagtcggttctgggatggggacggcgggcttggcatttgtcgagatgcaccgtcagggcaaaggaggacgaaaagcgcatctactgcctgcctagcaacttcgtggccagtggatgggttagaaaattactgttttctgatttacaggtggaaaaagtcgcaaataaccctttttctggtttaagcagaagagagtcgttaaaagcctcgcataatatctttaaccacacagggctcagtaaaattagggtacctccccgcttcgtacacacagacgcacacagctccattcagcaaatacttcttgggtacctgccttctgctaacactgttctacaagtggggaacagagagcaacgactaagacaggaggatccctgctcacagggagcctttagtcaacacatccaagtaatttccttttacactttttttttttttaattgagacagagtcttgctctgtcgcccaggctggagtgcagtggcacgatcttggctcactgcaacctctgcctcccgggttcgagcgattttcctgcctcagcctcacgagtagctgggattacaggaacgcaccaccacgcccagctaatttttgtatttttagtagagatggggtttcaccatgttgaccaggctggtctcgaactcctgacctcaggtgatccacctgcctcggcctcccaaagtgctgggattacaggggtgaaccactgcgcccagccccttttatgctttttaaattggaatataccatatagaaaaatactgtacgcaaattataagttgtaacttgttaatttatcctaaagtcaacacatttcctaaccactactcaaatcaagaaggaagattcacagcatttcagaacacctctctgggcacccctcccaaccaccatcccttctttcctccccaaaggtaacctctttcctgatttttaacaccatagattagttttgcctatttatgaacctttcatggaaccatatgatatgtattctttggtgtccagcatttatactgaaaattatgtgtgtgagattgcaccatgtcatgtgaaaatacaaatcctgttagtgaaaagaattaggaagcaaattgaaggtaatgatacaaacagtaaggggaggaagctttagtaggatagtcagggatgatctttctgaggggatgatttgagatttggcatcaatgacaaaagattagccattccaatcagttctggagttatcccgtgatgtttttattttaaataagaaaataattagggccgggtgcagtggctcacgcctgtaatcccagcactttgggagaccaaggagggtggatcacctgaggtcaggagttcaagatcagcctggccaatctggtgaaaccccgtctctactaacaatacaaaaattagccaggcgtggtggtgggtgcctgtaatcccaactacctgggaggctgagggaagacaatcgcttgaacccaggaggcagaggttgcggtgagccgatattgtgccattgtactccagcctgggcaacaagagcaaagctccatctcaaaaaaaaagaaaaaaaaacaaataaaataaaataattttagatcattaggtggaatgtaccaattttgccctaaattttttagttgatttattatattttctgaatatatttaaagtgtatcctgtggttaaaatggtccaacatttttcaaagagaagaggaaaatgtcaattttgtcgatttgctttttatttttttttgtttgagatggagtttcgctcttgttgcccaggctggagtgcaatggtgcgatctcggctcactgcaaccttcacctcctgggttgaagcgattctcctgcctcagccttccaaatagctgggatcacaggcgagcgccaccatacctggctaattttgtatttttagtagagatggggtttcaccatgttggtcaggctggtcttgaactcctgacctcaggtgatctgcccacctcggcttcccaaagtgctgggattacaggcgtgagccaccgcaaccggcatcaatttgcttcttactttaaaaccccaacctaaggaaaactgtaaaaaaaaaaaaaaagtaagtggttaattgagttttactgcttttgtatttttttctcacgatttggggttattcttaatgattcttaaaaaggctcatttctctaagatggaaagttggtgtggttaatgcaagtatattttggaagaaaagtaaaaaccaaactagataaattgtttattggaagactttcccaaactaaatacaaagacaagattcctctttctcgctgtaccaaagataaatcatgcctttgtctacggttgtggttttatatttacctgtaggtgaatgtgttctaaatagaattgactgtgtcattatctacatatgtgttgtttttcttttctcagaaatattcccttgtgagagtaaatctttactatatctttagatgtattgagtcccatttaatagggagatccaccttttgatgtatattcccaactaaaggactagggaataaggaacttaaaataccacgtttccttcacattccttcccactacccctcccctcgaattctctatccttctacttggtttactgggttcattgttgtaggtactgtactcagctgaatcttgatatctttttttttccccttaggatacttctacatagacataatcaagttttgactatttggaaaccaagcatcattaaaattctctcaaactcctaattgcgaagaatcgataacatttcaagaagtgataacatttctctgaacaagaaaagaagtgattgaccacgttttaaaagtactctggcactggtgctgtgttttcttcccctccctaaatttgaagaactatggagaaatggtacttgatgacagtagtggttttaataggactaacagtacgatggacagtgtctcttaattcttattcaggtaatacatttttactggttaaaaaaaaaacgaaattttcctttgaataggtgtttgtttggggaaaagtttaccattttctgaccagtacagagaagaatttcaggcctttttgatatggttgagaaaatacatttaaatgtccagttctaatagaaagaatatggataacagctaaatagaagcatgcgctttgtgatgtgagaaagcaaaaatgtgttctaacaggtaagatgacaaattgagaaatgattctgtattaaacattgaagaggaaaatgagctagcacttcaagggaggggtggagtctgtttagggtagagaagcatattactggattaaagggaagcgatcagtgaacaagaataaaattgggaatgagagagggggaattgatggagtgtggtcctggtgtgttggattggcttaaatgtaactctgcaggtacctatttagcacgtctcatgttcccggcactgtgctagcttctaaaaatacaagatgaatagccaatactcagagggcccacattttattttattttattttattttatttttttgatacggagcctcgctgtgtcgcccaggctggagttcagtggcgcaatcttggctcactgtgacctctgcctcccgggttcaagcaattcttctacctcaaccttccgagtagctgggattacagatgcacgcgaccatgcccagctaatttttgcatttttagtagagacggggtttcaccatgctggccaggctggtgtcgaactcctgacctcgtgatccacttgcctcggcctcccaaagtgctgggattacaggcgtgagccaccgcacccagctagagggcccacattttaatagttaaatggtcacaacagagggtgataattataatgtaggagtatgtgtgaggtacagagttaatagagaggtaaatgatcaagatgcattagagaaaacttcaggaaagatgtttgcattcaagatttgaaggatgagtcagaattttctaggcaaatgaagtggagaaggtattatagagtgcaggaacttgtgcaacagacatggtgtcacagagcatggttattataagtattgtatttgagttgcatgaaacataggaacaaaaaggatgaggagagagtgaccagagaataggttatacaattagctgggcaaattatttcgttgtagaaaaataacttatgttagtgaaaaagggtcataggaaaaagagataggtaaagagaaaaatgagacaataatattaatagttgtaagagctatgatatatacacagacacatatatatacacagacacacatttactctctacttacacatttactatatacgaagatacatatatggaaatttatatatatgtgtgtctatatagtaaatgtgtatatacacagacacacacatatataggtattttatgcatacctatatatgtgtgtgtctgtatatagtaaatgtatatatacacagacatatatatggatatacacagacacacatatatataaatatctgtatatatgtgtgtatatagcaaatgtgtatgtagagaataaatgtgtatgtgtctgtgtatatcgtagcttttttttgagaaaaaaaagctctgtcacccaggctggagtgcagtggcgcaatcttggctcactgtaatctccgcctcccagtttcaagctattctcctgcctcagcctcctaagtagctgggattacaggtgcatgccatcatgcccagctaatttttgtatttttagtagagacgaggtttcaccatgttggtcaggctggtcttgaactcctgacctcgtgatctgcctgcctcggcctcctgaagtgctgggattacaggcatgagccaccgtgcctggcctgtagctcttacatatagatgtatacacacacacatacatatatgttttgtaagacttttttttttggagacagggtttcactttcatcgtccaggctaaagtgcagtggcacaatgttggctcatggcagcctccgcctccttggtgcagtgattctgctgcctcagcctaccaagtagctggaaatacaggcgtgcaccacgacgcctggctaatttttgtattttttgtagacacagggtctcaccatgttgcccaggctggtcttgaactcctgagctcaagtgatctgcctgccccagcctcccaaagtgctgggattacaggtgtgagccactatgtccagtcaatattttaaccagactatagtttctcttttctcttaaaacatttttttttggggggaggctaaggtgggtggattgcctgagctcaggagttcaagaccagcctgagcaacatggcaaaaccccgtctctattaaaaatacaaaaattagccgggcgcacacctgtaatcccagctgctggggaggctgaggcacgagaattgcttaagcccaggagatggaggttgcagtgagccaagatcatcccattacactttagcctgggcgacagagcaagactctgcctcaaaaaaaaacaaaacaacacacttttttgggctatttttatttttcaatttaatttaatttacattttttttttttttttttttgagacagggtctccccctgttgcccaggctggagtgcagtggcatgatcttggctcactgcagccttgacctcttgggaccacaggcatgtggctaattgtctggctaattgttttgatttttagtaaagatgaggtctcactgtgttgcctaggctggtcttgaactcctgggctcgagcaatactcctgcctcagcctcccaaagtactgggattataggtgtgagccactgcgcccaattttttcaaatactctggcttaatatagtttctctttattcagcatgaatttaaaggatttatagaaagaacttgtaagaactactatattttgagtatgagtattttctttagtatttaccacaaccactgaagacaggtaatatcttcgatttacaaatggaaaatgagacaaccaataaatgacaactgggattcaaatatagttgtatttaattccacaatcagtgctcttatgactgtgctctgtggcttctgaatgagttcgaggaatatggaggaagtaaaatcacttaaatgtagcagttgacttgggctcaaatcttagctctttcacctgttagttgcctgatcttggggaatttatttaatctccttgagcctcttctatcaagtggggtattaatacatactttaagagggttcttggccgggccgtggctcacgcctgtaatcccagcactttgggaggccgaagtgggccgatcacatgaggtcaggagttcgagaccagcgtggccaacacagtgaaaccccgtctctactaaaaatacaaaaattagccgggtgtggtggcgggtgcctgtagtcccagctattccggaggatgaggcacgagaattgcttgaacctggaaggcagaggttgcagtgagccgagatcacgccactgcaccccaccctgggtgacagagcaagactctgtctccaaaaaaaaaaaaggattcttgtgaggattgagataatatgtataaattatgttttcttttttaatagtgcagggctataactagcacatttatagttcataactcatctcatttgatcctcacatcagatcatttagccctaaaatgtctgctatgcaggaaaaataggtcttgctggtgattaagtctttaggcctggtctttagggtgaccaagaataataaatggtatcttccttagagaagtttacagtctagtggataaggtggacatgtaaatacatactacataaaaatgtaggctgagcacagtggctcatgcttgtaattctagcgctttgggaggctgaggcagggggatcacttgaggtcaggagttccagaccagcctagccaacatggtgaaaccccctttacaaaaagaaaaattaggcatgatggcacatgcctgtagtcctagctactcgggcctctgaggtgggtggattgcttgaacccgggaggcggaggttgcagtgagccagagatggtgccactgcacttcagcctgggtgacagagggagactccattaaaaaaaaaatgtagtgtgatataggcaaatactttgtttcttttctttttcttttttctccctagactgagtcttgctctgttgcccaggctggagggcaatggtgcaatctcggctcactacaatatccgtttcctgggttcaagcaattctcctgcctcagcttcccgagtagctgggatttacaggcatgtgccaccacccccggcatttttttttttttttttttttttttttccagtagagacaggatttccccatgtttgccagcctggtctcaaactcctgaccttaggtgatccgccctccttggcctcccaaagtgctgggattacaggcgtgagccaccacgcctggcccatttcttttacttccttaaaatgcctttgtcaggtttgatatcaaggttaagctagcctcataaaatgaattagggagtattctctctttttgtaaaatctggaatagtatgtaagcttggaattgtttgttccttagatacttggtagaacttgatagtaaaggtatttgggcctggaattttctttgtaaggaaaatgtttagtgatttaatttgtttattggttataggaccatttaggctctctcttttttctcgaattatttttgtaatttatatttttctagaaatgtttccatttcacctaagttttaaaatgtattgacataaaattattcataatgttttcttaccttttacattttctgctgtatcaatgattatagttccttttttatttcttatatagttagtggtgtttcattttttaaaacaatcagtcttattaggggtttattaattttattagtacagtcatgcattgtttaatgatggggattcattctgagaaatgcgtcaattggcagtttagtcattgttcaaccattgtagagtgacttacaccaactcagattgtacagcctactacacctaggctgtacattatagcctattgctcctaggctacaaacctatacaacatgttactgtactgaatactgtaggcagttgtagcacatggtaagtatttgtgtatttaaacatatctaaacatagataaggtgcagttaaaatacagtatgattatcttatgggaccatcattgtttatacagttcgttgttgactgagatgtcattattgtggtacatagccgtatttttcaaataactaatctgagctttgcccattctctcagtgatatccttggggttgttcttttttaaatttactaaattggatgctttagctcttaagtttcagtctctgtaacactatcatttaagctatacattttctttagagtaccatcccacaagtaatattttctaatttctaatgtgacatctactttgacccatgagttatttagaattatgtttaaaattttttaaatatttaggctttaaaaattacctttttgatattttaaatttaagtagatggtagaaagagaatctttctgtgtactactaattctttgaaaagcattgaaacttgacctagtatgtaatcagcttttgtaaatgttctgtgtgtgcttgaaaagaatgtgtaatctctagtttaatattctgcatatattcaataacccaatattattgttttgatacaatcgttttttatattcttactgatattttaccaattgatctaccagttattaagagagctgtagtttctctttgtagttttgtcaacttgtatgtatatattttgtatctatattactaggtgatttagaattgtttttcttttttttttgagatggaatctcactctgttgcccaggctggacggcacaatctcagcttactgcaacctctgcctcccgggttcaagggattctcctgcctcagcctccctagtggctgggattacaggcgtgcgctgccacacccagctaatttttgcatttttagtagagacggggtttcaccatgttggccaggctggtcttgaactcctgatctcaggtgatccaccacctcggcctcccaaagtggtggtattaacaggtagaatttttttgtgtgtgacctgaatttcatatcactgttgcttccctgtttgtttacagtaatgcttttttgttaaagtttgtttcctctaaaattaatatagccataatagttttctttagtttgatttttgcttgttatatctttttctgtccttttattctttactgtatgtttagatatgtctaagcaatttccttccgcaattgctgtttcccttctctattggtttgaaagctatatttttattttcttctttcaggacttatctggaaattttcagttgcatatttaacttaacaaagcctaaagttaatatttatatcctcttgaacaatgcaaagactttagaatgttttaattctggttacagatcctcacttcccaagttaaaatgttactgtctaggattttgtttcttccatgatttttaatcctataaattaggcattaatgacttgttttgtacagttaatattggtttattatttattatttatttatttttagagatgggatctcactctattgcccaagctcaagtacagtggcatgaccatagttcattgcagccttgacttcctgggctcagaggatcctcctgctccagcctccccagtagctggaactacaggtgcttgccaccacacccagctaaatatatgtttttttatttttagtagacataaggtcctgctgtgttgcccaagctgggctcaaactcctgggctcaagggggatcctcccaccttggcctcccgaagtgctgggatgacaggttgtgagccactgtgccctgcatatttatttagttttacccttgtgtttagcattttctgttcacccttcttacatattgtatctttctttgagatcatttttttcttcctgaagtacacctttgggagttttttttggtgagagtctgttggtggcaaacccagtttttgtctgaaaatgcctttatttggctttcagtcttaaagttttgctgggtatggaattgttttgatggttgttttctcttagtattttgaaaataccattgtcttttaatttgtgttgatgtttggacatcagctgtcattttaactgttattcttttgtaggtaatttgcctttcctttcttgctgcagtttcactatgatatatcttagtgaatattaaaacatttgtcatcctaggattttctgtgatttctgtctctaaggaatggtattttctgtctgttctagaaacttttcagctactgtgtcttcttatttttcttccttttagaactctgattagatatatgttggatctttggttaggaattccacagatagtataggccattcactatgtgccaagggctggtgatgctgcagagaataaaatagacaataatctcttcccctcattgactttatagttctcagttatctcttcaaatattgtatcttcctcatttttattcttgtacaactcttgttagatgtatgttgggtcttttcattctgtcttctgtgtttcataatctcttgtattttccatctcggggtttcttcacagtgcttcctttataatcatcaaatttggtttcctgttcattagtttttagctgtgcttaatttgtttgttttttttttttaactccccattgaatgttaaggtttcagttattatattttttatttccagaagttctctttggttcctttttagatcttgatcatttctgatagtctcttgttccttcagcatactttcaaggtcttcttttgtattgttaagcagttgaaccatgcttattttatgtttcttatctaaaaattctcgtatctgcattctgatttcatagttttttgtttctcctgacccttgctcatggtattttgtttcttcatgagcttagtgatttttaataaaatagtgagtttatgtaatttggaacttttatctgtgggaattctttgaggcttgagtttcctgtgcatttttccacatagggtttatgttgcttcctggtaggcacctggggcactattaacaaaaatcaaactaaattagcaacttaaagtttctttgggtcatgtacttggtgtgaattcaggccccaacctgggcaaatgcaggcatatggttaggagttttcataggactctttttcgtttttcctgtactaccaggagccaaggccgagatgagtactatcttcactatctccctaaaggcattgtattttaaattgtagtagagggttctctgaccttgaattcctacctgttcaggtcccaggctttgcctccttactgactgcatagggctcctggtagccaggctattgaccaccagagatcattggataccctcaaggcaaatgcttacttctctgaatctacactttgctgttgtttctggggcctctaaggaattctttcatgttactgctagttcagccatatattaaaattatatatttataaaagtaggatacgtaatactatattattaattatataaaaacaaatataaatcatacattatatataaaacatatataaaacattatattatatacattatttattcaatgttaactaggatttttactggagatgtttttggaccctttgtctggcatattgctggaaaccgaagtgccatctatatttttaaaagctccataagttattctagtgtttacagagggttaatagacatgatggttgaagccaggggttgaggggcaaaagcaacaggtttaagagttgcttttgcccctcaacaaaagcaacttttgtgcaagaagaaaacagatttaaccactaatcatctccagagagaagggagaatgattaaaggagactgagaagaaactgtgtagtaggcttagcatctggagagtttgtttttctagaagccaagaaaccagacaactttacaaaatgaggaccggccaacagtgtcaagctatagacatgtcaaaaaggatgaaaatttaaaatagacaagggatctataggagaccatgtgaacctcctggttgccagactgtaatgaactgaggactgaatggtagttatcaaatggacatagcaactttcaggacgtttgttcgtgaacggaagaaaggaagtagtttggtggctgaagtgggggaagaagggctgaggaaaggtccaattagaagttgttacataaaatatgtaacttataatattacttttagtccataattggtccattggaaagtcatccccttttctgaatttggtactaattcatggtgattatttagtttgcaatcttttttccagttttccttttgtctcctaattgtgacacatatattattttctcgtttattttaaggtgaagttgaaaagaactaaaatcagagtataggataaaatactacaaatttttaaatgatactatttcagtattgctggtatatataatcaaatgcttaatgggaattcaggaggggacaattcatccaatacttctctattcctgtgacttacatatattacttaacctgacatttctttcatgaactgaatttactcaattacttttctcatctggaaaagaaaacaggactccagctacttattttaaaccctgctcttaaattgtccctaggaaaatcaacagaatcagattccttttgggttactatataagaaaaatattgttattgcacattagtagattatttgaaggcatcttgtagatggctatgatatatttttgtcatttttcagataaggaaagtaaatatgctaaacattaagaaaaatggtggctgggcccagtggctcacacctgtaatcccagcactttgagaggccgaggcaggtggatcgcttgagcccaaaagtttgagtccagcctgggcaatacggggaaaccttgtctttataaaaaatacaaaaattggccaggcgcggtggctcacgcctgtaatcccagcactttgggaggccgaggcaggcggatcatgaggtcaggagatcaagaccatcctggctaacacggtgaaaccccgtctctactaaaaatacaaaaaattagctgtgcgtggtggcgggcgcctgtagtcccagctactagggaggctgaggcaggagaatggcatgaacccaggaggcggagcttgcagtgagctgagatctcaccactgcactccagcctgggcgacagagcgagaccgtctcaaaagacaaaaacaaatacaaaaacaaaaacaaaaccccaaaattaggtgggcatggtggcgcatgcctgtagtcccagctactgatagtgggggctgaggggggatcccttgagcccagaaggtcaaggccgcagtgagccgtgatcacaccactggactccagcctgggtgacagaacaagaccctgtttaaaagaaaagaaaagaaggaagggaggggaggggaggggaggggagaggattccattatagaactcaactccatcataaagaatataacatttttagcattcacgtgtgagggacttaatgtgtcattggaggttgggagaattaatgaataacatctgtgattctgctgagatattgttccttctgttgattaaaatactatttttggtatcctaatttgtattgttttgtttttaagaagtgagttttcactatgttgcccaagctgcagtagagtgactatttacaggatgtgatcatcaggcactgtaaccttgggctcctggcctcaagtggtcctcccacctagcctcccaatagaaatgcatcatttttatgtattgtaaaatatctcagcttgtaccactgctcccagctcataatttctttttttgttgttttttaaaagtttttttgcttttaatttgtatgggtacatagtagatgtacatattcatgggtcacatgagattttttttttaaaaattttatttatatttttattattttaaatttttattttattattattttttgaaatggagtcttgctgtgtcgcccagagtggagtgcagtggtgccatctcgacttactgcaacctctgcctccccggttcaagcaattcttctgtctcagcctcccaggtagctgggactacaagcatgagccaccacgcccagctaattttttgtatttttagtatagatggggttttaccatgttgaccagactggtctcgaactcctgacttcaagtgatctgcccgcctcagcgcccagctgattatttattatttattatttttttgagacaagagcctcgctctgtcacccaggctggagtgcagtggtacggccttggctcattgcaactctgcctcccgagttcaagcagttctcctgcctcagcctcctgagtagctaggattataggcacgtgccaccatgcctggctaagtttttttttttttgtttttttttgttttttttttttttgagacggagtctggctctgtcgcccaggctggagtgcagtagcgcgatctcggctcactgcaagctctgcctcccgggttcatgccattctcctgcctcagcctcccgagtagctgggactacaggtgcctgccaccacacccagctcatttttttgtatttttattagagacagggtttcaccatgttagccaggatggtctcgagctcctgacctcatgatccgcccgtctcggcctcccaaagtgctgggattacaggcgtgagccaccgcacctggcctaagtttttgtatttttagcagagtcggggttttaccatgttggccaggctggtctcaaactcctgacctcaggagatccacctgccttggcctcccaaagtgcagggattacaggcgtgagccaccatgcccagcctatttttatttttttgagatagagtctcgctccattgccctgtgctccagcacaggctggagtgcagttgtgaaatcttagctcactgtagcctctgtctctgggttcaagtgattctcctgcctcagcctcccaagtagctgggattacaggtgctcaccaccatgcctagctaattttttttgtatttttagtagagatggggtttcatcatgttgtccaggctggtcttgaactcctggcgatctgcccaccttggcctcccaaagtgctaggattacaggcatgaggtaccgtgcctggccattattttattttttagatacagtatctcactatgtcacccaggctggagtacagtggtgccatcatggttcactgcagccttgatcccctgggctcaagtgatcctcctacctcagccttacaggtagccaggactataggcacataccactgcacctggctaacatgaaatgttttgatacaagcatacaatgtgtaataatcacattagggtaaatgaggtattcattacctcaagcatttattctttgtattataaacattccatttatactttcagttatttaaaaatggtaaaataaattattgttgactgcagtcaccctgttgagctatcaaatactagatcttattcattccgtgtaattatatttttgaatccattaatcttccctaccccacccactcttctcagcctctggtaaccataattctgttcttcatctccaagagttcaattgtttcaatttttagctcccactaatgagtgagaatattgaaagtttgtctttctgtgcctggcttgtttcacttaacatcatgacctccagttccagctatgttgttgcaagtgacaggatctcattcttttttatggctgaatccattgcatatacattttatttattcattcgtctgctgatggacacttaggttgcttgcgaatcttggctattgtgaacggtgctgcaataaacataagagtggagctatcttttcaatatatggatttcctttattgcctgtcgtttggataaaagccattttacctgggtgagatgatgtctcattgtagttttgatttgcatttctctgatcatcagtgatgttgagcactttttcatattcctgtttgccatttgtatgtcttcttttgaaaaatgtgtattcagatcttttgcccattttttaattgggttatttaattttttttcctattgagttgcttgaattccttatatattctggttgttaatcccttgtcagatgggtagtttgcgcatattttctcccattctgtgggttctgtctttgttgattgcttcctttgctgtgcagaagcttttaaacttcatggatcccatttgcccgtttttgctttggttgcttgtgcttgtagagtattactcaagaaatttttgcccagaccaatgtcctagagagtttccccagtgttttcttggagcagtttcatagtgtgaggtcgtatatttaagtctttaatccattttgatttgatttttgtatctgatgagagataggggtttagtttcattttctgcatatagatatccaattttcccccaaagagactctcttttccccagtgtatgttcttggcacctttgtcaaaaatgagttcactgtagatgtgtgtatttgtttctgggttctctattctgttccatggtctaggtatctgtttttatgccagtaccatgctgttttggttactgtagctctgtagtaaaattgaagtcagtgtaatgtaattcctccagttttgttctttttgcttaggatagttttgactatttggggtcttttgtggttccatataaattttaggattattttttctatttctgtgaggaatatcattggtagtttgatggagattgcattgaatctgtagattgctttgggtagaatggacatttaatgatattgattcttccaatccatgaacatggaatattttcccatttttttgaatttctttcatcagtgttctatagttttttattaagatcttttacttcttctttttttttttttttttttttttttttttttttgagacagagtctcgctctgtcacccaggctggagtgcaatggcatgatcttggctcacggcaacctctacctcccaggttaaagcaattctcctgcctcagtctcctgagtagctgggattataggcgcatgccaccatgcccgacaaatttttgtattatttttatttttttttagtagaaacggggtttcaccatgttggccaggctggtcttgaactcctgaccttgtgatctgcccatctcagcctcccaaagtgctggcattacaggcgtgagccaccacgcccggccttgagccactgtgcttggcctgatcttttattctttagttaattcctaggtatttaattttatttgtggctattgtaaatgagatttttcaaatttctttttcaaattgttcaccattggcatacagaagtactagtgatttttgtatgttgattttttatgctgtgactttactgagtttgttttacagttctaatagtttttttatggtgttttaaggtttttccaaatataaaattatatcatctgcaaacaaggataatttgacttcttcctttccagtttgggtgacctttatttctttctcttgtctgattgcgctagctaagactaacagcactatgttgaataacagttgtgaaagtgggcattcttttgttccaaatcttagaggaaaggctttcagtttttccccattcagtatgatactagctgtgggtctgtcatgtatggcttttattgtgttgaggtatgttttttctaaactcaattttttgagggtttgtgtcaggaaggggtgtggaattgtatcagatactttttcagcatcaaccaaaatggtcatatggtttctgtccttcattgtgttgatttgatgtaccacattgattgatttgcatatgttgagccattcttgcatccgtgggatttatctgtagggttatggtgaatgatctttttaatgcactgttgattacagtttgctagtattttgttgtggatttttgcatcaatgttcatcagggatattggcttgtagtttttttttctttttttaatatgtctttctctggtgttgttattaggagtactgggctcgtagaatgagtttggaagtattctctctattttttggaatagtttgaataggactgatattaggatttttctttaaatgtttagtgaaattcaacagtgatgccatcaggttctaggcttttctttgctgggagacttttaattactgctttgatgtcattgcttgttattgatctgttcaggttttggatttcttcctggttcagtcttggtaggttgtacgtgtctaggaatttatcagtttcttctaggctgtccagttttttggcatataattgctcatagtagtctctggtgatcctttgaatttctgcagtattggttgtaatgtctcctctttaatctctgattttatttatttaagtcttctttctttttttcctagtctggctaaaagtgtctcaattttgtttatcttttcgaaaaccaactttttgttttgttgatctttcaacttcgtttatttctgctctgatctttactatttcttctactaattttctgtttattttgctgtagcttttctagttctttaagatgtatcattaggttgtttatttgaagtttttctacttttttgacataggcacttattgctataaactttcctcttagtactactttcatgtatcccataggttttggtatgttgtgtttccattttcatttgtttgaagaaatttttaaattttcttcttaatttcttcgttggcacactgggcattcaggatcatattgattaatttccatgtgtttgcactgtttccaaaattcctcttgttattgatttctagttttattccattgtggttagaaaggatacctgatatgatatcagtgttttgaattttttaagacttgtttgtggtctatcgtatggtctatctgtgtgccaaggagaagaatgtgtatattctctagccattggatgaaatgttgtataaatatctgataggtccacttagtttacactgcagattaagtctgatgtttctttgttgattttctgtctggatgatttgtccagtgctgaaattgacatctctagctattaccctattggagacactctctttagctctaataatatttgttttatatatctaggtgctccagtgctggatgcatatatatttaccattgttatatctcttgctgaattgacccgtttgtcattatataatgaccttctttgtctttctctttttttttttttttttttttttttttgagacagagtcttgctctgttgcccaggctggagtgcagtggtgtgatctcggctcactgcaacctcctgcctccagagttcaagtgattctcctgcctcagcctcccaagtagtgggactacaggtgtgcaccaccacgcccagctaatttttgtatttttagaaaagacgaggttttgccgtgttggccaggctggtcttgaactcctgacctcaggcaatccgcctgcctcagcctgccaaagtactgggattagaggtgtgagccaccgtgcccagcttctttgtctctttttatagcttttgtcttgaaatctgttttgtctgatgtaagtatggctactcctgctctttttggtttccatttgcatggaatatctttttccatccttttattttcagtctatgtgtgtctttataaatgaagtatgtttcttgtaggcaacagactgttcaagcgattctcttgcctcagcctgtggagtagctgtgattacaggtgcacgccaccatgcccggctattttttttgtatttttagtagagacgagttttcaccatgttggccacgctggtctcaaacttctgacctcaagtgatctgcccaccttggcctcccaaagtgctgggattacaggcatgagccaccgcgcctggcctaagtgaggtgatcttggctcactggaacctccgccttccagactcaggttgtcctttcacctcagcctcccaagtagctgagactacaggcacatgccaccatgcccagctaattttttgtatttttgtagagatgggggtttggccatgttccccaggctggcaaataacatcttataactcattattttaagctaatgattacttaatactgattgtaaaaactaacaaataagcaaagagaaaattaacaaaaactctacactttattcccctgctttttaactttttattgtttctatttatattttattctgtgtcttgaaaagttatggttattatttttgataggttcatcttttagtctttctactcaagatatgggtagtttacaaaccttaatgacagtgttaaaatactttgtgtacttactattaccagtgagttttgtaccttcagatgatttcttattgcttattaatgcccttttctttctggttgaagaactccctttagcatttcttgcaggataggtctagtgttgatgaaatccctcagcgtttttgtctgggaaaatctttatatctccttcatgtttgacaggtatttttgctggatatactattctaggataaaagctttttttttccttcagtactttaaatatgttgtgccattctcttctggcctgtgtggctttctactgagaagtctgctgccagatgtattggaactcctttgtatgctgtttctttcttcttgctgcttttaggattctttctttatccttaacctttgggagtttgactgttaaaaagtcttgaggtagtcttatttgcattaaatctgcttggtgttctataaccttcttgtacttgaatattggtatctttctctaggtttggaatgttctcagttattatccctttgaataaactttctaccctgatctctctctctctctctattacctctttaaggccagaagctcttagatttgtccatttgaggctatcttatagatcttctaggcatgcttcttttgtcattcttatttttctttagtttccactgactgtgtattttcaaatagcctgcctttgagcttactaattctttcttttgcttgatcaattctgctgttgagagactctgatgcattccacagtatgtcaattgaattttttagcaccagaatttctgcttgattttaacaaattatttccatctctgttaaggatagaattctaaattccttctctgttatatcttgaattttttgagtttcttcaaaacagttattttgaatgctctgtttgaaaggtcacatacctctatcactctgagattggttgctggtgccttattaagttcctttggtgaggtcctgtttttctggatggtcttaatgcttgtggatattcatctggatattgataagttaggtatttattgtagtcttcacagtctgggcttatttatacccatccttcttgggaaggctttccaagtattcaaagggagttgagtgttgtcatccatggtcgctgcagccatatttgcattagggggcaacccaagcccagttacactgtgactcttgcaggctcatagaggtaccactttgatggtcttgggtaacaaatctgagagaattctttggattaccagacaaagactcttgttcttttcccttactttcccccaaagaaatggagtctgtctctccatgttgagctgatgggagctggaggaggggtgacaaaagtacccgtgtggccatcacattgggactgtgctacatcagacctgaagctagcacagcactgggtcttacccaaggcctgcggcagtcactgcctgattcctgccgatgttcactcaaggcccaagggttcttcatcagcaggtattgaatccagccaggcttatgccctttccttagggtggcagcttccccagtccacagcctatgttgggtcagaaatgctgtctgggagccaaggcctggagttaggaaccttaatcaggagccaggcctggaatccgggactccaggagtctgcctggtgctgtgctccactgtggcctgaagctagggcctggaatgtgggcctcaggactctgcctggtaccttattttgctgtggcagagctggtatttaagttgcaagacaaagtcctcttttactctccagtctcctttccttaagcagaaggcatccttaagccatactgcctggggttgagggaggggtgatgcaagcactcccttggctgccttagctggtgtcttactaggtcatgtgcacccccagtccactgcgtctgagtccaacacagcaccaggacttgcctaggaagtccttgtggtctaaactgcctttcaaatttatttaagaccccagagtgctttagcctacagtggtgtgcctatctggaactcaggttcctactgctgggatggaccattcccttctggctaggactagcctaaatgctccctccataggtaccagctgaattctgccctgtgttgctttctgctgtgacaagcaagactgagttccagtgcagagtcccatagtcactgcactctccctccccaaacacacagattctctcttcatgccatgcagctgctgctggggaatggagaagtgatgttgacaattcaatactgtctttcttaccctcttcagtgcctctttccttgatatgatattaaaaccaggtactgtgattgctcaactgattttgattcttatgaaggtactttcttgtggggatagctgttgaatttggtgttcctgccagggggacagttgctggagggttctatttggccatcctgctctgcctcctctgtcatagtttgttttttaatatgcttattttagtttgcttttggtttatcttgttttaagattgtaattaagaagcacttacaggagaggaaaaatacattttccttctgtccttctaggttctctaatgtgcccgtgtaacaaaagacagattaacaagacaaaaacataacgcatttattgaatataagtttgaaaccttcagaaggaaatgaagacccgaagaaacagttaaacctgagtgtttttatactaactttgatgaagaggggagagttgtagaaaatgtgataggacaatagagtatgagtcaagagtagtaaacgggaaacttggcaaaacctgttcattttggttcctctgggtatccttttacctttggagataaagatgcttcttttctctgggtatagggagggcacctctcacatgaggattttatgatctgcttcaggggatggtcagttcttcctgcacctgcccttcctcagattcctttagcttaaaatattcaatatgccaaggtgccagattttgaagttgaatgttcagaactccatcacactcaagtgtggaaactcaggttagcttgcttagtattaatgcattattcctcctttggaaatgtatgtattatttaggaaaatggcttatgtatattattgtaatttgattttttctgaaatgtctatcccttacgcttttagagatgcttatatacattaattttcagagacctaaaaatattgaataaatactgtttgttgcttttaaacaatccatggggagtagaaaaattttgattttagtattgattgtttaccgtttcttgtagagattcacagttcctctatacttgatccaaagtgttaccagtgtctttaaggcaaatggcaacacttgagctggggaaagttattttattttaataactttttttttccccaaagctgcattggctgtttgatgagaaagttgtagagaatcagtttttgtagcacatcattactaaagtatgactgtgttccatttaactgcttagtttctttctacttacccattgctatggaaaatataaaaggatgattttttttttttttcttcagacaagtcttgctctgtcacccaggctggagtgcaatggcatgatctcggctcactgcaacctctgcctcccaggttcagttgattcttctgcctcagcctcccaagtagctgggattacaggcatgtgccaccacacccaattaatttttgtatttttagtagagacggggtttcaccatgttggtcaggctggtcttgaactcctgaactcaggtgatctgcccaccttggcctcccaaagtgctgtgattacagacataagccaccacaccctgccaaaaggaagattttattatggaaaattttagccaaattctcttctctaaaatgtttaaaattttaatttaaaggcagttagtaggtattgttaacaacaaaactacttgtttttaaaattcaaacataattatgaatagttcaacaattaataaaatgaacatttaagtagtgcttaagcccatttttctgagaatgagacagaattgaagctgagtaaatatacattagtgtgttttctttatgtaattctgaatcttatgtaaatgaatttgtagaattaagcactgtggaaggaatcgttttttgcccttcccaagtgaagctcccataggtacagttgggttgtccttctgggttgctttaagggcactttagctgttttaaaaacttaagtactaatttcatactcagtgtcagctgaatttattgaagtaggtcagactctggataggaacttgtttcccaaccctaaagagagtcattatccattcttctatttgttagagaatggtaataaattcttccacattgaccacaagtctagagcaatttcagaaaatctagatagttggatttcttcaggtataggaaattacttaagattctctctgacttttattatcccagtggaccaaaaacaaaaacaaaacaaataaaaaggaaagtcaactcctttccacccccaaagaagccatattcaatggttgtattctttaaaatagaaacttatatccctccctgcccccaatcccgccacccagccaaagaatacacatgcaaaaatgcaattaattctttggggaattcttttcttaaaaaaatttttattattgtaggttattcttcctctccagtttaattaagcaaacttttaatgtactatatgcctagcaatgttttctctggacactggaaaatcagtttctctgcctatgggatataaaattcttatctggttagcagttaagaaatagtatagtcatatgataaaacatgggaactgaaagtataagtattgtgagaagtcagtagttagtgatcaatatgtttttaatttatgaaggaaggcttcatggaagatttaggatttcagatgatgcttgaaggttggatatgagttgatagaaatagatgtatagaatatggaataagaagcatgaacagaaactttgaatttcaaagtgccagatagtaacttaaaaatgtttttgggtgagaactcatatatggcactgtgttaaagcaacctcggcaaaattaattggtctgccatcacaaattaatgttgcagatcagtaagtgaaaaatcagggactcacaaactcaagtcttttgaacttaaacgtccttgctgtattaacattcactgataacctatgagggtggcattaagaatctactaggtgctattacattctgagaatagaaaacttattaagtttctttctgagagatagagagacagagacccacacacatgcgtgtatactatggttaatttcttgtgcaaatcactcaatgtatatatgctatagaaaagttaatctgggtttcccatgattgtctcatagtgggaatatcttcttagagattatagcgtttaaagaatattggtataattcaacaattaaatacaaacacttcatgtaatgttgtaaaactggagaaaatctggattagatttcagtgagcaataatatgtcattcttcaatatggcacaccttcctaatgggttaattagtatatttgactctatgtgatttttaccttacatgccagtttaaaaagctgtgattatactgtacctctttgggccttctcacaattttgtagtcaactgttagttaaatagtgagtgggtgtttactctttactaaatggagatagctttacatcttttttttttctttctttcttttcttttgagacggagtctcactctgtcgcccaggctggagtgcagtggcgcaatctcagctcactgtaacctctgcctctcgggttcaagtgcctcagcctcccaagtagctgggactgcagatgcccaccaccaccctggctaattttttgtatttttagtagagatggggtttcaccatgttggccagatggtctcgatctcttgacctcgtgatccacccacctcggcctcccaaagtgctgggattacaggcgtgagccaccacgcccggccacctttatgtcattttaaatgatttaagaataaaagctacttaaccaacttatgaggcattacagaataggagctaagagcatggattatggagccagtctgcctggattcaaatccagactttgctgcttattacgtgaatggccattgcctttgttttcccagctataaagtgggtataatgataatacctatttcttttcttttttttttttttggatggagtctcactctgtcgcccaggctggagggcagtggtgtgatcttggctcactgcaacctccgcctcctgggttcaagcgattctcctgcctcagcctcctgagtagctgggattacaggcacgcaccaccatgcccggctaatttttgtatttttagtagagacagggtttcaccatgttggtcaggctggtcttgaactcctgacctcgtgatctgctcacctcggcctcccaaagtgctgggattacaggtgtgagcctccgcgcctggccagataatacctatttcataggttcattgtatttggtatatagtaagcactatcaagtgttagttattacaaatccattatcccttatttgcaattttgaaattaaagtaatcaaaccgtaaagcaatagtttttatacaacttatttgacagcaaagcctgatctaattaatgtctttttaacatatagtctgtttttgaccctatacttgaccttaagttatttatagtttgtaaaagtcctttgtaatggctgggcatggtggctgacgcctataatcccagcactttgggaggtcgaggcaggcagatcacttgatgccaggagtgtgagaccagcctggccaacatggtgaaaccggtctctaataaaaatacaaaaattaggcagttatggtggcacacgcctataatcccagctactcgggaggctgaatcatgagaaccgcttgaaccccagaggtggaggttgcagtaagctgagattgtgccactgcactccagcctgggtgacagagcatgactctgtctcaaaaaaaagtcctttataaaatgcagatactcgtgttactattttatggtacatattgggcagtatagttgacagccttatgaagtaaaaataaacctggatataattattattgagtacagtcagccctctgtatccatggattctatatctgtggattcagccaaccatggattgaaaatattcgggaaataaaaaaggatgattgtgcctgtactgaacatgtagatttttttcccttgcattatcccctaaacaatacagtataacaactatttatgtagcattttacattgttaggtattataagtaatctaaagatgatttaaagtatacaagagaatgagcagaggttatatgcaaatactatggcattttatataagggatgagcatccatgaagtttgatttctgtggtagtggggggtcctagaatgaatcccccacagatactgagggatgattgtaatgttaataatagtgtctatttattgaatgtttaccatgtgccaggcactatgctgggtattttatatccattatcttatttattccagtagtctgcagtagggaagttgtattgatcctgtttttaatgtgctcaagtttagggagattaagtaatttgcccagcgtcactccagcagtgtgccagcagtgctagattcagattttatctctctgactttctcggtaactcctgtgttctttctgtaacctacactgcctctctaatttagacaattttcataaggaaataaaaatcactgatatgctaaagtacattgttgttttgctctttttacctttgatcttaggtgctggtaaaccgcctatgtttggtgattatgaagctcagagacactggcaagaaataacttttaatttaccggtcaaacaatggtatgataattttaacttgtttttcttgtttatcatagttaatacagattgtttgaaaatattaaagggacaacacgctattttcttcatcttgaacatcctcatctcttgcatgctggtgccacatatgtattgccttgcattttgtaggcctgtctttgaaatttgatagtcctgaaagttaattcatatacttagttaggtgggctatgatgctgaactagaacgttgatgataaaactctgaatgtctatatgtcctctgtacataaactatggaagcaccatcataggctaaaaacatttcttccctgttccctcatccactgtttctctcactaaagatcactatgattgtaactatagataaaaataaaagagagctttggcagtagctgatggctgaatttgcagatctgaaaaggggaccaaagggagaagcctacaatgataggacttgttttcaactctgaaaatttcgcatgtgtccttttgattcacctttgaataccgtgcatctagtatagggcatggcacattgtagaccctcaataaaaatctgtggaaggaatgagtatttaggtgttcactttttctttttttttttgagatggagtctcactctgtcgcccaggctggagtgcagtggcgtgatctcagctcactgcaacctctgctgcctgggttcaagcgattctcctgcctcagcctcccaagtatctgggattgcaggtgcctgtcaccatgcccggctaatttttgtagtttttagtagagacagggtttcaccatcttggccaggctggttttgaactcctaacctcgtgatccacccaccttgacctcccaaagtgctgggattacaggcttgagccaccatgtgcggcctaggtgttcgttttcgtatggtctcatttccatagctttctctttgtattatgaaggaggaggtcagctctacccttcattgttatatgatacagtatatattgaaccgtctgtttctgaaaactcagagaacttcatagacatttttgttaattattattgctctctatcataattgagcagtggtgattaaccttaattttgtatacaaatctacctgaagtataaaatagcagtagcttagtggtaaagagtgtaggtgctagagtcagactgtctgagttcagatcccagctctactatttattagctgtgtgacctttggcaaatcatttaactttctcaaccacagttttattacttatagaatgaaaatagtagactacatatttcactgggttattgtgaggactgaataaaatgatacatgtaaagcacttaggccagtccctagcatgtaacgaactctcaataaatgttagctctggttatagcatcatagaaattcatgcctgtgtcatttttattgaacatatcctgataactgttgatgacattatttattgacttactagatggttggtaggttattctcttagagactggctatataaactgttcatattatattgttgactgctttggctactgcttttatatagctctttatcagagagttttatgcaagaacttcatattgagttttctattgataggttgcctgttccctagtcagagtttggagtgtttcaaatggaagaggaactcgaaacactttaaatgtctcttagtaggggaatgattaaataaagtctatttcttatgtgctcattttttctaggtagattcctagaagtggaagctctaaagtaacaccaggatatctcattctacgtaccctgaccaacatttagtaataccggacttttaaaattggcacttccttgagtaattgtgacctgagcatcttctaatgtatttattgataattatatttcttttttttgagacggagtctcgctctgttgtccaggctggagtgcagtggctcgatctcggctcactgcaagctccgcctcccaggttcacgccattctcctgccttagcttcccgagtagctgggactacaggcgcccaccaccacgcctggctaatttttttttgtatttttagtagagacagggtttcaccatgttagccaggatggtcttgatctcctgacctcgtgatccgcccatctcggcctcccaaagtgctgggattacaggcttgagccaccgtgcctggccgataattagatttcttttcaaaattgcttgttcatttctttcccccgtgtttgtagtggataatcatttttgtaatgatttgtatgatttttaaatagttatactaattttctatgctgtgtaatgaatgacctcaaatgctaattgctaaaacacacatttattatcacagtttctttagatcaggagtttgggcacagcttagctaggtattctgctcagagtttcgggaaggctatatttcaggtgtcagctgggctgcagacttatcagaggctcaaatggagaaggatccatttccaagttccctcaggctgttggcagaattagtttccttgcatctgcaagagtgagggcttcagtttcttgttgggagccactcttggctcctagagctcacatgccatttgttgctatgtggcttctccaacatggccatgcactaaaatatgccagcttgcttctttaaagtcagtgagaggcagtctgtctagtatatctgctagcaagacagaatattacatgtacgtgaaacagaagcacaagagtgatatcctatcacatttaccatattgtattagttagatgcaaatcacaggacttgcctacgctcaaggggaggggattgtatgcacgcaggagtctgaacagcaggagatggtgttctcagtggtgaccttaaagtctgtctaccacgacagtatagcagtactgtacactttaatcattttcctcatgtgtgtgtatgcgtgtataaaataaacgtcttctttctgtttgttcttgtcttgttctgtaattggtgtctgttgtcttataaaactttctacattttgatgtatgtaagttatttcaactattcttgcaacttttctgtaactttgaaactgtttcaggctaaaaatttttttctttaaacaaaaataccaaatatgactctgtgggttgtctgttagagaaaactacatcttaaagttaatggtaacactcttgaatgtaattttataattcgtgtggcagccattttttttttacttactaaacatctactgagattacatgggaattcagtggaaaaatacatttcaatgtataaatagtatttagacaactttttgggtattgatatatctaaagtaaggccgggcgcagtggcttacgcctgtaatcccagcactttgggagaccaaggcgggcagatcacgaggtcaggagttcgagaccagcctgaccaacatggagaaaccccatctctactaaaaatatgaaattagctgggcgtggtggtgcatgcctgtaatcccagctactcaggaggctgaggcaggagaatcgcttgaacctgggaggcggaggttgcagtgaaccaagatcgcaacattgcactccagcctgggcaacaagagcaaaactctgtctcaaaaaaaaaaaaatatatatatatatacgtatatatatatatatatatacgtatatatatgtatatatatatacgtatatatatatacgtatatatatatacgtatatatatgtatatatatatacgtatatatatatatacgtatatatatatgtatatatatatgtatatatatgtatatatatataaaatataaagcaggagtatcaactaattgctttattcctactgatatattttgatgctttacttgaaacacttctaagctatcttctcttatgcctctttgttctgctttatgaatttccataagaatggggagcactgttataaatcctatatttttttcctcctaatccaaccaatgactttatttttagtatatatcattgcatgcttgcagcttactgtcaatgcctcttttactcatctccagtggatctcaaggttaaactaaatgaaaaaataggttttgtctattttcagaagctgaaaaccaaatcaagttgtattggacaaaatgtgattcttgaattacttgatggttttccattgctgtatccatcttagttgttttgtggctagtagccaattggaactactattgagcactttgtgtcagtcactgacctcacagctttacttgtttaactcaatgcttcaacagctctgaggctgataaaataaaactttatgctatatagtaacatgaatttggaaatgatataattggtgcctgtcttcaggtatctctgtctagaaaagtgggtcctttggtctccattatttgcctggcccggtttcccagattcaagctgccaaaaggggctccaactaacccagagattcttagactcgctgcttcttggcttcaagtcccagccagacatggaacccaagattgttcacatggatgtttctggagggacaatggccaccagctggtaccatactgtagtactctatgcccagatgtcttggctgtctaccatgccttgataattttaatccccatctcttccatacaaacctatgttttatgtaactgacactaagaatagaccttccgaagatgattaataggttatttgatgggatcatgttgaatgctaatttaaagaaatatttttaattcaaaaagtaagagattgtgatagtgaggaattgtgacccatttgaaataagttaggccgggcatggtggctcacccctgtaatcgcagcactttgggaggccgaggagggtggatcacttgaggtcaggagttcaagaccagcctggccaacatggtgaaaccccgtctctactaaaaatacaaaaattagctgggcctggtggtgggtgcctgtaatccaagctactcaggaggctgaggcaggagaatcgcttaaaaaaaaaaaaaacccaggaggcggaagttgcagtgagccgagattgcgccactgcactccagtctaggtgacggagcaagattccgtctcaaaaagaaataagcttatgaacaatggttatttatgggttatatagtttggcttgcactgttgtattcttatgattgagaaaataaatggaatagaagaagaagctgcctagttgtaaaggacatgattaagaaattattttaacttaacttttagttctcgagtcatgatagttgtatatatttccttcacattctggctaaccagaggagcctatcaatttgtggacattagacctacttttcttcctaaaattcagagagccttgcacgtaacgaggctctcgttacatgttggttgaattggttacaaacaatcctattctttttgttgcatattttttgttgtatgagtgttagtcattgatgaagtctactaatagtaggatgacagtaaatcccagtttgcctaggagagtcctggtttgtgtctattgacatggcttaattattaatagcttaataattagtaaattacattattaagcttagataagtgaggtgcaatgttaaattataagtctacttcttgaatattgattaacggaatggtgctttcttctttttttctttttcaggtattttaacagcagtgataacaatttacagtattggggattggattacccacctcttacagcttatcatagtctcctatgtgcatatgtgtaagtttttctttcttaatgtaactctaaatttttatgcccttggcagatttagtaagaagcagtgtgatggggctttcttgactagaggagagattgcttgtagctgctattgtattttttttttttttttttttttttgagatgaagtctcactccatcgcccaggctggagtgcagtggtacaatctcggcttactgcaacctccaccttccaggctcaagtgattctcttgcctcagcctcctgagtagctgggagtacaggtgcccgccaccatgcctggctaatgtttgtatttttagtagagacggggtttcaccatgttggccaagctggtctcaaactcctgaccttaagtgatctgcccacctcagcctcccaaagtgctgggattacaggcatgagccacctcacccagccactgctattgtattgtgtattacaaatgggttttaagaaataactattggctgggagtggtggctcacgcctgtaatcccagcactgtgggaggccgaggcgggcggatcacgaggtcaggagatttagaccatcctggctaacatggtgaaaccccatctctactaaaaatacaaaaattagtcaggcgtggtggcacatgcctgtagtcccagctacttgggaggctgaggcaggagaatcgcttgaacccaggaggtggaggttgcagtgagccgagatcacgccactgcattccatcctgggcaacagagtgagactccatctcaaaaaaaaaaaaaaaaaaaaaaaaaagaactatcaaagtttgaacatttctataatttttttggaggacatctagcaagaaatgtgaaaaacctagttttgttttgaagtagagatgttatccatatgtgtagactactaagaaatatatctaatatgtgttgtgtataagaaagttttttttctggaacagctcaaagtaaatgaaaaatatagatccagatggttaccaactaatctgtcaagttagaaactagaataattgtagtgtttcatttgtgattgaagatcaaaatgggaattcctcctccttttaaagaaattgaatagttatagaagataaggaacttctgttttggtaaagacccagttctactctgtagtggtattccatcttagatttgaagtatgtcagcaaaaatttgaggaacctcttcacaatatctcgtgaactcatcttgtttaatttctacttacagccctgtgtcacttcacgatggggatacattctgagaaatgtgtggttaggtgatttcatcattatgcaaacatcatagagggtactttagtaggcaaaatggtatagcctactatatctaggcgtatagcatagcctattgttcctaggctacaaacctgtacagcatgtcactgtactgaatactgtaggcagttgtaacacaatggtatttgtatatttaaacatatcaacacatagctagcgtaaaaatatggtagtacaatcttatgggatcattgtcctacatatggtccattgttgactgaaatgtcgttatgcggtgtcgttatgagtgtatttaatatttgcaaaaataagcttcatggattgaaaataaactcccaaacatcatcattatagtattcagggtaattgtaatatggttgaaaatttcatttaacaattgtgtttagttttatgcagtgatttatgattattatagctgtttattgtagccaattgttatgataactaaaatattataaattgtaaagatgatcctctggtcaacactagcatattgctttttataaagtatgtgtttggtaaatgaaatgtgacatgccagattgtttttacactggaagaactgtgaagatagggcttgtagttataccttacatagttttgttggaaggtaagcaatgtagatgctgttttatagcttaagtcagtttcacatgattaaataaaaagagtaaaacttaagcattgactctgttgctttataagagaaatggccaattctcaaaatattaatacattcatatatccttcaatatctttattgctaaaagggatgaggaatgaagtatctgtatatatgctttgatttgcagggcaaagtttataaatccagactggattgctctccatacatcacgtggatatgagagtcaggcacataagctcttcatgcgtacaacaggtaaaagagcaatgggtagtgaatataaaatttgattttttaaaaattttggacaaactggtaaaggtactattattgttcttactgactttaaaattgtgcaattacacaaacacatatatttacaaatatacatatttgtatacatgatccaagaccaaatgtatatgtaagctaaaacttgaaagagtagaaaggaataattctgggtgctttacattttttatctgacttaattctttgaacacctaaatgagataaatactattattcttattttaagctgaggaaactgaggcatagttaaatgaagcaagatagctataaattgaatctttagttttttagggtgctgctttaatatcctaattctaaatttctttcattttttcttaaagcaaaccttgcagttatcatcttatacattgtattgttgtgcagtttctaaattaaataatccacacaacaaatgtttattgagcatgtgtgtgtgctgttgtaggagcttgaaagtaataagcttagatttctttaagagctttacatgacttatgctttaatgctttaaaagcccagtccttttccttaattagtctaaatgtagtcagagtttgttctccttacaattcatccagtcatggaatcttaggcccaagagataacctgtttttcctgtctttccctctcccacaccactgcccttccctctccaatgctttaatcctttctgaaccacatacacaccatgtgattatttggcttctgaaccaatatccatacttgcagggaactcacaacctttagagacagtctattctgttttcagagagctccagtcattaaaaattactttctaaattgaacttccaccagtcattacagattatgttttctagggttacagagaacaagtctgatcccttgtatccctaacatcctacaggaatttgaagtcacctcttctctaagttaaagattcctatatacttcagctattccttagatgagcaatttgttgaatgtgattatggttttgaggactctcgccactcttttgggtgtgttccagtttgtcagtgtcatctttaatgtggcatctggagctgaacatattgatagatttcagttgatagattgatagtttactgtcacctttttcttgacactaagtgagatataagaaaaaaataagctctttagacagctatgttatacatttgaagaacttatgtatttatttttctttgttctaaaggactgcatgttcaaaattatgaattgcttttctttttttaggatttttttttcagttttctcctcacctgggtttctcaagctctttatatgcattaattagcaaaagtttatattttttcaataaagaccaacatttaaaaaagattttcttacacatcactacatttcagttattctttatactagaaaattcagagtatatagattgaggaaaaaaatatttccttgctttgaatatttttaagtccaagttagagcaaagagagaatgttagatacatctgattgattaaatgtgtgaatttgttagagaaaattaagagactcctttgcaatacagcaattgaaattagtcacaggtgaagggattgaaaagtgctgactgtgtaaaggacttgtccatagtagggcaagaaccttgtgttaatgaattctcaatgttggaggaagggaggcagttaatgggtagctgtaaatcctgatggactcatgtttaaagttatttacttgtgttttcagttttaattgctgatctgctgatttacatacctgcagtggttttgtactgttgttgcttaaaagaaatctcaactaagaaaaaggtaggttttcaagcagcctgacagttcgtctctgaaatgtattctttattagtctaactattaagtatagaccttagagaagccatgcttttggaaagagagtaattaggaatattgtatcttctatcaattttcacttcaaaagcatcaacttatcttacagtaattaattattttagtgtactactaagatacactgaatcttggaagttatgtactgttgaactacatgccttgctgaatttgttactttactggtaaagctgaattttgagctggcttgtgagattgaccaaactgaaaggcattttgaaaagttgttgtatattcttaattcatagttatcaaatattatttttggtcattttagataggttaacattagattgacttctccagtttgtgtatctgaaagtacttcctctgacaaaaccttttagtggttttgtttttcctttttatggaagtgtccaatgtcaccttcatgaaaacttcattgtctaaagagttgtattataaaaattgaatattttatgaaaagaaagtgtgacacctctggaaaaggggaacatttgctaatgtgttagataaaaaccacacttttaccctgcttgatttgtgtaacagattactttcttatctcacaatatttgtctttacagattgctaatgcattatgcatcttgctgtatccaggccttattcttatagactatggacattttcagtatcctttactaatgcagaaatgaagtcagttgcatattgtgaaatctagactcaatgtgtacattgctgtcgtctagtaatgtcttatttgatagagtgcttgcttatataaactatttcacaataatataaaagaatctcttcactaagcttttatttgaaaggtaaagtacagatttattaaaagtagaattgctttttcatgttgtttgattgggaacaaaatgttggtaaatgattagctctttctggggtgttggaaaaagagtgccaagtatggttatactctagtaattctaaagtgtaacatgtcttctatcctttgtaaatgttatctgacgtgaaaaaaggagaatgatcttacagttttatgagtttaaaaattttttttctatcagatagtagtagctagaagcttcaggaaactaaaactgataatcaaaatatggcttttatatgtgtatttttttgatgcctaaaataaggaacattcaaacaaagcttagatgagaataaattgataaaaatctgtatatatctatctaatttgtcttataatatattgaatgttattacctgtctccatctctcttaaaggaaaaaaagacgacattacacagcaacatgattatttaattaatagcttttccttttgatgccagtcttgttttagttataataacactaataggtatatctgtcaaaggacttacaaataaaagatattcaagtctgtagttgtttttatcatatattttatattctgtccactttactaatttagttttttaaaaattttgacattgtttatgggatcatggctatcagatactctgataatatcaagaacagtgatagaaaaggaaaaaatgttatctaccagagttttaaaactatatttactttgaaatgtgacactcatgcagaaaactatgcaaaatataaatgtacagctcagtgagttggcaaactaccactcatgtcaagaaatagaacattactagtatccaaaaactacccttgtacacctccccatccttctccctcctcctttcccaatggtacccctgaactaactactaatcctatagttttccccttttttgaattttatatgaaagggacagcatagtaagtattcttttgtgtttgatgttttgggctgaacattttgtttatgagatgtattcatgtagttgtgtgtagctgcagtttgttaaaaaactatgaaagtgaattcagtgttcactttcattgctttacgatattccattgcatgaatacatgtaattctatcactgagagagtaatttgggttgtttcccagtttgggccatgacgaataatgctgccatgaacatcttataaatatctccttgtacatatataaacattcttcttataagtggaattgttgagttatagagtgtgcacatgtcgatttttagataatcccaagttgtttttagcagcatgtaccaattaagactctcataacaatggtgtaagagttccagatgctctacatcttgaccaactgtcaatggttttcgatttagccattctggaaaatttgtagtagtatgtcccctgtgatttgagttaaactctgaaggctttcaggcatatgttatcttgtaaggatacatttttttcttttgagacggagtttcggagtttcgctcttgtccgccatgctggaatgcaatggcgtgattttggctcgctgcaacctctgcctcctgggttcaaacgatactcctgcctcagcctcctaagtagctgggattataggcatgtgccaccacaccctgttaatttttgtatttttagtagagacagggtttcactgtgttggccagactggtctcaaactcctgacctcaagtgatccacccaccttggcctcccagagtgctgggattataggtgtgagccactgcgcctagctctaaggacacattttttaaccattatgtacttttctcatttgcaaaatgtggataatagaaaccctgactttgtaagcttagtttgataattaaatgaattaatatttgtaaagcacttaagacagttcctgggagacactaagcattatataggcatttgttgctattattaccatttttataatttatttttgtggttctgaaattttacagtgatttgtttagacataggtgtttttcacaattgttttggatatccaaactgtatatgggtccatacgttttgaagactcatgttcttctgttctgctaaattctgttatattatttctttgatgattttctcacttttttctttcttgagcctattagtcagatgtttgatcttttgcatccctttctcttttgttttatgggttgggttatcttgagtttatccccaacacttctatcgaatttcatttgtattgttaggtatatttttaatttctaattagaatttactactttttgtttttttggtaaagttcactactgttccctgagtgattttaattctttcatggtcatttagtttccctttcatttcgattctttttctgtcataggttttctataaatgtttattttatcctagtgtatctatttttatttaagaataaggcaagaacacctgcatatgacttctatatatcattggtccactctaggataagtggggagcaagctggccaccacgcattgagatgcttaaatgtcagaatgtggaggggtttgcattatagtgctaacctctacactggatagtttagttcatttcttcagaaaaatatgccctcttttgttgccttggggtaaatgtttggctgccagataatctttgcatgggagtggggtaagatttgacttctacctctagggattttcagttaatctcttgttttcttctgcacatactactcaaagactgtaacctacttggtgtttccaaagttctctagggtcttgcagggtggattggctttttgctaccctgagtctcctctatgtatatactctaagctgtggcttccttcatcctattttatttgttatcacttctgtcttccagaaatatgttgaaatctttatctattataacagatcctcccattctctttatggctgtgaatttatactttttgtttgtttgtttttgttttcttgctctcttgcccaagctggagtgcagtggcatgatcatagctcactgcagcctcaacttcctgggctcaagcagtcctcctgcctcagcttcttgggtaactaggactccaggcttgcaccaccacactcggctaatttaaaaatttttttgtagagacggggttttgccatgttgctgaggctggtctcaaactcctggctcaagcaatcttcctgccttggccttccaaagtgttgggtttacaggtgtgagccacgacttctggcctgaatttatactattaaattccttttcctattattttaagagtctctcgggaaggagaggaggtaaacattagtgcctagctcaccattttgaactgaaaatctaattgtgatattgttttaactaacaatgttgttagttgctaattaagtacatatattactttatactattaatatatataatagaggaagtgtagcgatctcagtaaatttttttttaacttgctgttggaacattgttttattctctagattttggtatgttataataatattgtgaagtaatctaacagaaacaaagctatgttttaaatctttagagctcttttaaaccaaaacaaatcagttgctgcttagcagtagatttaatgtatttgatgctgttatacataatttcatgtttgtttatcacttcagtactttgaatttctattgggaaatagctttcattgtatatgttattttaaaatcacataagagatatgctatgagcttgcatttcctagagcatatctcttgtgtgatttgctttttaaaagctctatctttttaaaagattattgagataatttccttgacacaggaacatatataattctgtgagtcttggctttgctttgtggggtgttcttggaatatcttgtgactgcgacctcctagggtcactggcattttgcttagctataaattataaacagatggaactttaccacgccttgccatttttttgctttttacttggcaagtgttttaaaaaaggcctcaaaggaaaggggtgagtgacttttaaacactagaatccaaaaatttacttcagataatttttttggcatacttacttgcagtaagatgatctttcactttgccttttggtgatttcttataaatattttggctgtagggtatgtgggaagagagagattaagtcatgttctgtattttatttttaattttcctaactagagaaatatttcaattcatgtatatttactggtagtgtggattgggtagttagaactttgctgtaggattttatcactttagagcttactacattatatacttattagaaatacatccccatttgatatttttcttcatgaatgcactctcttattcctataggaatggcatctaacataaatgttaattacgatggtgataacagtccttttgttgaagtgcacgtcttagctgttgtgaattttttacctctgatttgagcacactcccatcttaagcctatattggtaacatagatttggcattactatacatgtgcatgtattatgttcagtgagactcaggttgattttgcagaattactgacctttccctatcttactgcctacctttgtttttgttttaggtttgtgttgctagttaagctagcttgtattgttgtggcttccttcgttctctgctggctgccattctttacagaaagggaacaaaccctgcaggttctaagaagactcttcccggttgatcgtggattatttgaggcatgtttaaacactttcctctcctttctgttactgtaccttacctgtgacctttaggggtttcatgtagaaggtacaaggaataggaacttcagctactttcctcctgtaatcattccttgccagttattgcttgattgattaattgattggttgagacaggatcttgctgttgcccaggctggagggcagtggctattcgcaggggtaatcatggtgcactacagccttgaactcctgggctcaagtgattctcctgcctttgcctcccaagtagctgggacaacagggtgtgtgcaccttgctagttatttaatccattatataacccctagctcaggtggcattttttagtatgttccatcaataggtaatattcatgccatcatcagatccataattgaattatatgtttttgtaatgaaatagggtttgtaatgaaagacagcatgagaagtttcagctacaattttaacagctgtgtaattttttggtgtatattctgtttttagtcttaggaaattatttgtaaaactaataatcatgttgcttcaggaagatctcataatttcttatgagatatataaccttcatccatagtaatttttaatgagaatctttcatttcatttcatttaatgctagtttaatcactcttgttaaacttttattatgtgaataatttgatcatttagatttggtaattaaattaaaccatttttctgaaacaaaaaggccttttaataaagttagacagaaacaacatatttatagataatttgctagcatttcttttaaaaataattttaaaagcatattttcctaagttttgaatatataaatttctatagaatatctttcagtagacttataggaagatggaaccagcattttgaaagcgactaagatgggagtttggtgttgtgaaggaacagaaatgtgtgactgtatgtcaacaggatgatggtagtgatgatctaaataatcactattgttataaccaccacttagcaggtgccagacacttccatgtaattttatttgatctttacagtagctttgtggtagctattgtctccactttacagattagaaaactgaggtcaaagattcctataactagtatgtagcagaactgtgacttgaacttggaaaattgttttcctaacctcttctttatataaactctaacacttacataaagaaaagtttaactctctatgtaagctgcctaattatttgccttaccttccatttcagaaatggcatttatcatgataattataaaaatgagtatcagacatgtttgatggtgttgccagtctcttccattcacttcttgccttcaaaatctgaaaagcattttctttgatctagcagaggaaagtgggatgatatagttgtcagtgatagttacttttttgatgttaagtctgcacagctgtaagtcaagcagctgtgtagagaacggatttcaccaccaggagagctgtagttacaaacttaattttgaaagtgatcctagcacaactgctaatgtctttagactttgatttattagcaattagctcttgtcattgctagtagctagcaggttactctgttactctaagtaaattcagttgtgtgataaaaatgggtcaaatgtaatatgtattctataaattgtagaaaaaacatttcttagaaaaatttccaaagatgaaggactttagtattcagggatagtgcactgctctttgaaaactattaagtatttgggaatgtctggattatggtgggccaatgcttttgatcaactgccctgcacaaaaatgaaaaatgcttgagacagtgtatgcgtatatgtttattcctggaggatttaatctatttagttataattgtgactaaaagtttcacatctcaaaaagtttattagagattatgggctgtacttcatgggttttaatatttctttcaattataccagaatgtaaagctaacaaatctcttttaaggataaagtagccaatatttggtgcagcttcaatgtctttctgaagattaaggatattttgccacgtcacatccaattaataatgaggtaagagaaacaaagtttgtatgtagtattttataagttactctttaaaagcattatggtattatttcatttatttggcatcattagggaatgaggtgtttttcttttcttttttttttttttgagacagagtctggctctgtcacccaggttggagtgcagtggcttgagctcggctcactgcagtctctgtctcctgggttcaagtgattctcctgcctcagcctctggagtagctgggattacaggcgcccgccacatggccagctaatttttgtattttagtaaagatgaggtttcaccattttggccaggctggtctcgaactcctgacctcaggtgatccacccacctcggcctcccaaagtgctgggattacaggcatgagccactgcacccagccgaggtgtttttctttagaggattttccacataaaagacctattgctctgtacaataaaactcttcaacttgaattattttatgtgaaaatttctgaattgttaccttgttctctccttgaacagagagtacattaaatacgattaatattatgttgaagagtcatgatattcagtgtgtatcagtcaggatcaatccaagaagtaggagtaggagatcactgtgtactgtgtgtgtgtgaattcgtgacaaggaattggcttatacagttgtagggcctagctaagcaaaacagaagtcacaaggcaggcagtcaggagggaatatctaggggggaaggaagagcaattcagacccagatgctgttagggaaggcctcagccgtcttttaaagggcttttatttgattaagttaggcgcctcaggacaagatcccttttgattaatttaaaatcagctgagtaggggtttcacatctgcaaaattctttcacagcagattagtgttcaaataactgggagatgagatgggtgtggcctctctgtcttccaaatcttatgagaatttcccttgtagcccaccctaacaaaggcatacaggaagggaattctagggacattagttcagcctagccaagttgatgagtcaaaatctacaactgggaaaaatcagttattgtattaggttatatacttgttttcagggctttcaggggctatttcccatagtactaaatggttccaggccactttgcttgttgagtctgtctgctttttctagttctttttcctcccacccattagccatcattaggagaagctctagtagcttcctgctccctttccaccttgttctttatgatttaccatgggcttgaaaatcagataatcaatgtttgtgaaatgagggctagagagactcttttgtgagtaaagtttatgaatgtttgtgttacagatatagcattatctcttatacttcattatgttttcttattttgagtgtttgataattgaccttcaactatgtatctttgtatattttctatacatgatattaaatactaaaataacagaagcaatatttagttttatcatgtttggtctatattatgtaatcgtgtataaaagtatatatatatatcaatgtgtagattttgtttaaatgttatttcatctttaaatttaataaataaaaatatagtttgaaataaacttaagttgataaataatatgatccttatatttaaaaaatatttccttatttaagctagatttatacctctacaaagaagacaaatatttgatttgtattaattttttagcttttgttttacgtttttgagcctgcttcctgcatgcataaaattaatacttcagccctcttccaaaggattcaaatttacactggtaagtttttcattactttagatacttaattcttgccacaactgatcttttaaaaattattttcatggtctgcacaggatttattgggttgggaaacaagacattcatttatttggcagacatttattggatgtttcccatacttagcttctgtgttagacactaagctaagcaatcaatactctttcagttaattcaactatttaatttgtttcgtattagttaatgagggactacaaagtagaaaacagtggcaatgaacttaagtagcttaaatagttatgctataaaacagatggtattaagttctatcaggtacaaatgaagtcctatgatggtgtgggaaagggagatattatctcggggggagattttagaatgctgtttagggcaagtgggatttgagcccaaatttgaaagtggggcaaggttagaacagcaggttatatagcagaagagaagttcaaaacagaaggaagaagttgaaggtccagaggtgggaaaggacacaggatattctgggaatagctattaaacaatataacttgtgtgagttttgtgtgtatgtgttgagagtaggagaggatatagtgaaagataagggtaaaaattgaccaaattattgaagaccttgaaaatcttggttgaaaaggtttggagtttgatttgtgtgcaagagaaactaaaaaatatttttgagaaggagagggggcagatctctgttttaggaggatgacttgtgtcagtttgaagatggactaggtgcattttctacagtttagggtttttctgagtagctttacaaagtcttcttggttgtgtttctatggcatttaaaattttgttcctgtgtgccatggtctataaaatgacatttaaaaaataaccttttaaactatcaagaacatttagtttctgaaaacagtaagtcctactggacttatgtgaggcaacatttagaaattagggttccaagtctgggactgccatgtaagtacgttggataaaaacaagccagaaaagaacataacagcgaaatacttcaaaagtgcatctcattaccacaatgcaaaaaggatagctttatgttcctcttttctttttcattatctttttattgatgatttgtgttgtttgattctgtgaatgaactctgagcataccaagtcatctgttgttaatattctattggatagttagaacagaatggatatggtgtaatgctctgatgtcttcactaggcttaacctgaaatatcttccaagcttgtgatagattgttgtttttctaggaagtagaatgctaaataaatgtacagttcaaagataatagaatagaatttcagagtttgggtaactttagcagtgttagagatgattacttttaggattataagccagaaaaaacattttctttttcttagttttgtaatttttttcagtttggtatgttttaaaagaagccattgtgttaaaactttttaaatgtaagatttttgttattttgtttttgttaatcatgctttgaattcttattgtatacttctgagagttttaagaacatttcccattataattgttttaaaagtattttcctttcaatcatgtttgcctgaattatatctcaatataaatctataattgaggtaactgatagcatgaatactggtgcatgtatagcagcaaaaggatttatatttaatttttcaggtattgagtgccttctcatatgccaggtcctcctctaggtactggcatgtaaaggaatgacagatgacatccctgctctcttacttggggccttccatgctagtggcaggagagggacaataaacaagataaatccattaacaagaaagcatctgggagtaatgagtgctatgaagaaagtagtgttggccgggcacggtggctcacacctgtaatcccagcactttgggaggccgaggcaggtggatcacctgaggttgggagttcaagaccagcctgaccaacatggagaaaccctgtctctactaaaaatacaaaatttgccaggcgtcgtggttcatgcctgtaatcctagctactgggaggctgaggcaggagaatcgcttgaacctgggaggcggaggttgcggcgagtggagattgcgccactgcactccagcctgggcaacaagagtgaaactccatctcaaaaaaaaaaaaaagtagtgttatgtgaaaagagagctgatggaatgaggttaggggacacttagattgagtaaaggaaacctttctagagaaggtttctatagtttagggtttttctgagtagctttattattaaatattaaatttaataatttaatatttaataaattattaaattattaaataataatatttataaatattaaatattaaaatagtatttgagccaagaagtgaatgaccaaccagaaggagccaatcacaagaagatctgggccctgacttgatagaatcatatttttccttaaggcaggaacacatttggcaaaaggagatgaatgaagtggctgctgtaaaatgagtgagggagatacaagagatgagttggaagggaaggcaggaaccagatcttgtaggcattgggatttttttctaagtataataggaagctattggaggattttaaacaggaaaattacatgatctgatatggtagctgtttggagaatggactatcaggaggcaggagtgttaccaattaggagattattgcactactacaaagatggagggtggcttagaccactcctctgccacccttagcagaggggaatggagagaagtggatggatattgtatttaggaggtgctgtagatagcatttgctgatgggttagatgtgtagcatggataagattcaaggtttttgcttgagcaactggatagttatccatatctaatttgcagaatataaacttctcaaaatagataattttttttaaactctaaatagcacattattaatttataaaacattaatatattttattgaagtgcatgttttaaaacaccaaaatagatttgttttgccggttttagattctgaccttcttgtctttcatggttttaaatttaagttgtctgagattccaggggaggatgaatgtatgattgttgtgtctgaggtatttactagttctgtttattaataactgagttatgatgaacttagatggttaaataaagctttataatcattgttttttgaaaaaatatgtcaattttttaatttgattaaaatatgcatactagtgttgtttgtattttacttctaaatagagctttaataaactttcaactttcatttgaaatgatttttatttagattctataattaacttgatatgctatttcacaagttgttatatctcatttcccccccttttttcttaaaggttagctgtgcgctatcattctttttattttctttccaagtacatgaaaaatccattctcttggtgtcactgtaagtagaaacatttgaaatatgtgtttatttgtttataatataactttataatttacatacaaatatacatttgaatgcaaaacaaaactacacaaatgttatatcttggcataaaatgatttcatagtcaggtttttttccagaatttttgattttctttataaagtgtattttaaactgaaaaattttggtagaatgttattgacataatagtaatttcttcctgttccttcacttatattttctacatgctaataaaaaatatatccttcaaagaggttttcatcagattggagcctgtttgtcatctttgctttttcatttcattcatttccacatctattcggtagccttcttctttccatttacttccatggggtcttttgtatgttgccttctttctctttttttgccacaagcttagtttaggccctattggcaatctgtaaccagactactttgttttagaagcattaaatttttttcctgatgttcatagaaagcagtggatgacagctgggagtatgatatcctaatattaaaatagtattcacatagaaccctttggaatactgaaatcctcctctaggtcaatcccaacccactactgctctacccctcaccctatgttcactaggatcctgtggaagatacatgtacagaatgaccaatgacaaatggcaggcagtattgcttttattaggtggagctttggactaaaaccttcgtgcagagctgggctggcctgtgtggaaggcttcttggctctaaataaaacagtctcatatcattgtagactgggaagactgcttaatgccatcctctgaggcccaaacctgagttagagcttaccactattgtatgaggctaggctgaccctacacaaatcactggtaccaggggatgaaactgtggagaggcattactttcaaacatgtattaatatatttccccagaatttatactcatagaaaggcagctcattcaggacctataatctgaccagattagttctcagacactgaacttctaggggttcattttttacaaatgcacctagattatttgtaacagtgcatggctttaatctatttttggtaaatggttttacagtttgcattaaaagttccttttgggctggacctggtggctcaagcctgtaatcccagcactttgggaggctgaggcaggcagatcatgaggtcaggagatcgacaccatcctgactaacacggtgaaaccctgtctctactaaaaatacaaaaaaattagccgggcatggtggcgggcacctgtaatcccagctacttgggaggctgaggcaggagaattgcttgaacccaggaggtggaggttgcagtgagctgagactgcaccactgcactccagcctgggcgacagactgagactctgtctcaaaaaaaaaaaaaaattaaataaaagttccttttgacctggtcccagctaatcatatcattaaacaaatatttcattcagtaaatatttattgagtgccttctatttatcaggcactgttttgtgcacatgggatatattccagacaaaaatccctgccttcttagctatcattcttaaagatagacacttattaaaaaaaaaaaagaagtgagtgtgttagaaggtaataaataccatgatggagaaataaaacagagcaagagtaattaggagtactggaggatgggatgcaggtagcggttgcaattttattttattttattattatttttgagatggagttttgctcttgttgcccaagctggagtgcaatagcgtgatcttggctcaccacaacctccgcctccctagttcaagcgattctcctgcctcagtgatcattaaaaagtcaggaaacaacagatactggagagtttgtggagaaataggaatgcttttatactgttggtgggagtgtatattagttcaaccattgtggaagatagtgtggtgatgcctcaaggatctagaaccagaaataccatttgacccagcaatcccattactgagtatatacccaaaggattagaaatcatttgacctagcaatcccattactgggtatatactcaaaggattataaatcattctactataaagacacatgcacatgtatgtttattgcagcactattcatgatagcaaagacttggaacaaacccagatgcccatcaatgatagattggattaagaaaatgtggcacatacacaccatggaatattatgcggccaaaaagaaggatgagttcatgtcctttgcagggacacagatgcagctggaaaccatcattctcagcaaactaacacagcaacagaaaaccaaacaccacgtgttctcactcataagtgggagttgaacaatcagaacacatggaaacggaggggaacatcacacactggcctgttggggggtgggggctaggggagggatagcattagggagaaatacgtaatgtagatgacaggttgatgggtgcagcaaaccaccatggcacgtgtatacctatgtaacaaacctgcatgttctgcacatgtatcccagaacttaaagtatatatatatacatatatgtatatatataatttatatataaatatctatttatataaatatctatataaataaatatataaatatataaatataaatatatataaatatataaataaatatataaatatatataaatataaatatatatataactatgaatttatatttatataaatatatatctatatgaatataaatatatatttatataaatataaatatatatataaatatatatatttatatagatataaatatatatataaatatatatatttatatagatataaatatatatctatatatgaatatatatctataggaatataaatatatatctatataaatataaatatatataagtataaatatatataaatatatatctatataaatataaatatatatataaatataaatatatatataaatatatatataaatataaatatatatataaatatatatatataaaagaaggtgtattaaggaaatgaggtggtaagttgcatcagatgctgcttataggtcaaataagatgagggctgggaatatattatttgccttagcaatatggaagtcactggtgactttggtggggccagtgttggtggagcaatgcacggagaagcctgattaggtagggttaagaaaaaatgggccgggcacagtggctcatgcctgtaatcccagcactttgggaggcccaggcgggtggatcatctgaggttgggagttcaagaccagcctgaccaatatggagaaaccctgtctctactaaaattacaaaattagctgggtgtggtgatgcatgcctgtaatcccagctactcgggagggtgaggcaggagaattgcttgaacccaggaggtggaggttgcggtgagccaagattgcaccattgcattccagcatgggcaacgagagcaaaactccgtctcaaaaaacaaaggaaacaaaaatagaaaaaatgagaggagaagaactaaagacaagtagggataatgcaatttttttttttttttttgaggcagggtcttactctgtcacccatgctagagtgcagtggcgtgatctttgctcactgcagcctctgcctcccgggttcaagcgattctcccacatcagcctccccagtagctgggactacagacgcacaccaccacgcccagctaatttttgtatttttggaagagaaagggtttcaccatgttggccaggctggtctcgaattcctgacctcaactgattcccctgccttggcctcccaaagtgctgggattacaggcatgagccactgcgcctggctgataattcattttttaaaagaaatatttaaaattatatttttaaaattgtgttaaagtacacatagcataaatgttacattgtcaattagtacattcacactgttgtgcaagcatcaccactatctacctccagaacatcttcatcaccgcaaaaggaaatcccatacccaaagcagtccctctccattttcccttccccgagtccctctaaccactaatctgctttctgcaaatctctgtggatttgtctattctggatattttatataaatggaatcatattatatgtggtcttttgtgtctagcttcttaatattttcaaggttcatccatgttgtatcagaactgtattcttttttatgcctgaatagtattgcattgtatcgatacactacattttgttcatcattcctcagttgatggacattgggttgttaccatgttttggctgttgtgaatagtgccactgtgaatattcatgtacaagtttttgtttgagtctatactcaggagtagaattgctgagtcacatggcaattctgtatttaacttattgaggaaccaccagacttttccatagtggctgcaccacttaacattcccactaataatatatgaaggcttcaatttctccatatccttgatagcacttgttattttccatcattttgattatagccatgctagtggatatgagtggtatctcatcgtgattctgatttgcatatccctaattactaatgatattgaacatctctttatgtgcttgttggcacaatatgtctatcttcttcagagacaagcctatttaaatcctttgcctattttttttttgagacggagtctcgctctgtcacccaggctggaatgcaatggcacggtctcagctcactgcaacctccgcctcccgggttcaagtgattctcctgcctcagcctcccgagtagctgggactacaggcgcgtgccaccacacctggctaatttttgcatttttagtagagatggggtttcactatgttggccaggctggtcttgaactcctgacctcgtgatccacccgcctcggcctcccaaagtgctgggattacaggcgtgaaccactgcgcttggccgttttgcccaatttttaattgggttgtcattttttgagttttaggagttctttatgtatcctgggtactagcctttatcagatatatgatttgcaaatattttctcccattctttgggttgtcttttttaccctcttgatagtgttcttttgatgcacaaaagtttttaattttgatgaagtctaatttacctatcttgtcttttgattgtacttttgatatatatctaagaaaccagtgccaaactcaaggaaataaagatttaccctcattttccttctaagagttttatggatttagctcttatatttatgtctttgatccattttgagttaattttttttttttttttttttttgagacagagcctcggtctgtcaccgaggttagagtacagtggtgcaatcttagctcactacaacctccacctactaggttcaagagattctcctgcctcagcctcccaagtagctgggactatagttgcccgccacaacagctggctaatttttgtatttttagtagagacagggatttaattatgttggtcaggctggtctcgaactcctgacctcaagtgatctgcctgccttggcctcccaaagtgctgggattacaggcgtgagccactgtgcccagttgagtttttatatatggtgtgaggaaggtagactgttcttcagaggagttttgttgaaaaaggaagcagaaaaatagggcaataactggtagagaaaatggggtcaagataggtttgtttgtttaagagaggagcaataaaggcaggggaatgatcagcagagaaggaaagctgatggtacaggatctcaagaggaggagctgctggagcactgtcattgggaaagggagatggggtaggatctagagcacaaatggaagaattggcattggacagatgtgtgaagagttcctctttagtaaaaggggtgaacaggctatattggtagaggtgctgggaagggagtaaatgtgatggtgggcatctgtgaaagttctgttttaactgcttcagttttcttattgaagtgagagggaaagtcattagccaagagtgggttgaagctgttggaagtaggagggagaagtgtgaaacattttctaaggagagacagagtgtaaacagatcagggaaatatatagtaattgcagggcacttgaatatcatgatcatgtatttaaagtgagaccagttagtatgggtagctgtttttctcttgagcagttgttcagtatggttggagtaagcactggtggagagttgagtatttccaggtttatggttttgtctggtgaggataactcccttgcttgagggcttaagagtgaatgtatgggagtgattataatgattgaccttagaatttaaggtaggtaaaaagggaaaaggccatcgaagcgatgagggaaagtgaaaacgtggtaggaacaatggattgaagatctcggtaggatcaaaagattgtcggagttggaatatccaaaaggcaggagatagtggtgagagtcatggaggaggtgcagtctaaagtatgaccgtaagggacaggattaaagatgagatcactagaagagaggcgttatagcaaatgagagggaagatctatgtatatgttaaaattgccaagaattaagtcagtttgtagagagtgatagtgagaaaggagttgaaatctttgggtaatggaggaagcggccctgtggttggtcagtatttacaagatggggaataatcggggataaagtgtgatgagaagagtttcaaagctggagattattagggtggagagagggagaactggtaggaaagtagtgaggaagatcaaggaggttacttcccaccatcaggccaagtcacttgaagactgtggaaacaacaaaaacaggcacagttgagagggcagagggcagtactgtcctcagaggagagagccaggcattgtttcaaacaaggtggtaaagggaggggttcagagaagaggttgaggatgtagggcatttcactgtttggtgatgaattgtaagtactttgaggttaggagctgagttataatcatctttgtattcctttcagagcagtgcttatatgtagtaagtttttttaagagacaaggtctcacttagtcacccaggctggagcaaagtgacatggtcatagctcactgcagcctcggactcctgggctcaagtgagcctcccacttcagcctcccaagtaacaagtaccccaggcgtgcgtcaccatgccaggctaatttgtaaattttttgtggaggtggtgtcttgctatattctctaggctggtcttgaattcctgggctcaagtgatcctcccaccttggcctccaaaagtgccaggattacagttgtgagcccctgcgccggctgtaatacattttttgtcaatgcttgtgtttggtaaataaatattgaatgcataaatgggaaagaattaaaccagaaagagaaaacagtatttattgagcaccttcaatgagcttgctattaatatgcgtccattctcaagcagtgaaatggaaagtcctctagtaatttctttctttgagatggagtcttgctctgtcaccaggctggagtgcagtggcacgatctcggctcactgcaacctccgactccctggttcaagcaattctcctgcctcagcctcctgagtagctgggattacaggcacgcaccaccgtgtccagctaatttttttttttttttttttgtatttttagtagagacggggtttcaccatgttggccaggatggtcttgaactcctgacctcgtgatccgcctgtctcagcctcccaaagtgctgcgattacaggtgtgagccactgcgcccggcctagtaatttcttttagtagttttcagtttataatcccagggtttaaatctcatatattagttgacataggaaaaagtcatccttctgggaaagggggagaatgcccaaatctttatagagcactttttaaaataaagagattcaaaataatgataacaattattcaacaaccaccatcattaggaaagtttattgtattttaaaaaagtaaacactagatgatacctgcaaagagttctttcaactatttaagaatacagggtattattattatttccatttccacttaagaaaatagattaatcatttgctcaaggtcacacagtaaataaagggcaaacatggggaccaggactcagggcttcacactagcaatgctccttctttgagcattgccacaattgaatcccaaaggtactggagcaggagttgtggtaaggaggttacagggcttagagctatgaccctaaacaactttttttttttttttttttttttggagatggagtctcgccctgtcatctcactctgttgcccaggctggagtgcagtggtgtgatctcagctcactgcaacctcctcctcccgggttcaagcagttctcctgcttcagcctcccaagtagctgggattacaggcacgcaccaccaagcccagctaattttttttgtatttttagtagcgatggggtttcaccatgttggccaggctggtctcgaactcctgacctcaagtgatctaccagccttggcctaccaaagtactgggattacaggcctgagccactgtgcctggcccctaaacaattctttgataaagccagtggttctgtttattggcattgtgcttcctgttcctatactatttccctttttatgtagctcttcctactaatttcttcctccttttaattttattattatcaatttgttttcctttatcctcttgtctctcttgtcctctccagtggcatgatgatgttgtctgccatatctttagttttaacttagcggagtaatatgtaacatgaaagaacataaaagagatgtttgaaaacaatactgggaattcatatttaccaagtactacgaaatatgtgacaaagccttctcagatttgtttatctgatccttttcttaagctacttgtttgtatgatagagaaaaaaagttccattaacggcatactggaagcagcagttttccaattattatgaggagttgacacctctgtgcctgtgtctaggctaatttagtctggactgttaacaaaatgaatcagtagtccatatgaagaccttcctggctgtttttaagctaccgctgaaaatcagacagataaaatgtatttatattttttacaattaggagttgaagttatattctgtaatattaaaatatttttttctttacgattttagaccagtctgcttagttttaagtgaaattccttttatgtctacttggtttttacttgtgtcaacatttaggtaagtcatatcaatttccatatattttcagtataattcttgtaaactaatttaaaacttttttatgaagtggttatggtttgaattgataattctcttgtgatttttaaaaattttcctttacagtatgctacctcttctattgaaggatgaactcctaatgccctctgttgtgacaacaatggcattttttatagcttgtgtaacttccttttcaatatttgaaaagacttctgaagaagaactgcagttgaaatccttttccatttctgtgaggaaatatcttccatgttttacatttctttccagaattatacaatatttggtaagttcaatttttaagaaatgacacatttttcagcatgtcactattttaaaaaattattgaagtagtgattttcttttatacctttttgagatataattcacataaatccactcatttaaagtatacaacttagtggttttaagtatgtaaacagatttgcacaactatcaccatcatctaattttacattattttgtcactcccagaagaaattctgtacccattagcattcattcccaattctattctcactcctaactcccttccttggacagccagtttctgcctctttagatttgcctactttggacattgcatataaatggaatgtattagtctgtgatagctgccataacaaaatacaacagaaatttattttcttacagttctagagactaaaagttcaagatcaagatcaaggttctaccatcagggttggtttctggtgaggcctctcttcctggcttgtagaaggtctctgctttatgtgtcacacatggagagagacctctgttgtctcttccttttcttgtaaggacaccagtactactggattagggccccattcttatcatctaatttaaccttatttacctcctaaaaggctatatctccaaataacagtcacattgggggttagggcttcaacatatgaattttaattcagtccataacatgggataataaaattgtggtctttatgactcggttctttcacttagtgtgtgtgtgtgtgtgtgtgtgtgtgtgtgtgtgtgtatttatttatttttttgagacagagtcttgctctgtcactcaggctagagtgcagtggcatgatcttgtctcactgcaacctctgcctcctggattcaagcaattctcctgcctcagcctccctagtagctggaactacaggcatgcgccaccatgcccagctaaattttgtatttttagtagagatgggatttcagtatgtcggccaagctgttcttgaactcctgacctcatgatctgccggccttggcctcccaaagtgctgggattacaggcatgagccactgcgcccagccacttagcatatttttgaggttcatttgttatagcatatatcagtactttattcctttttattaccaaattatattccattatatggatataccacattttgtttatccattcatgaattaatggacatgaagttgtttctacttttttagtgttatgaatataataatgctgttgtgaacatttgtttacaaggtattgagtgcacatatgttttcatttcccttatgtgtatacctgggagtagaattgctagatcatatggtaattctatgtttaacatcttcagaaactgccaaactgttttccaaagtgcagcacaattcttcattctcaccaacaatgtgtgagggttctaatttcttcacatctttcacagcatttgttgtctttttaattataaccatcctagtgggtgtgaggtggtatttcattggagtgctgacttgcatttccctaatgactaatgatgttgaacatcttttcatgtgcttatcggccatttgtatatcttctttggagaaatgcctattcaaatcctttgcccattttaaactgggttgtctttttgagttgtaagagtttttttaatatatattcttgatatgagttccttaccagatatttaacttgcaaatatcctctcccattctgtgtgttgccttttcactttcttgatggtatcatttgcagcagaaaagttttgattttgataacatccagtatatctatttttttcttttgttgtgcttttggtgtcatatctaagaaaccattgtataaccagtggtcacaaatatttacccctgtattttcttctaagagttttatagtttttaaatctatgcctttgagttgctttgagttaatattgtatatggtgtgaggtaggagtctgactttattcaattatttcagttccattgaattgtcttggcactcttgttgaaaatcagttgttcttaaatgtaagggtttatttctggaatctcagttctgttccattgatctatatgtctatccttatgccactgccatactgtcttgtttactgtagctttgtagttagttttgaaattgaaaatgcaagtccactgattttgttcttttacaagattgttttatctattttacatccctttattttcatattatttttagaagttcatcagttttctcccaaaactcagctgagattttgatagggactgagtcgattctgcatatcaatttgtggaatattgctttatttttttgagacaaggtctcactttgttgcccagattggagtgcaatggtgtgatcttggctcactgcaacctctgcctcccaggctcaagcagtcttcccacctcagcccccttaatagctgggactatgggcctgtgccaccacacccggctaatttttttagagacggagtttcaccatgaatattgccgtcttaatatttagtcttccaatgaacaaacacaggatgtgtttccatttatttagatatttaatttctttcaacaatgttttgtagttttcagtgtataagttttggacttcttttgttaaatttattcttaagtataacgaatgatcctaaagcataattctttatgatgctattgtaaaggaattgttttcttaatttcattttcataatgttcattgctactatatacaaatatatttttgtatattcaacttgtattcttcggcataggtttttaatggatttcctacagttttcaatatacaagataatgtaatctgcaaaccatgagttttacttcttcctttctaatgtggatgacttttatcttttatttctcttacttgcctaattgccctaggacctataagacagtgttgaatacaggtaacaagagtggacatcttctcttttacttgatattagagggaaagcatctggtctgtcaccattaactatgatgttaactgtgggctttttaaaatagatgtcttttatctggttgaggaagttctcttcaattcctagtttacatgtttttctcatgaaaaaatgctggattctgtctaattctttttctgcatctttggtcatgtgttttttttttcttttattctattatatgacatatttcattgattgatttttgtatgttacactaaccttgaattcctaggataaatcctactggatcatggtgtataattctttttatctgccactggcttcagtttgacagtattctgttgatgatttttgcatttatattcataagagacactaacatgtagttttcatgtgacgtctttgtctactcataaagttcatatatttaaggcatatcacattacattcaaggctaaaatgctagattgcaatgtatttgaggtcaagaactctgcattttatacatgccattttatctgtagcatctatcagtgcctcacaaagaataggtgctctgatttttgtttgttgaatgaatgaatattcatctaattattataatgaaaaattagaggcagctcaattatccagtagttgaaaaatgatacatgaataagtatataagctccacggaatatttgacaactactacaaatgttatgaagttgttgttgttgagacaggatctcactctgttgcctaggcgggagtgcggtggtgcatttttaactcactgcaacctggaactcctgggcccaagtgatcctccttcctcagcctcctgagtagctaggattataggcatgcaccatcatgcttgcctaatttttattttttattttattctttttgagatggagtttcactcttgttgcccaggctggagtgcaatggcacgaacttggctcactgcaacctcaacctcctgggtttatgcaattcttctgcctcagcctcctgagtagctgggactacaggcacgtgccaccacaccctgccaatttttgtatttttaatagagacggggtttcaccatattggccaggctggtctcgaactcctgacctcgtgatccacccgcctcagcctcccaaagtgctgggattacaggcgtgagctaccgcgcccagcccaacaggctatacttatttatatttttgagtactacatagaggattgcccaaagtacccagataacaaagagaaaagaatgactaactctattaggggagtgtaggggaaggtttcaaaggagatattttatatttagatcttgtaggaagacaaggcaggtattctcagggcagagttgaatgggtgtcctgagggttttgcactttaggtaatgaccatggaggatagtggtgtgggaggtaggaagttaagaggtgaacaggaaagacaaggagaggattaactttactcaggggttcaaatggaaagtagatataaagttcattttttgttagtataggcccagattcctgagtgtatgtcaaaatctagccctattgtgatattcacaatctggtccagtaatcttaaggtgaggaccgctatgggctcccagatttatttgttctttaatagtttttgagcacttactatatgcaagcattgttctggaggctgaggatacggtagtgaccaaaactaacagaaatccctgctcccatggaggttgcattctagtggagaaatccagcaccagcatatgtaaaatatatggcatgtcagagggtgataagtgctatggagaacaacaaagcaagggagaaatcgatatgatatgcaggagggatgaatgcaattttaaagtggcagggctttcttgagcaaagaaccaaaggaagtaaactgcagataattgagggtagaacatcctagaagagaaaaactgcaaatgcagtgaacatcatggaggtcatagtgattggagctgggtgagggaaagaaataataggacctaagattagagaggtaacagtgtagtttcttataatgggactagaatctgacttacatttttaaaaggtccctatggtagctatgtggagaacagattgtggataatggaatccatgagatgatggtgctgtggaccagggtagcagtggaagtggttagaaatggtcagattttttatatattttgaaggtagagccaacaggaattgctggggttgtgaaagagaggtgttcaagatgactccaaggtttttggcatacataactgaatgggtggggttgccatttaccgaattggaggaagcatgttgaaggaactttgtgtgtggtgggggcagtcgggagtatgaggagaccaagagttttttacatgtttagttttagatacctattagatatccaagtagagatattaagaagtacctggatatatgagtccagagtttagcgcaagcttgtccaatctgcaactgaagctggctttgaatgcagtgcaatacaaattcataaacttcttaaaacctggagtttttttgcgatatttttaaaaactcatcagctatcgttagtgttggtgtattttatgtgtggcccaagataattcttctttttccagtgtggcccagggaagccaaaagattggacaaccctggtttaggggaaagggccaggctggagacgaagttgagtctttacatatagttggtaattaaagtcatattactggatgactcactaagggtatgagtatagattaataagaggaataggtacgaagccccagaatgcagacgtaggggacatgaggaaccagcaaagatgtctaagaattaactgggtgagataggagaaccagaagagtatgatgtcatggaagccaagtgaacgaagtgtttcagtgagaggagagtgatttcaaatgctaatgagagaatcaagtaaggcagtaagaactgaccatgggatttactacactggaggtcattatggatatttgactatagcagtttcatcgtgattagggtgaaagcccaattggtatgggttcactagtgaatgggatgaagactggacacagcatgtttataggcaactgttttgggaaacaagtgtaaataggagcagacaaatggggtaatagttggagcaagagagggtttttgttctgtttaacactgactcaagatcgtggtattatgacatttcaaccagtcccatatttcttaagtttgaaacttttattttaaagatttcattccagatgtttgcacttcccactaaggttgcctcaggaatttttcctttaacgacactggcagcctttgtttgtatctgcttgtaagctttcttggcgcctatcctcgcttttccatttggaatgatcactgcattactctctatttagatcttaccaatactgtcataatgtagccagcagttaaggcatcctttagggttctgtgtcccacccacttcatggaagtcactactgtttctcactgctttctacatttatttatactgcttttgtatacctgtgtactgtgctagggataaaatgagtaagatcttgctggtctttgtcttaaaggagctcacagtctagagtcacagtctgtccagtacggtagccactagacatatatataaatttaaacttattaaatttaaataaaaattcagttcctcagtcacagtaagtacatttcaaatgcccaatagccacatgtggttagcagctactatactggagtgcagacaaaacattttcattactgcaggaagttctattgtatagcacattggcctagagaagaccacactaactgatgaccacacaactacaataaatgtgctaattatttttactactcagcttggtatttaagccagtgtgactttgtgattttatttaacattcccctcagtagatggaaaactctttgaggccagaggacctcattttctttcatgtgccttcgtgtgctttactcattgaaagcatttagcgaatatgaaatgtaattttccatttgccatggaaaactttttcacagatgggttctcaaggttagcttagaattttaaaaattgatacagaatagatgtatatattttgggggtatatgtgataatttgattcatttattcattcatgtaatgcatgaagatcaaatcggggtaactgggctatttattaccttaaaaatatgtctttatgctaggaacattcaacttattattttctagctattttaaaatgtacattaatgttaactatattcagcctactgacctgccaaacactaggttttatttcttctagctacctatacatttgtacccattagcttagaattttatatcctgttggaccccaggggatgttataaatttaaccctgactagcattaatatttgtcccagatacctttgttcagtgccttggtggtaggaagtataagaagacaggggtcctcaggttttggctacacatgggaatcacttggagagctttaaaaagtactgaggcctgatttaattggtctggggtgtgatgtgggcattgagattttaaaaactcctcatatgattctaataggaagtcaaagttgagatacaccagaataaattagaccctcaaccctcacctttaattctgctcatttaatagctacaagtcaatgtttccagcacatttaaatttcaccttttatactactcagtaatcctttttttccttgcagtttcttatctcagtcatcactatggtgcttctgacgttgatgactgtcacactggatcctcctcagaaactaccggacttgttttctgtattggtgtgttttgtatcttgcttgaacttcctgttcttcttggtatactttaacattattattatgtgggattccaaaagtggaagaaatcagaagaaaatcagctagctgtattcctaaacaaattgtttcctaaacaaatgtgaaaatgtgaacagtgctgaaaggttttgtgaactttttgctatgtataaatgaaattaccattttgagaaccatggaaccacaggaaaggaaatggtgaaaagtcattgttgtctacacaaaataaatgtatatggagaccaaagaccaatggaggcttgtctaagtactgcttggccaaaacatgtggttttattattcacagctattcaagtggggaaaaaagagaaacatgtccttaatcccattgtttactcaggaaatgcactttttaaatgtctttaaaaaactgagaaatatttcttgatatttgctttgtctaaacctacttccttcatcagaccatatagtgagcttcatgggagaattgagccccttctttttaatggaaatcactaattttggtattcaaacttacattttagaatgcaagtagtgtgtatttcactgtttagaagtcatatcttagggaattaaatttgtgataatctttttaattactgagaaggcaatttaaactgcttgaagtttgaatatgccttattacacatgcaaatttgattgttttaacaaggcaaataaaccataatcttatttatttccaagaatgcatattttaatacaattaaaaatgaattttcctgaatttaaatgtaagctttaacttaactttaagtggtttgagtgaagtcttctaaattacacataatcactggttctaaacctccagaaccattctgtttaattaaacattatatatatattattattattgacatggttcagggttaccactgccagagcattgattcatgttaacttcatcctattaatactgtatcaccctgtattagcagaagccaatatttattatagtattcaactggtaaaaataatacatgatatccatgttgcagtttctcatataaagatatgttttctttagcctctgtaataaagataatcattttcccatcaacattttttaaggaatatatttcttctttcataagatagccattaaactatattaagtggtggtatattttaatatagtgcaaatcaaaccacatacaaaaaaaaactggttctagacacggacagtcacaggctgatataagaaggtatgtgtttctaagtctggtaaaggaagtgggtttagacaaagcaaaaatctagaaaggtttctttctcaaagcaaatgtgcataaagactcaaagggcaggtcaacgcagaatagcagccttgaatcactgccgaatcagcaagaacattgctgtccatggtcaccatctgtaatcactgtgcccaaatgtcagcatcttggctggctggtgtagctttatttttaaaaatattttttgtaatagtacacttgtgtttaacatagaatgttgacttagataaatgatgaggaagttataaataattggagtagcataactttattatttggaaataaaagtattatgtacatatattagtaaaatgaaatgcacctgattcaaggtatcatctaggtaaattctgtaaggtaccatataggtaaattcttaaatcattcttcagatgatttaatctaatcatactgagttgcactatagtttttatagagacttgtagcagttatcttataagtatccctcgtatctattaaaaaccggtttaagagtttatattgaacttagagggattaggttccaaaataccaaaacaaaataccagaaacagaggccaggcacagcggtctgtatttgagaggctgacacaggatgatcgcttgagaccagtgagacaccatctcaaaaaaaagcaaaatatcaaaaatatccagtgatgaattatcacagaagtaggcaaggtccaaagcatttctcttagctaaactcagggctatagggatgttttcatataaatacatataggttatgcaaaaatattaaagatagattcctcactttcttcattaatatacctgtcaaaaaataagcccttcaaagttatgttcaagtacgttttagatggaggaggtatttctgagaaatgcagttttctcagctgccaaaaaacttaggtttgcttcttaaaatgaagagaatagggtgtatgttcatgtatcatatatgaggcatacagaagtcattttcccttgaggacttagtgggggcgaaaaatccccaatgtagcattctgtccaaatgataaaccacaacaaattgagtgaaacatttacaaaagtcagggcagccaaaggaacctctctgttcaacagagagaaagagatggataggatataactaaataatggttaaagtaacgcaatggtttcaagtctcaattggtctctcttctgttatgttcattggaagatcagggcaagtatatcccctgcaactccccctcccctcatataaacattagttgtgtgtgtggatctttctgctttgtccttcatgtggcctccaagggtgataaagtgagagtcatctgatctacaatgaaaagaactgggaaatgattctcagcagacccagctgttctaaaaggcaaaagcttagtatatcaagaggtcaaacatacagtaactggtttaatagcattaagcacatacctatataacttgaattatatatgaaaccaatctacttcttaactctgtattacctgactaacatagattactttataaaatgttttggcttataacctaaggttagttttcaatgctataataatccttttttagtatatttttggtaacatcctattataagcactgtatcagaataaatttcttaaacagtatgaagaacataattaatgaaggtaatttatataatttatagtaacagtttttaaaaacctttcattttaaaaaggtgaatctaaaatttctctaagtggaaagtgaattattttctttttttctgagataggtgtcttgctgtgttgcccagtctggtcttaaactcctgggctcaagcaatcctcctgtttcagcctccagagtagtagctgggattaaaggcttgtgccattgcacgcagtggaaaattttcaaccttaacttgttatattttgtttcagattttcatgtagttttcatttttcatgatatattcaaatgacatggtaatattttctactaattttgttaaaacttagggcaagtaccaaaggagtagcagttttccttacagaaatggtcaagaaaagcagaggtttcactatcaagataacatactctgtgattccctcctcccctttattttgggagtgacaacaaaaacatgatgatgacagaaaacaccacagaataactgaaatttaatatttcaaaataatttggaatggatcacatattgccccttaataaaggtcttttctttaaattcagtactctttgtagtttagttcaaaaaaaacttcatattttaaacatttgtactgaaaaaatacactctaatattttataaatggtgtaaaattttaaaaccttgaaaatgtttttttctctataagcataggaaaataaaaactcactcctgagatagaggctacacaatagactagataaatctttaaaaaaatttctacagaatctataaattaataagcagctggggctttaaatgggaaaactggtacttaattccactcatcattacatttaatctgaatttcagaaaaacacagagttctaccaaaggtgccacttttatacatgctttattaagtctacccacaaatgctaaaagtccacagaagtgtatgtggtacagaatataagtcaagatcttcctctccatgttggcttacattaaagagccaagaagaaatgtattatttacattgagattatctactggtgcgtgtagaaagtttaaattagctgcaagaaattttatctagacatgcacctgccaactgctacgagctggtatttactgggcagattaattacaaatatttctctgttcctttaaatatgatcaggcagatgcagaagttggtgctcatggtgagtgcatttcttcttaatgcctgtgagatataaaagataattatattatcaagaattagttaacatgcacgtcatacatgacttaagaagtgattttaacacctaataacaatctagtttggtacctagtttagttagatgctgctggcaacctctcatttgcttttttcttttgagacggagtctcactctcccccaggctggagtggagtggcatggtctcggctgactgcaacctctgcctcccgtgttcaagtgattctcctgcctcagtctcctgagtagctgggactacaggtgtgtgccaccacacccagctaatttttgtatttttagtagagacggggtttcactatgttggccaggctggtctcgaactcctgacctcgtgatctgcccacctcggcctcccagagtgctgcgattacaggcatgagccactgtgcccggccttatttgctttttgattatcttcactagtaactgtcaatatgactactctgacatagcactcagtattctttaccttatgtgaccatacttacatgagatacttctcagagaattttaaaactccaacagggcctacagaaaacttatttacatgcctttgtctataagccttaggggcctttcagcaggtgtttcctccaacagctgccccccgcccaaaagacagtatttactatgacagattcctattcagaatatgtccctctggggactcctagtggtggtagaggctcatgtctcttcagccttagaacccttctgtgagagaaagcccttgaaggaagcagcctttggcaactaatggcatacattaccacagggcatgtgggaagagatctttaaaaatgacctaataaggctgggggtggtggctcatgcctgtactcctaggccaaggcagagggactgcttgagcccaggaggtcaaggatgcagtgagctatgattgcaccattgcagtccagccagggcgacagaacgagaccctgtctttaaaaaacaaaaacaaacaaacagataatcccatcctgaggtgatctgtctgctgtgaattcccataacactgcttattcttcatttggtacttacagtagagaataatgtttatacttctcagtctgaaggggaagaaacttctgtcaactcttcctctgtactccatggaagtgtgacaaatttgattggccaaagtccagaacattcattggtctacattttactagtaacattacacaaattcttccctccttgtagtttccctatcactgtctactctcaatcccagtggaccttttttattataatacttcctaatttcatgtagtagggagaccaacccattctattgtgctgacctgcagtcaagcatgtaaaaggcaggcttgtggtcttcacagcattaacagtcacacggacttgggggtctatttaaaagatccagcttttaggttcagtaaagtgcacagaattcaagatttaaacttagtgtgagaaagaagaggttgcatttctgctttaaggcaatctaccttagttaccccaagcttctactagagagcctgccatgttgggggttatcaattccaccaccaatcaagttgatactttgatcctcattggatgcacaatccttgtttgtacttgttattggccagaacttagaagagtctgaacttgtatcatttatcataacttgccttatattttgtgtccttattaggtttcaaactgtcataatacacagcgctttgttcatactaagcctcatccttgtgttacccaagtgattcatccacattgttactaaagtatcccaatatcccgttatcattagccaaaatgtttttctcttcccatcttttgatggtcttagcactctggctgtggcctctgggttgctgtcacccttactttctctcttattctagcattgtttcacaaaggcttcactttttaaaggctctgggagtgaatttgtatgggacagtcctccccactgaacaattacaggtcaagaggaataatcactgaagtgtgacagagggctggagcagttgtgcaggtagggaagttggccacggtgatatcaggagtactgtcaggtttctagggcataaggacaaaatcaggagtttcattcacatcctcccttacgcataccagtcaggcagctatgacaaatatacaaaagagcaatgagagaatatgggggagagggatttggggaagcttatgcagaagatgagttctaagcaggttttgaaagacgggtaaaattttgacaataatgagggaaaaggcatgctaggttgagcagacaagacccaaggtaaggacatgagaaaggcactttctggggaaggtgtctgagaaatggcaagtaatctggaatgaataaggcacaatgaagaaactggaaaggtaagctgtgggcagatcagggagactcctgaatgtcagtttaaatttggattttatcatacatatggtagagtgataccttctaaagcatacatttgtccagtagcaggataggctgtaggggaaagggaccaaagtgcagacaggtaggttacaatagggacaatgataatctggaagagaggtaatggagaaataaactggtacagtgggtgtggaaaggagaattaagcattctcagaagtaatataatctggcagcgtttggatgtggggacaaagagagagagaatttgaccaatggaatgatataatccctagaaaggtagaagaaaaacatctttggaggggaaatgatgaaatcagtatacttgggggacattgtatggcagctgagattgtgggtttatagcccaggagactataataatttggaaaccatatacactaaagtgaaaagtcagggaacgaaggagataatgaaggaaatgctcaaagtgagatgaaaacatggtgaaaggcagaactgagggaaatgcctcaaaggtgaagtcacttaatttcactgtcattgctcttttgcttctcactgaaagggaagttgactggtagctcaaccttaattctttccagtttcttgaaagtattactcaaagactcaaaagaacaccccaaaatgtggttatctttactaaaatccattaacacaaagctattctcagtactctgaattccctgtaagtttattacagagattatcaaacactaaatgttgcacgttcatttactaaatgtgtaactgtgacgatgtatctatgatcaccacctaatatgttctctgttggattttcatgggtcagaaattttgtaaaatggtaaccttataatgaatgaatataagtgtatgtggatggatatatataagatatatatatcctatatatatattacatataggatatatatattacatataggatatatatgtatatatgtacatatatgtaggatattacatataggacatatataatctattacataataggatatatatatatctcctattacaatatatatatatctcctattacatataggagatatatatatatctcctattacaatatatatatatctcctattacatataggatttataaggataatatttatatattatccttacttaacaggatataaaaaccttggccagtagtgaaacctgacattcacagattactactgggtagtggcaagagcacaggcactggcaccagactactcagtttagtatcctggccctgttttaggtgattctgggacaaggtacttaacctcgtttgtgcctcaattgccttacctataaaataaaagtaataactgtatttgcctcatacgttgttgtgaagattaaatgggatacgtataaagtgtttataacactgctggcacatagaaattactcaatagggctgggcacggtggctcattcctgtaattgcagcactttgggaggccgaggcaggcagatcacttgaggttaggagttcaagaccagcctggccaacatggtgaaaccccatgtctaataaaaatacaaacaatcagccgggcatggtggtgctcaactgtaatcccagctactcgggaggctggggcaggagaatcacttgaatacaggaggtggaggtttcagtgagccgagatcgtgccactgcactccagcctgagtgacagagcaagactccatttcaaaaaacaaacaaacaaaacaacagaaagtactcaataaatattagctattattataagctattactcactgcaaacaacagaatataagctattgttactacatacaacagaataaacgttttcataaaaaacggacacaattttctatataagatgctttgcaaatattaagactagcttgtcaggaagctaatattaatcacttgagataccatttccaaagaaaagtatcttggaggtagaatataattctttaattgtgctttgattttttttcccctaagagatagcaggcaaaacacctggtaagctaagaattcttttttttttttttggagacagggtctcgctctgtcacccaggctgagtgcagtgatcatggctgactacagcctctaccacgtgggctcaagtgatcctcccaactcagcctcctaagtagctgggactacagacatgcgccaccatacccagcttatttttctatttttttgtagagacatggtctgtcactgtgttgcctaggctggtcctgggctcaagcgatcctctcaccttggcctctcacagtgctgggattacaggcatgaatcaccatgcctagcccctaatgccagtttttgttgttgttttttcctgagacagagtttcactcagtcgcccaggctggagtgcagtggcgtgatctcagctcactgcaacctctgcctcctgggttcaagcgattctcctgcctcagcctcctgagtagctgggattcaggcgcaagctagccggctaattttttgtatttttagtagagacggggtttcaccatgttggccaggctggtctcgaactcctgacctcgagtggtccacctgcctcagcctcccaaagtgctgggattacaggcgtgagccaccatgcccagccaatgtcagttcttaatgtgaaccttcagttataggtatactaaacactaatatatcatgactcatattgcttttggcttatttgttataataagctatttataaacacatcatttttacttgtattgctgaatcaataggaattgttctgaaggcaaggtataactaataaatatagatttatttacttaatttagcacatttccaaatttaacagactagttatatcttgttcagtcagatgtgtcctacagaaactatagtccacttgtcagcatctatttagctagtctatttagctatttatatgaaagatgcttgattaaggacccttttacactcagttaaaaatgtgtcctctctgacttttaaagttagcgtcgtcagctcaacagttctttccaatcagcctctaactgatgtcagatgccctcctgttgttgataagactagattaatataagttcaactaaagctccaaagctatatccctattttcttacaggaagacaataccaaatctgataatgtaaataaaatgtttccacctgaacaaaacacagtgaaatttcacaaggttaaactaaattagaaaggtgaaacagtacctcagtttaaaatggctttaaggaattcatagctgtcaagatgacgtgatgctatatgaaagaagaaaggttttttttttcagaaaacaattcaaagcaacttgccacagtatatgatgcagaataaatgttgaagcaaaatgaaattaaaacaacctgaagtcttgttttatactaatagcagctctaaggctataaattctcatttcaacatgctatagttagcctgattctatttcagaatatacattttcaaatttattacgaaaacttccaagacatttattacaatacatgcttattaccattgttagtacactctttatggttactaaaatgactgtcatttgtgctagattctatatccctgagggcaggactatgtctgccttgtttgtcagtgtgttcccaa

SEQ ID NO: 79 - DNA, 2017 bp, Homo sapiens
cggaaggccggaggggcagtccgccgcgggggcgagcgcgcatgcgccttcctgggacccacggcaggcgcgaatcccagcggccggcgggcggcggggatacttctacatagacataatcaagttttgactatttggaaaccaagcatcattaaaattctctcaaactcctaattgcgaagaatcgataacatttcaagaagtgataacatttctctgaacaagaaaagaagtgattgaccacgttttaaaagtactctggcactggtgctgtgttttcttcccctccctaaatttgaagaactatggagaaatggtacttgatgacagtagtggttttaataggactaacagtacgatggacagtgtctcttaattcttattcaggtgctggtaaaccgcctatgtttggtgattatgaagctcagagacactggcaagaaataacttttaatttaccggtcaaacaatggtattttaacagcagtgataacaatttacagtattggggattggattacccacctcttacagcttatcatagtctcctatgtgcatatgtggcaaagtttataaatccagactggattgctctccatacatcacgtggatatgagagtcaggcacataagctcttcatgcgtacaacagttttaattgctgatctgctgatttacatacctgcagtggttttgtactgttgttgcttaaaagaaatctcaactaagaaaaagattgctaatgcattatgcatcttgctgtatccaggccttattcttatagactatggacattttcagaacatatataattctgtgagtcttggctttgctttgtggggtgttcttggaatatcttgtgactgcgacctcctagggtcactggcattttgcttagctataaattataaacagatggaactttaccacgccttgccatttttttgctttttacttggcaagtgttttaaaaaaggcctcaaaggaaaggggtttgtgttgctagttaagctagcttgtattgttgtggcttccttcgttctctgctggctgccattctttacagaaagggaacaaaccctgcaggttctaagaagactcttcccggttgatcgtggattatttgaggcattagccaatatttggtgcagcttcaatgtctttctgaagattaaggatattttgccacgtcacatccaattaataatgagcttttgttttacgtttttgagcctgcttcctgcatgcataaaattaatacttcagccctcttccaaaggattcaaatttacactggttagctgtgcgctatcattctttttattttctttccaagtacatgaaaaatccattctcttggtgtcactaccagtctgcttagttttaagtgaaattccttttatgtctacttggtttttacttgtgtcaacatttagtatgctacctcttctattgaaggatgaactcctaatgccctctgttgtgacaacaatggcattttttatagcttgtgtaacttccttttcaatatttgaaaagacttctgaagaagaactgcagttgaaatccttttccatttctgtgaggaaatatcttccatgttttacatttctttccagaattatacaatatttgtttcttatctcagtcatcactatggtgcttctgacgttgatgactgtcacactggatcctcctcagaaactaccggacttgttttctgtattggtgtgttttgtatcttgcttgaacttcctgttcttcttggtatactttaacattattattatgtgggattccaaaagtggaagaaatcagaagaaaatcagctagctgtattcctaaacaaattgtttcctaaacaaatgtgaaaatgtgaacagtgctgaaaggttttgtgaactttttgctatgtataaatgaaattaccattttgagaaccatggaaccacaggaaaggaaatggtgaaaagtcattgttgtctacacaaaataaatgtatatggagaccaaagacc

SEQ ID NO: 80 - protein, 506 aa, Homo sapiens
MEKWYLMTVVVLIGLTVRWTVSLNSYSGAGKPPMFGDYEAQRHWQEITFNLPVKQWYFNSSDNNLQYWGLDYPPLTAYHSLLCAYVAKFINPDWIALHTSRGYESQAHKLFMRTTVLIADLLIYIPAVVLYCCCLKEISTKKKIANALCILLYPGLILIDYGHFQNIYNSVSLGFALWGVLGISCDCDLLGSLAFCLAINYKQMELYHALPFFCFLLGKCFKKGLKGKGFVLLVKLACIVVASFVLCWLPFFTEREQTLQVLRRLFPVDRGLFEANIWCSFNVFLKIKDILPRHIQLIMSFCFTFLSLLPACIKLILQPSSKGFKFTLVSCALSFFLFSFQVHEKSILLVSLPVCLVLSEIPFMSTWFLLVSTFSMLPLLLKDELLMPSVVTTMAFFIACVTSFSIFEKTSEEELQLKSFSISVRKYLPCFTFLSRIIQYLFLISVITMVLLTLMTVTLDPPQKLPDLFSVLVCFVSCLNFLFFLVYFNIIIMWDSKSGRNQKKIS

SEQ ID NO: 81 - DNA, 2014 bp, Homo sapiens
cggaaggccggaggggcagtccgccgcgggggcgagcgcgcatgcgccttcctgggacccacggcaggcgcgaatcccagcggccggcgggcggcggggatacttctacatagacataatcaagttttgactatttggaaaccaagcatcattaaaattctctcaaactcctaattgcgaagaatcgataacatttcaagaagtgataacatttctctgaacaagaaaagaagtgattgaccacgttttaaaagtactctggcactggtgctgtgttttcttcccctccctaaatttgaagaactatggagaaatggtacttgatgacagtagtggttttaataggactaacagtacgatggacagtgtctcttaattcttattcaggtgctggtaaaccgcctatgtttggtgattatgaagctcagagacactggcaagaaataacttttaatttaccggtcaaacaatggtattttaacagcagtgataacaatttacagtattggggattggattacccacctcttacagcttatcatagtctcctatgtgcatatgtggcaaagtttataaatccagactggattgctctccatacatcacgtggatatgagagtcaggcacataagctcttcatgcgtacaacagttttaattgctgatctgctgatttacatacctgcagtggttttgtactgttgttgcttaaaagaaatctcaactaagaaaaagattgctaatgcattatgcatcttgctgtatccaggccttattcttatagactatggacattttcaatataattctgtgagtcttggctttgctttgtggggtgttcttggaatatcttgtgactgcgacctcctagggtcactggcattttgcttagctataaattataaacagatggaactttaccacgccttgccatttttttgctttttacttggcaagtgttttaaaaaaggcctcaaaggaaaggggtttgtgttgctagttaagctagcttgtattgttgtggcttccttcgttctctgctggctgccattctttacagaaagggaacaaaccctgcaggttctaagaagactcttcccggttgatcgtggattatttgaggataaagtagccaatatttggtgcagcttcaatgtctttctgaagattaaggatattttgccacgtcacatccaattaataatgagcttttgttttacgtttttgagcctgcttcctgcatgcataaaattaatacttcagccctcttccaaaggattcaaatttacactggttagctgtgcgctatcattctttttattttctttccaagtacatgaaaaatccattctcttggtgtcactaccagtctgcttagttttaagtgaaattccttttatgtctacttggtttttacttgtgtcaacatttagtatgctacctcttctattgaaggatgaactcctaatgccctctgttgtgacaacaatggcattttttatagcttgtgtaacttccttttcaatatttgaaaagacttctgaagaagaactgcagttgaaatccttttccatttctgtgaggaaatatcttccatgttttacatttctttccagaattatacaatatttgtttcttatctcagtcatcactatggtgcttctgacgttgatgactgtcacactggatcctcctcagaaactaccggacttgttttctgtattggtgtgttttgtatcttgcttgaacttcctgttcttcttggtatactttaacattattattatgtgggattccaaaagtggaagaaatcagaagaaaatcagctagctgtattcctaaacaaattgtttcctaaacaaatgtgaaaatgtgaacagtgctgaaaggttttgtgaactttttgctatgtataaatgaaattaccattttgagaaccatggaaccacaggaaaggaaatggtgaaaagtcattgttgtctacacaaaataaatgtatatggagaccaaagacc

SEQ ID NO: 82 - protein, 507 aa, Homo sapiens
MEKWYLMTVVVLIGLTVRWTVSLNSYSGAGKPPMFGDYEAQRHWQEITFNLPVKQWYFNSSDNNLQYWGLDYPPLTAYHSLLCAYVAKFINPDWIALHTSRGYESQAHKLFMRTTVLIADLLIYIPAVVLYCCCLKEISTKKKIANALCILLYPGLILIDYGHFQYNSVSLGFALWGVLGISCDCDLLGSLAFCLAINYKQMELYHALPFFCFLLGKCFKKGLKGKGFVLLVKLACIVVASFVLCWLPFFTEREQTLQVLRRLFPVDRGLFEDKVANIWCSFNVFLKIKDILPRHIQLIMSFCFTFLSLLPACIKLILQPSSKGFKFTLVSCALSFFLFSFQVHEKSILLVSLPVCLVLSEIPFMSTWFLLVSTFSMLPLLLKDELLMPSVVTTMAFFIACVTSFSIFEKTSEEELQLKSFSISVRKYLPCFTFLSRIIQYLFLISVITMVLLTLMTVTLDPPQKLPDLFSVLVCFVSCLNFLFFLVYFNIIIMWDSKSGRNQKKIS

SEQ ID NO: 83 - DNA, 1832 bp, Homo sapiens
ggatacttctacatagacataatcaagttttgactatttggaaaccaagcatcattaaaattctctcaaactcctaattgcgaagaatcgataacatttcaagaagtgataacatttctctgaacaagaaaagaagtgattgaccacgttttaaaagtactctggcactggtgctgtgttttcttcccctccctaaatttgaagaactatggagaaatggtacttgatgacagtagtggttttaataggactaacagtacgatggacagtgtctcttaattcttattcaggtattttaacagcagtgataacaatttacagtattggggattggattacccacctcttacagcttatcatagtctcctatgtgcatatgtggcaaagtttataaatccagactggattgctctccatacatcacgtggatatgagagtcaggcacataagctcttcatgcgtacaacagttttaattgctgatctgctgatttacatacctgcagtggttttgtactgttgttgcttaaaagaaatctcaactaagaaaaagattgctaatgcattatgcatcttgctgtatccaggccttattcttatagactatggacattttcaatataattctgtgagtcttggctttgctttgtggggtgttcttggaatatcttgtgactgcgacctcctagggtcactggcattttgcttagctataaattataaacagatggaactttaccacgccttgccatttttttgctttttacttggcaagtgttttaaaaaaggcctcaaaggaaaggggtttgtgttgctagttaagctagcttgtattgttgtggcttccttcgttctctgctggctgccattctttacagaaagggaacaaaccctgcaggttctaagaagactcttcccggttgatcgtggattatttgaggataaagtagccaatatttggtgcagcttcaatgtctttctgaagattaaggatattttgccacgtcacatccaattaataatgagcttttgttttacgtttttgagcctgcttcctgcatgcataaaattaatacttcagccctcttccaaaggattcaaatttacactggttagctgtgcgctatcattctttttattttctttccaagtacatgaaaaatccattctcttggtgtcactaccagtctgcttagttttaagtgaaattccttttatgtctacttggtttttacttgtgtcaacatttagtatgctacctcttctattgaaggatgaactcctaatgccctctgttgtgacaacaatggcattttttatagcttgtgtaacttccttttcaatatttgaaaagacttctgaagaagaactgcagttgaaatccttttccatttctgtgaggaaatatcttccatgttttacatttctttccagaattatacaatatttgtttcttatctcagtcatcactatggtgcttctgacgttgatgactgtcacactggatcctcctcagaaactaccggacttgttttctgtattggtgtgttttgtatcttgcttgaacttcctgttcttcttggtatactttaacattattattatgtgggattccaaaagtggaagaaatcagaagaaaatcagctagctgtattcctaaacaaattgtttcctaaacaaatgtgaaaatgtgaacagtgctgaaaggttttgtgaactttttgctatgtataaatgaaattaccattttgagaaccatggaaccacaggaaaggaaatggtgaaaagtcattgttgtctacacaaaataaatgtatatggagaccaaagacc

SEQ ID NO: 84 - protein, 396 aa, Homo sapiens
MRTTVLIADLLIYIPAVVLYCCCLKEISTKKKIANALCILLYPGLILIDYGHFQYNSVSLGFALWGVLGISCDCDLLGSLAFCLAINYKQMELYHALPFFCFLLGKCFKKGLKGKGFVLLVKLACIVVASFVLCWLPFFTEREQTLQVLRRLFPVDRGLFEDKVANIWCSFNVFLKIKDILPRHIQLIMSFCFTFLSLLPACIKLILQPSSKGFKFTLVSCALSFFLFSFQVHEKSILLVSLPVCLVLSEIPFMSTWFLLVSTFSMLPLLLKDELLMPSVVTTMAFFIACVTSFSIFEKTSEEELQLKSFSISVRKYLPCFTFLSRIIQYLFLISVITMVLLTLMTVTLDPPQKLPDLFSVLVCFVSCLNFLFFLVYFNIIIMWDSKSGRNQKKIS

SEQ ID NO: 85 - DNA, 1916 bp, Homo sapiens
gatacttctacatagacataatcaagttttgactatttggaaaccaagcatcattaaaattctctcaaactcctaattgcgaagaatcgataacatttcaagaagtgataacatttctctgaacaagaaaagaagtgattgaccacgttttaaaagtactctggcactggtgctgtgttttcttcccctccctaaatttgaagaactatggagaaatggtacttgatgacagtagtggttttaataggactaacagtacgatggacagtgtctcttaattcttattcaggtgctggtaaaccgcctatgtttggtgattatgaagctcagagacactggcaagaaataacttttaatttaccggtcaaacaatggtattttaacagcagtgataacaatttacagtattggggattggattacccacctcttacagcttatcatagtctcctatgtgcatatgtggcaaagtttataaatccagactggattgctctccatacatcacgtggatatgagagtcaggcacataagctcttcatgcgtacaacagttttaattgctgatctgctgatttacatacctgcagtggttttgtactgttgttgcttaaaagaaatctcaactaagaaaaagattgctaatgcattatgcatcttgctgtatccaggccttattcttatagactatggacattttcaatataattctgtgagtcttggctttgctttgtggggtgttcttggaatatcttgtgactgcgacctcctagggtcactggcattttgcttagctataaattataaacagatggaactttaccacgccttgccatttttttgctttttacttggcaagtgttttaaaaaaggcctcaaaggaaaggggtttgtgttgctagttaagctagcttgtattgttgtggcttccttcgttctctgctggctgccattctttacagaaagggaacaaaccctgcaggttctaagaagactcttcccggttgatcgtggattatttgaggataaagtagccaatatttggtgcagcttcaatgtctttctgaagattaaggatattttgccacgtcacatccaattaataatgagcttttgttttacgtttttgagcctgcttcctgcatgcataaaattaatacttcagccctcttccaaaggattcaaatttacactggttagctgtgcgctatcattctttttattttctttccaagtacatgaaaaatccattctcttggtgtcactaccagtctgcttagttttaagtgaaattccttttatgtctacttggtttttacttgtgtcaacatttagtatgctacctcttctattgaaggatgaactcctaatgccctctgttgtgacaacaatggcattttttatagcttgtgtaacttccttttcaatatttgaaaagacttctgaagaagaactgcagttgaaatccttttccatttctgtgaggaaatatcttccatgttttacatttctttccagaattatacaatatttgtttcttatctcagtcatcactatggtgcttctgacgttgatgactgtcacactggatcctcctcagaaactaccggacttgttttctgtattggtgtgttttgtatcttgcttgaacttcctgttcttcttggtatactttaacattattattatgtgggattccaaaagtggaagaaatcagaagaaaatcagctagctgtattcctaaacaaattgtttcctaaacaaatgtgaaaatgtgaacagtgctgaaaggttttgtgaactttttgctatgtataaatgaaattaccattttgagaaccatggaaccacaggaaaggaaatggtgaaaagtcattgttgtctacacaaaataaatgtatatggagaccaaagacc

SEQ ID NO: 86 - protein, 507 aa, Homo sapiens; identical to SEQ ID NO: 82

SEQ ID NO: 87 - DNA, 118559 bp, Mus musculus
  misc_feature (1)...(118559): n = A,T,C or G
atggtggctttccatcacccgtggcttcagttccagatctgatgcattctggcctccttgggcatcaggcatgcgcattgcatacacatatacacacaggcaaaacacataataataaacattcacttctctctgtgtgtgtctgtgtgtgtgtctagatggacttgaatgtacatatgtgtaagtgcatgtgagagtcccatgtgagtgcctatgaaggtcagaagagggtgtcggatcccctgaagctgtagttatgggtgttgagaatggaatttgggttctcgcatgctcttaactactgaaccatctcatccatctctcaattttgcttgttggtttgtttatttctgagacaaggtctcacctagcacaaactgcggtggaacgtgctgaaaattgaaccatgaccatgagcttctgattctcctgcctccaccctttgagtcctgggattacggacctgtgctactgaagaatagaaaattactggcctcttgtgagaacatgaattttttacctcggagcccaccccctcccatctagagattgttcccaaaacactcctaaacttttcaccccaaaactcctcaccctaaagttcgaaccctcccaactaaaaactgttccaagaacatttttgagataaaggcctcctggaacaacctcaaaatgaaccaggtactccttagttacgtagattccttgataggacatgactccttagttacgtagattcctttggcagaactccctagtgatgtaaacttgtactttccctgcccagttctccccctttgagttttactatataagcctgtgaaaaattctggctgacnnnnnnnnnnnnnnnnnnnncaggaaatagcatttggcttggctggttgtacaagtccaggcgtggacgagtgtgcttagagatactggtgtcttctttttctctgttgctatcttgtttttgtttgtggtttttgtcatgagacacagacactgtatgtcagaggtaaagtgagatccctcccctgtctgtatgtctgtgtgtcttgttcacttgtgtgtcctccattggaccaccttctgattctgttttgtttttggtttgtctggtttcaggtctggtcttggtcccaaggagttgactgattatcttggtttggttttaggccggtctcaggttctggggccttcccatggagacaggtccatttgggttggtcatagtgacagtaagcttctctggaaatcgcatgtaagatgccctgtattggtcttgcttgtgtttgtcatttctgtggtactgtgattctatagtggttgcctgaaaaacggtttctgtgtgtgtcttttgtgtctctttgtgttcggacttggactgatgactgacgactgtttttaagttatgccttctgaaataagcctaagaatcctgtcagatccctatgctgaccacttcctttcagatcaacagctgccctgcctcccactccaactccagagagcagccagcgggtcacagtggtcccgtccatggacctggagcctagggaaaaatgagctcggaaatccggagcaaatgaggagtggtccctgagaagtcagtggccctggatgttgtggctgctgaaaaaaaaaagaagaggaggctgttcgagtagccggccaagagcgctgcaggttcccaggcagcttctcattcccctgtccctcccatcccgtctcttgttaacagaaaaactgctttcactttaagataagctgccggttgcagccagctgtgagagctgcactcccgtctctgctctaaagttccctcttctcataaacatggcaccaccctgagtttgctggcagtgagtctgttccgagctccagtgagggatgcatccgcccacttggggcttctgtccaaggtaaggagcacctgtgagtctaactgccaggctctgatgggggtctcgtctctgtgggactagaaagtgtcccaacaatctgaccaaggtaacaggaagttaagacaaagacagagatcagagtcagaatcagagctgtgctgtgagacaaaaagataagaaaaatgaaatgctggccacaaaagtcaggaaaattagaaaacttagatagtacctggcaacaaaagaaagcttttggctgaagatcaatgtgtttnnnnnnnnnnnnnnnnnnnntggcctcttgtgagaacatgaattttttacctcggagcccaccccctcccatctagaagattgtgcccaaaacactcctaaacttttcaccccaaaactcctcaccctaaagttcgaaccctcccaactaaaaactgttccaagaacatttttgagataaaggcctcctggaacaacctcaaaatgaaccaggtactccttagttacgtagattccttgataggacatgactccttagttacgtagattcctttggcagaactccctagtgatgtaaacttgtactttccctgcccagttctccccctttgagttttactatataagcctgtgaaaaattctggctgaccgtcgagactcctctaccctgtgcaaaggtgtatgagtttcgaccccagagctctgtgtgctttcatgttgctgctttatttcgaccccagagctctggtctgtgtgctttcatgtcgctgctttattaaatcttgccttctacattttatgtatggtctcagtgtcttcttgggtacgcggctgtcccgggacttgagtgtctgagtgagggtcttccctcgagaatctttcactaccatgcctccttcgtgtggcctgaggattgtgtgcacagcatcgactccgccaactccgctacattcctagcctatgaagctattttatcatagctgcttaggttgaattcaattctgcacttatttgtagggatttgccacggatcattattaagttcctagaatatgagagaagggccataaaaagaatgatgaattcaatatatattattctgacactgggaaggaaatttttttaggtcacaccaaaagcaataatttattatgactgggcacaatgagtaaattctttaacctttttcataatctaagtgataagagggtgtgagacaaaagatttaaatttgtgtttaatttacattgtgttattgacattgatggaactgatacaatcataatacatcatggtgacagcaaaggcaaattggctgatgtgcaattaattcagaatattaccattaatcagagtatgatccagcactgggaggaggggtggaaggactagtacttgggaagaggggtgggaggaccagcacttgggaggaggggtgggaggatcagcacttgggaggaggagtgggaagaccaggaatccaaggacatcctcagctatgtaataagttccagactggccaaggttacaagactgtgttaaaaagtaaagacaccagggctgggcgtggtggtgcacgcctttaaacccagcactcaggaggcagaggcaggtgggtttctgagttcgaggccagcctggtctacaaagtgagttccagggcagccagagctatacagagaaaccctgtctcaaaaacaacaacaacaacaacaacaacaacaacaacaacaaaaacaaaaacaaaccaaacaacaacaacaacaacaaaggaaagacaccttcactaataaacatagaggtccacacctgtggccccagagtttgtgaggtggtggcaggaggataaggagatcaagttataggacaggggccacggggggcatggagatgactcagcagtaaatgtgcttgccctcactctcacaacctgattttaatctttagaacccacagtttggagggagagcttcaccctcagaaagaagtcctctgaccttcaggtccatgctgaggcctgcacacggccctacatacacactcacacacaaacaaataaattaaaaaagaaaaaaagaaaaaagttccaggaaatcttttcttttctggaatgaggtagagatttctgtccgcgtgcttattttagtgtggggatggcagagattgggctgtgaccctgaggacaaggggcactccgtattgtcatgtagagccttacactgttgtgcatggcaggggagacactgtgctgccctccagcatgttttagcctctccttatttggttatagccacataactgaagtgggattagctctataggcagaacgtttaaatgttaaattttaaatataatctgaatggaagaattttggagcaagagatagaatttgcccatgtgatggtttgtatatgtttggtccagggagtggcactatttggaggtgtggccttcttggagtagtgtggccttgttggagtagagtgtcactgtgggcatgggttttaatacccagtcctagctgcctggaagccagtattctgctagcagccttcagaggaagatgtagaactctcagcttctcctgcaccatgtctgcctggaccatgctattctcccaccttgataatagactaaaactctgaacctgtaagccagccccaattaaatgttgtcctttaaaagagttgctttggacactgggcgtggtggcacacccctttaatcccagcacttgagttccaggacagccagggctatacagagaaaccctgtctcaaaaaaaaaaaaaaaaagagttgctttggtcatggtgtctgttcacagcagtaaaaccctaactaagacagaagtagggtttactgtgataggtctgaacatggttttgtttggaagagtatggattttgggactttggatttggaaagcattggaatgctttaagtggggcttaatgggctgtcttagaaggaatatggaatactttgttgctgtgagtgatttgaactgtgccaacctggcccaagtggagaagaatttcagtatgtggcctagatactgtttttgtggtattttggtgaagaatgtggctgctttttgccatcgtctgaaaagtctacctgagaggctaaggtgaagagacttaaactaattgctttgaaaagaagtctcaaaacagcctggtgtaaattctgttgtgtggttgctaaagttcactcctatgaagaacattttaatgaacaggagcaagttgagaaagggaaaatacaaaatatatggttcaagggttcagttaaagggacaccaggaagtagaacagagctgtatcctctgctctagaagataccagattaagggaacatgacagcatccaggcaggcatggtgcaggtggagctgagagctctgcatcttcatctgaaggctgctagcagaatactggcttccaggtaactaggactagggtattaaatcccacgcctgcaaggccacacctccaaataatgccactccctgggctgaggagcagatacaaaccatcacagcccacttggctataaaaggaaagcaggatcaaaatgttcccatctttaagggactgtaaaaattagtttccagctgagcggtggtggtacccacatttaatcccagcattcaggaggtagaggtaggtggatctctggtctgcagagggaattccaagacagccaaggctacacagagaaaccctgtcttgaaaaaccagaaaaacaaactcctgtgttttgaaattggaaaacacggctgcaaggaaaattgctgggtagatttccttaagtgtgttcatctgttagaagctatgccttccaaaccagcagccattggttttctttttctttttactgtacgtgttgtatgcacgtgcctcagcttccttcatatctatatattgaccctggaaattggaactgagaatgccagactagataccaccagtcttttctgacactgatgcccccggtactctgtctcacaggctcaattcttagtatggaatagaggttctgggtggcctgtctatgtatgaattagctgaaaggcaacccctggttgaggtgaagagactccggatacagtggacttggaagagagatagggagcggaattgccaagtacagacagctctctgaagaggtttgtgagcagagaaagccaggcataatgctgtatgcctatactctcagcacctgagagattgaagcagacagatcaggagttcaaggctcatctcagatatatacagagtttgaggtcaggttgggctacttgagagtttgtctcaaaaaaacaaggggtgcgggattagggagaagaagagaaagagaacacagagaaacaggatcgaggttggaggaagaaataaaataaaagtgtttcagggctggtgagatggctcagtggttaagagcaccgactgctcttccaaaaggtcctgagttcaaatcccagaaaccacatggtgactcacaaccatctgtaacaaaaatctgatgccctcttctggagatagctacagtgtacacgcatataataaataaattaatttaaaaaagtgtttcttaatttatttatttatttattttacttaaagccaggtgatggtgactcccctttaatcccagcatttgggaggcagaggcaactggacctctgagttagaggtcagtctgatctacagatggagtttcaagacagccagagctacacagagaaaccctgtcttgaaaaaaaaatttttttctgtatatgtatgtgtgtatccatgtgtgtaccttgtgtttgtgtgtagctcagaagacaactttcaggagtcagttctcacctttgaccttgtggaggaggcagggtctttcttgtttctttggctactgtgatacatactccaggctggctgcttcttgagcctcaggcccactcttcagtctttgcatcccgcttcacagcaggagtcttgagatgacagaggagtagtgccatgggttctgggatgacagaggagtggtgccatgggttctgaggcttggcctcggcttgcttggcttgcaggtctagtgatcttgccaactgagccatctgcctggctcaccgtgagactgggaagaatcatatcgtgtttttgtatgttaatgagaatatctgtctgtctatctgtctgtgcaccacaggcatattggctgcctgctgtggtcagaatgtggtgacagatctcccagaactagaaccgtggacagttgtgatccaccgcatatgggtactaggaattgaacctgggtcctcttcaagggtaataaatgctccaaaccactgagccaccattccagctcttctttctagatttttaatcttcttacagaaaaatgaagcagcattcctgtcaaagaacaagggagcctttggaatttgtcatgatttctggccatcaccatatgtaacacccctgatggagttcaagccttagagtgttgttaactacttgaattcctcctgcttggcttcagcctgatctccacagggttacatgtggttgctaaccccaggaaatataagccagtgtggctgactcaagccctgttctgttcttgtatttgtgaaccactcatacagcattatgggcaaagccctacacaagacacaggtgagctggtcagttaaggtgtactagtcatgaccttacctgtgactgactgactgacagacagacagacagacagacagacaatgggggggagaaacacagagagctagaataaagttacatatacaaaaaggcttgaggggctggtgagatggctcagcgggtaagagcactgactgctctttagaaggtcctgagttcaaatccctgcaaccacatcgtggttcacaaccatctgtacagctacagtgtactcatatacataaaaataaataaatctttaaaacaaggcttgagagaaataagcaatatctgaggaagactatttattattattattattttctgtcctacagggcttcataaatacttaggcaagcattctaccactgatttatagccccaatcctgggcaaaggaaaaagctgtgttcttctggtagacagcatggtaggtaaaggcacttgccattaagccaattgatctgagtttgatcctcaaagcccacacagtggaaggaagaaccaatttctacaagttgatgtctgactttgcaagaatgagggcctgaattctatcaccaaaccctatgtaaaaatgccaggcttggaggcttgcaagccccaggctggggaggcggagacaggaggatctccagggcttactggctagcagtccaacctaactggtgagctccaggccaatgagaggccgtgtttcaatagaggtggatggtgttcctgagatgacaccaaggctgtcctctgtcctccacacacacacatatatacatagatgtacacctccacaaacaggaacatatccatacatatacttgataagcaaattaatgcagcagtgaggaaatgacatcaaatctaaaacctaaacactaagaaggaataagccatgcaaagtccaggagaagagtctttgggacaaaggagacagcaaacgtcaaggcctcaaggaggaaaaactatctttctgaagcccaaaaaagcagtgcagttgaggccccgcaagagtagttaccaaatgttcaatttatttgatgtgaaatgtgcagagtaggtaagtccggggagccagaggacagatcggctatcggaagtaatggcaggatgaggaggaatggttatagtgtgttggatggctgggtgggtgattaaaatgttctgaaattaaagagcaatgatgttaaagaactctcactaccctaaagccattgtatactttacttgtgtgatttaatctgaggctacatggcaattatcatgttttcagaaaaacaatgtaattgacatcagtgtaactaggggtgcaaaatggcttacacagaattcatttcctggaaagtagaatgcagtcctgaaaagcctgcagcgatttaattttactcacagactctttgcatatctaatagtcatgttcccatttttagcatgtagcaaacaaattgtaactattttagtcacttcttatccccttggataagatcaactgtaactcttttaaacaggagtggaatgtttaagattatagttcagctaagagtagccggtaatgaaccctagcacttgggaggcagaggcaggcagatctctgtgagttccaggccagcgagaccctgtttcaaatacatacatgtatacacatatacatacattaatgttatagttgggtaatctgtgatggtggtgcataccccagcgttcaggcaggatttcaaatttggggctatctgaaatacatagcaagattctgtctcaagaacaattaagaacgagatgattatggcttttgtaagccatacgatatatactttgtggcaaaatctggattttcacggttctgttagatttttcaatttgtatttatacattgattgtaaagtaagtttttgttgtccggccgagctggcattacaaagggttagttactaagtcattgttcaatacatttctcaataatttgagtctctacacccttaaagcagagcacctctctaaaagaacaaggtaaaataaaattaagatcctgttagttttcttccatgggttttcctgggggaggaaaagagtgggacaaggtatttgcaggatggtgctaaatgctccctgcagaaagcaaatgtgtttccgattcctcagttcttctaatgtctgtagccggcttgcagcatcctggaggatttccaagtcactccacagcaggatccacatgggaacaaactagcaccgcagaaacccaaggcgcaggggagagcccgtggaagggccatattcggattggcacatcctgccctcagcaattctacctgggccccgcccaccgcgcccctcgcctccgctcagtctccatggtgactgtccgccccgcctcctcctcgtctcctcttagcagcccctctcgcccctccccccgcctggcgccgctcagggaagagggggtggggcagggggcggggacaggatgcaagcgaagaggaaatcggcggcgcgacgcccgctgcttattggctggcgaatcccagagcgagaagccccgcctccccggcgagggtcacgtgacccctttcaaagatggccgccctgttgttttgatgaataattcttggtggggcgagggggtaagagtagggttggaggggtaggaggatttacgcttccagcgagggcttcgccagtcccgtccctcccctgccccccaccggggttctcgcgtggaggcggggcgagcctggcctgcttttagaggggaggggcttcccggtccggtgctgggctctgcctgggctgctgtagggtcgccgcgcctcgggggcatccagtgtgcagtggagctgttcccgcctgggcccaggggtgggacccggagcagggtctgcgggagaaaaaaacgcagctgacgcgtcaccgccacgaagacacggcgcgcagcgggcacgagccgagctggagaccgcgccgcccgccctgggtaacctgggaagctgaggggagtcagtggcgcctggagaggaccccatagcggtggccgtggccagaggcggcagctctgggcgcttgctgctggaggaggctgcggcggtgcgagcggccgaagccaaggcgattcagtgcctcgtgttcttagtttttaacctctgactatgcaattctgaaacctcccccattgggggaccagacagcccgatagataccttccactcttcctttgctcccgccctggtctcaagaactgaaggatctctctaacgcctttcaccattaagaggaaagcgatggaggagctgagcgctgacgaggtgaggaggctggggcggggggggggggcaccttgaaaggattacttggcaactctttggcgctttggatggggacagatttttgccctggtggtgtcgggctcttgggattggggaggcaacggagatggcattttcaagaataatgaaatataatggaagtagtcattcatcatcaggttggctgtattgtaagaagcccttggctccactttgggctaccgtctcagtatgtttactcgatcactaaaattctccagagatagagaatgcaagagggtctctcgttttattctcctttattctctctcgtttcttcattcggaactccactcgcttttctttcttttagggtctgaagacgggggtggggtggtgaggagcatcttgaaggtgttcaatctttttaaaagggtgttcgagaaagaggggcgcgatttagatcgtggtatattgtgtgtgtctgcgtcgtcgggggttttaaagaacaattttgcataaaatcatgatgtttaatggcagttttaaagggaaggatttgaaatcccagatacatgtgaccatttcattgtaataaattatcaaaggtacctttgtgtttgagaggtagttacagattccttgagatttaacattaacaaagtgtatatacttaatagttaaaaagattccagttaaattacactaatttaacagattcctaatgacttctggtattatgttacttttgtcaggacccctccccctcaaacttgggttgtactgtgtgggatcatcaggaaagcagaggcagttagggaactagggatttctatgcctcagttgattttttttttccccttgtcgttttacaaattgaaagcattcctttcgagatcccagctggcttaatttcttcccctgcttcccgtaagcttcccctgcagtattatgaaagtagtcgtcatctgtcatcaggtcggttggaagaggctggtgctccacttttggctatggtctcctcatgtttatttactcactaaaattctccagggatggagcatgcgcgtacgtgggtgaagggtcaggtaggggggaaaaaaaaccaatcttgtgacttgtgatatttcagttgttaagtcagaattgctaattttcagtcagctaacttggttttcctcaactacagcaggagtgtaatcttaaatcagaaaagccctgagtagtttcaggaaatatcaggagatcaacttagaaatacttggttttatgtagtttaaaaaagcatcctcccattttcctttcattctaaagaaacacaatctgtgtttttctgtagccctttacttctaaaaagtactatgctttgtaaaagttcttggtttagcgacctttacagatttgatcttcgttaatttttttttcaaaccacttaactttgaccagactatacagactggtcaaagataccgtataatctggaaggtatctctttattttgctcagttcttgagatggtgtaactctcttagtgaccataaaaggaacacgtataacctttgtggaagaaatggaagaaattttttttcaaggtcaacagaacactaaaatgtatatgaaaaattaaattcactaaagcaggattagtataaaggtattttcaacaaattagttggcttgaccacagtggcagtacaattaattactggtcattttattctcattagaagccagaacaaaaatctctttaaaagcttttttttttttttcttttttgactctcactgtagcccaggctggttccagctcacagacccctacctgcctctgcctgagtgtgtaccagtgtgcccagctttaatccaggtcccttaattcagaattaggtgtgcatttctcaactgagatgtttccaaaagtgcttgtgcccatttttggttactctggtagtagaaacttatatgacagatgttgtaggtgatgttgatttggttaaaaaaatatataacactccgggcgtggtggcgcacgcctttaattccagcattcaggaagcagaggcaggtggatttctgagttcaaggccagcctggtctacaaagtgagttccaggacagagaaaccctgtctcgaaaaattaaaaaaaaaaaaaaaaaaaaaaaaataaaacacatgtgtcttacaaggatacattttagaattaaaacacactgacggggctggtgagatggctcagtgggtaagagcacccgactgctcttccaaaggtctggagttcaaatcccagcaaccacatggtggctcacaaccatctgtaacgagatctgacgccctcttctggtgtgtctgaagacagctacagtgtacttacatataataaataaataaatatttaaaaaaaaaaaaaaaacaaaacacactgacgtgatctcctcactgtaagttaggaacttggattaaatcagagtttcatactttaacaaaatgaaaatatatgtgaataccatctagaagagtaaaaactggtttaaccagaccaggtccctctctcgtgggtcaccttgagttcttttacttctttctgtgtatttgaaagggttgtttatctgcatggctgtgtcatgcacgtagtgctttatgctgagtttccggaacagagctgtgacatcccacagcatcattgtttacactgcattcgtgctatacctagctactcgtgtgttgttctcgtggaccaaggcagtgctgtaaggagggcaggtggtttaaactgctgctcagcagtgctgaggagattgctttgagatgatttgtacctttcccggctccttttctctatttcttctacatttgtatgacctacttctgtgaggtcgctggctgggacttggggtgtgctcaaagttttagaagagtgttcagtattcttcccaaatgcagcatatatgaccttgggtttttattgatttttaatactgtgtcttccactcttttttttttttttttttttgagacagggtgtggctatatataccaggtagattttagatttgtgatcctcctgcctcagcttcccaagtgctgggattacagatgagcagtattctgtaagtgggaaaagattaacagttattgagtcttaaaagcctgcactttgccaggtgtggtgcagccattgttttatttggtaaaacaggactggagagatggctcagtggttaaaagcaccgactgctcttctgaaggtcctgagttcaaatcccagcaaccacatggtggtttttttaaaaaaaaaaggtcgacctcatttggtgaaacaatgtgatgacgtaagactgtttgtggagtttataggtgaggaaacattaggctgacacttggcaaaagtgaccaggtttagaagtcacgtggtttagaagctcaggacccctgattccaaagctgcctttattacatctcactgttcaacagctgtccatggatcgatcacagcatctacatgaatattctgctaatgttgacctctctgatgtggtattctgtatgagttcattcatgatgtgatctgttcttggaaccgactgactcatgcgtaatgatgtttctgcaccaactctttccaaccccagcctcagatggtttactccataagtttgggggtcaggttgggtgatacagataggaatctaaaacgtataacataggggctggagagagggcttcccagttagaagcacttactcttgtagaggacccaggttgctttctcactgtgtctccagttctagggacctgtgccctcttctgacttctccgggcaccaggcacatatgtagtgcacatacacccctacaggcagagcactcactcccatacagtgaagcataagattaccttaatgtccagtgtagaagctgtgcctagtgctattgtgaaggtacatgtgagccactcagaagcataagaagggatgcctcatggggcgaggtcttaagacttcaggaaaaggctctgcgctgaaagggtcctgggaacggggactgaggggctcagtaccaggccgtggggcttggtcatgggagatggtttgcctgtggcactggctgttgtcagatcttggagagctgtctgaaaggttaggcgtttctactctgcccgtgagagagattgatctctaccctgcagggagacttaggacttaagatgactggcaggggtgtgagcacctgcggcctgggaggaaggtggcgcacactgcgggacagagtaggaggctgctgctgttacagaggtccgtggattgaggccttccacagtgagaagggggtgagcgggcacactgagaataagcaccgaggcattaagccagtctggttcttttctgtctgtctgtctgtctgtctgtctgtctgtctttttgccttatcttttctcttttttgtttgaagtgagatctcactgtggtagccctagctgtttggctgccctagacctctgtagttcaagtaggcctcaaactcgccgatttctcctgcttctgtttcccaagtgctggggccacagggttgtgctgtcatgtcccatgcttggatgcttgactaattaatccagttctaacatcgctgtgacgcaggagagaaggaggagacataaatccgtggtgtctagttaaggacagggctgattttgggattggacatgagcagattttagagaaggcaagatactgaaaatgtaagtctggtggtccagctctgttggtagagttcttacctagctagcatgcacgaggccccgggttccatccccaggacctgtttaatcagggatggtgatgcttttctgtatctgaggtttggaagttagaccgtggaggctaagaagcttgacgttatcttcagctacatagagttcaaagacagccagagtacatgaaacttgtatcacagacagacagacagacagacaatgaaacttgtgtcaaagacagacagacagacacactatgaatttgcttggtgattctcacctggcctttgtactccaattcatctctacctcctcccaccaaagatctatttatttattttatttttttaactgtgtgtgtgtggggggggggcgggggtgtccgtgcaattgccttcagagacaagagacaggtttccctggacctggagttacagatggtcctgaggcctctgcggagggtgctgggagccaaactcaggccctttgcatgaatagtgtttgcttttaatcgctgagccatcctgtcggtccttttgtgtcctcttaaagacgagacacaatgataatggtgacgtgagctgacactcaaggacttctttgttttaagctctgaactcccctaccacctttgctattattctctccattttacagataggaaaacccaggttaatagaaattaacaagcttgccgaaaggcatgtaaacaggcaaacagtttaccagctgaactacattccagctgcaaggcataagccagtttaatgtgggatctggattccaatccagagcctaagtgtgaagttctcagtccctttgctaaagcaccattaggaacacccttacccccataatgagtagggaagaggggcagcagaaactagcagacttttatactccagttgttatagccaagggtccaggcctcagatagccctggatactgatgaaggcaggaaggcatctgtagtgagccagtgacatgtctgccttggggcatttaactctgtgggctgatagtttgctgactgcattccagtaccactgagagctgcttccaggcagcgtcattttcctcaaaggaagcagataatatgcaggcacatgaggcgttttttttgatgctataccctataaaggaaaataaaatagcctgaagaattgaaaaactggggtcagtttcaggggtggctttttattttatttttctacttacgtgtatgcctgtgtagatattaataggtgattgtgagccatcatgtaggtattaggaactgaaccctggtcttacataagcgctgtaaatgctcttaaccactgagtcatctctggtccccctccacccccaatttttttttattttagctaaggtctcaatatgtagctctggcaagcctactgtgtacaccatagactggcctcagactcacagagatccacctgcctctccctctgagtgctgggacacaagtcacttgttatcacagctggcacttttgaggggagccagtgaggccttgttacatactgcaggctggcctcaaatccctgagctcagaggattgtcttgcctcaccctcctgagtagctgagactataggcacgagacactacacttgacttagaagaaggtgtcttaaaggtgtgtgcctgcatgtgtgtatgtgagtgtgtgtacacatgcatgtgtgtgtgtgtgtgagagagagagtgtgcctgtgtgtgcatatatgaagaccataggtagatgtcaggtgctttttgcttgcttgccatccttgttcttgagataggctttctcatttgtcttagtcaagaggggagaaagataagatgctgggcctggggtgggttttttgaaacctcaaagtccactccaagtgatacacttcctccaacaaggccacacctcttaatccttctcaaatagtgttaccccttgtttttttgtttttttttgtttttgttttttttgagacagggtttctctgtataaccctggctgtcctggaacttgctttgtagaccaggctgtcctcaaactcagaaatccgcctacctctgcctcccgagtgctgggattacaggtgtgcgccaccacgcccggccctgaatttaggtccttatacctttatagtaagctctttaatcacagagccatctccccagcccagagttttgagaagaatttaagggacaatagggagctgttttgggacagattgttcctagggactcagccaccttggggcttgctgtctgagggacacagtggtgagagctggagtcttactgtgttccccaggcctctgtcagtttgggctgccttcccatcctttccgaatgacagtatttgggcttgggatgcttcttactgtggcaggtgtaattgctgttgacccgttggtgtgtgcgtggccgtttcctgcccatgtgcaaatctgataaacccgttgatgtccctttgagcaatctcttatgtatagttgcccttttaagtacctttaaaaaacagatgtgctttgggttggaggaatggcccagaggctaaatagtgcctgccgcgcaggcatggtggtgacttgacgacatgggagttcagagtctccagcacctgcagagaaagctggtgtggtaccagggcttggtcctagagctgagcagtagagacgagagattcccccagacttgagagctagccagcaagtcagctgagtccaggaacatgaggttcagggagagaccatgtctcaaaaactaaggcagcagaagtgaatcccagtggtgggcttctggcccccatagcggggtatgcacctgcacacaggttgggaacacacatgctgtgctttgcctcctctccatgagcaaatgttcttttttatggagagagggatgggaatagcagtgggtatctgcggttggagtcctgacagcaacttttcattgtaaggcaacagccaagcatgttagcagagttcacaagggcagaaatctggttctcgaagctgtgctgtacttggcaactgaacatatggttagaattgagcttgtttggagctcaccactggccttggtctcacagaggtccgcttgcctcagtccccagactgcaactgaaggtcaggggctctcactgtatcccaccctggccttgagcccagggcaagcctcgtgcctcagcccctaaacccttgggtggtaggcataaaccaccttgccctacttgtccctgtcctatcataaagcactttgctgtggttccatgtgcagtttgtttgtttgcttttctcttgctgattggtgcaactggcaacctgagacagcttatacttatttttgttttctttttgagacaggtgtcactatgtgaccatggctggcctggaatgtgctatgtacatcaggctggccttgaattcaggaatccacctgtttgagcgttcccagtgctgggattaaagttgtgtgctcatacatgtagtatgaggcttacattgtgtcttcgtcagggtttttattgatgggataaaagtaacttggggtaaaggaagggtttatttcctctgacaactctcacgtcacattttaccactgagagaagtcaggtcaggaactggagtggaatccatagaggagcagcagttactggcttgctcactgaccttccatagcccaggaccacctgcctagggtatgcagctgctcacggtgggctgaaccctcctccatcaatagtcaatcaaggcaaatttttacagaaattaccacaagccagtctgttgaggacaatcccctcaattgagacttttcagatggcctaagctgtgttaaattgacaaaaactagctagcacacaaatgatttatgttattaaagaatcagttctctcctctatgaggaggaagtcggagagaaaggttaggaggcactgctgaagtgccagggagagatgacgtgggagcagctgggttggtggtggggaaggtgggtcagtcagtggtttgggaaccaggatggctgtggggttgagttgagggtgccagaggactcagatggctgttgattctaagttctgggtaggaggcaaaaggctggtgtggcaacatacagcttcatctcatggcaatgtatgtctgcatttagtcagagaggagagggaaggaggtcatactttgtcacgcacagcctagatgttgcacatagctttggttggttgcctctctctgggcagagcttggccacttgttgggaatgctgagaaagcattgtcattgggcaactgcctgctcagccaaaattttcatgtgagaaagagaagacagtgaccttcctggttagccccttctgaaaccccaccgccctgaggaagaaaacccaaggaaactgtagagtccaggaccttacgtgggtgaaggcaccagttctctccctcccgcccttcccctcgtgtgctgtgggagggctagggtgttggaaataaagacgcccgcccattgaaagaggatagactgtagcccttggggcaaactccttctggacccgccagggccaccagtgcgggctttctgccctggtgtggttcctgatatcccaggcagcagccctgcttctgggtactttggtggcacctccttgtccctggttgtcctagttagggtttcagttgttccgatgaaataccatgaccaaagcaacgtgggtttatttcagtttacacttccagggaatgctttatctctgacggaagtcagggcaggaactcaaacagtgcaggaacctagctcttcctggcttgctcagcctgcttttttatagaactcaggacccccacaaaggcttgttccctcccccatcaatcacaatcaatcaagacagtacaggcttccctccatcccagttttatggaggcattttctgaattggggttctcctctgagatggctgaaactatccagcacacttgttactgtctctattcttgggcaaagtctgaagctggcccagacacctcctcttcatgagatggcgttttctccagagtccatcccttgagtgctgacgaggttgttttttctggtctgagtaaacctgccctgtgcacaggcattccttaggcagatcatagtgccttttatacttgaatgctgattggcctcatgcgtggaactacttccttacagtggcgtgaagccaggaaataattagatctgaatcgtccccgcagctgccctacagttacaggctgtgtcggcgtgtcagctgttttttatggtgacatggacaggacacggtgtatggcgtggcatggcatgcatgtggaggtcagagaccacttgctagaaatggttctttcccgctgctttctgggagccagggaacaagcttgggagcaagtacttctgcctgttcagccgccttacaggccccggtgtcattattcttaccagatgtttattgaagcttaataaggatcacctgctttctgctctgctgcatctgtgcccatgctgaccccaagtcaaggtcatacatataacttccgggtccaagatctgtgtggtagttatggtggtgattagctgatagagcagacagtccagaataataatggcctaagcaagatagaagcatagctttggcttttgtgtgtgtacgcgctatctgtgtctttgtttcttatttatttattatgagtatactgtagctgtcttcagacaccccagaagagggcatcagatgctactacagatggtcgtgagccaccatgtggttgctgggaattgaactcaggacctctggaagagcagtcagtgctcttaaccactgagccatctctccagcccctgtgtgtttcttataggtgtgtgtagatgtgtaagtgcctctgcaggccagaggtcaaggttcagtgtctcagtctcctttgtaagtcatgtttttttaaagatgtgtctctgaatctggagctcactgattggctagattgcctggccagtgagctctagggatgcaggtggctctactccctccctaagtattgggcctaagtatgcatgcctggggagccacagcacagcatccgtggagtaattctcttctttcacctttacgtaggcttgaactcaggttgtcagagctacatagcaagtgctgagggacagatgtagaggtgactatgggatttgggatttggcagcgcagtgatccacgaccttaataggacaagttggcctaagtcagaagaaaatgggtgggggagctaggaagccacttgtggctattgatgggagccataggtttaactgagggtttggagggtaggtttttttacattttatttttccctattattattactattattttgtttgtttgtttgtttttcgagacagggtttctctgtatagccctggctgtcctggaattcactctgtagaccaggctggcctcgaactcaaatccacctgcccttgcctcccgagtgctgggattaaaggtgtgcgccaccacgcccagctatttttccctattctaatcactacttttgtctttttttaaaaaagttaaaatggggctaaggggagacggctcattggttaagagcactggttccagaggatgggggtttaatttctaagaactacacagtggcttataatcctgtatcatttcatttcaggggatctaatgccctcttctggcctctgtaagcacctgatacacttagacacataaaattaaaaagaagattaaactgggccaatgtctttattgtttccagcaggtttgactcagtgtttactgtttctctcctttcctttgaggtaggaagtcaatgtgacattggcttgctttctgagacagtgttttactatgtagccttgtttggacgagaaccagaactcagtatatagaccatcatagtacatgtctgaatttagaaacgtcagcttgggtggtgcatgctcctagttgcagctcttggaaggggaaagcgaggcaggctgttacaacaacaaacataaggctggtgataaacatggacgtggtggacatctgattattattaatccatttaatttcagcaaataggtactgcatgccttctcagtcagggttgctcatactgagatcagggataagggagtcctggtccagcagtgagctcgtgtggtaagtagatgtgaggagctgctgtggatgtgtggagcagttcatctcagtgggaatggtgggaatgggtggggacaggagcggcatgggtacacagaatgggccacggaggataaaatgtgtcagctctgtcctcctggggcaaactggtcattcttttgaaattgcttagaggtgttgatctgagatggtgtgtgtttggttttgttttttgaggcagggttgtcttaggttgagcccagactggcctcaggtaggtgcctcagtctaaaagtgtgtaccatcatgcctgggtctgaaaggcttttttatttttttattttatttatttatttatttatttatttttttttttacaaaacggtgcactgctgctttttgtatatatttttaatagatttatttatttaccttatttacatgggtacactgtcgctgtcttcagacacaccagaagagggcgtcagatcccattacagatggttgtgagccaccatgtggttgctgagaattgaactcaggacctctggaagagcagtcagtgttctttgttttgttttgttttgttttgatttttcgaaacagggtttctctgtgtagctctggctgtcctggaactcactctgtagaccaggctggcctcgaactcagaaatccacctgcttctgcctcccgagtgctgggattaaaggtgtgtgccaccaccgcccggcccagtcagtgttcttaaccactgagccatctctccagctcctaagatgtgatcatgaggctcaggtaaccccacctcactgtaccattccagcagcagcagcagcagttgagctgagggggagggtttgagagaaggaaaaggcatttcattaaaatttggttttctaggctggagagatggctgagtggttaagagcacccactgctcttccagaggtcctgagttcaattcccagcaaccacatggtggctcacaaccatctgtaaagggatctgatgccctcttctggtgtgtctggaaacagctacagtgtactcatataaataaaataaatcttttttaaaaatttgtttcctgtccttaatccaggttctgtggccttgactggcctgctcactgatgtgtctccactggaacataggctcccagctcatgctcattgttagcctctttctagcacagggctgggcacagaatggcccatgataaatgtttttatgagtagatggatggacagaacaagacagttgtctctttgtaacctagttttttatcttgtgttagtagattggatataccttacactaagcccaggattgtacatcttatttctccagtcttaataaaactttggtgttttatcatccacagtatctattttgatcatgtctttaaaaaatcatttctttgttttgttgtttgaacagggtttctttgtgtgaggacttaggttggtcatgaactcagagatccacctgcctctgactcccaggtactaggattaaaggcgtgcgccaccattgcccatttattttaaatgaatgttttgccctcatgtatatatgtgcactgtgtgtgtacctggtgcctttggtggccagaagagggtgtcagatccctgtaactggagttacagatggttgtgaccggccatgtgagtactgggaattgaacactggtgttctgaaagagcactgtgtctccattcctccatcttgtatttatggtataaagtcttgttttcaagaaatatgaatcatacataaggccataacttacctaaaatgttttttaaaaatataattcagcctagcagtgatagtacacacctttaatcccagcactcagaagacagagcaggtggatctctgagttcaaggccagcctggtctatagagcagaatttcaggccagccagagccacacagagaaaccctgtcttgacaaatggaaaaaccaaaaaccaaaaaaaaaaaaaaaacaaaaaaaaaacaaaaaaaaacccgtgtgtgtgtgtgtgtgtgtgtgtgtgtgtgtgtgtgttttatccaggggccacataccttggcggtaaatgcactaactgctcttccagaaaacttgggtttgattcctagaacccgtatggtggctcacaatctgcaattccgttttcaaggaatttgactccctattctggcctccgagggaaccaggcacataggtagtgcacaggaaacataggtaggcaaaatactcatataacccatatgtctgtgtgtgtatatacataaacaaacacttttttcttaccgtattagtttttttttctttgtatttttttactagatattttctttatttacatttcaaatgttatccctttcctggtctccttctgaaatcccccctccccttaacccctccccctgctcaccaacccacccactcccgcttcctgaacctggcatcccctactggggcatagagccttcacaggacctagggcctctcctccccttaatgacgggctaggccatactctgctgcatatgtagctggagccatgagtcctaccgtctgtactctttggttggtggtttagtccctgggagctctgggggtactggttagttcatgttgttgttagtttttgtttttttaagacaggaacttaatataaagcccaagacatctttgactttggggtcctccttcctcagtctgccaagtattcttatagaggttttatctgtaaacaaggtactaagttagctataaataatgtatagacttaaaaacagcaaaataacccatcaggtatttaggttagctacaaataatgtacagattttaaattttcaaaaaaatagcaaaatacatttacagagaaaatttgaatttatggatggcctaatgtggaaaattatttctgggatggaattaaaaattactagaaagtgaaaaaaaccagcctttgttatttaggtattgtcccatctgcccaggctgcctctcaagtgggtggagtcacggtcatggacgcccacctcatcgttggctggaacgctctgtgcgaccgaacagtacagtttccctgatcataatattgggagacagtatggacacagaaaaaaatatcaattaaaatttttgaatgagatgagagaaatatgaagctgttaaaagagaaataatttttctttaccacatataagctctcctaaaagaaacttgtttgtttttgttatttcgtgattaaagtcagtgaccactcctgctgagcaccagtcttagtgctcccaccccagggaaagtacacttggattgaaacaatggtggtcttgtggtgagacagttaaatactaactctgtgtctaagtcagggtttctattcctgcacaaaacaacatgaccgagaagcaagttggggaggaaagggtttattcagcttacacttccacattgctgctcatcatcaaaggaagtcaggacaggaactcacatggggtaggaacttggaggcaggagctgatgcagaagccatggaaggatgctgcttactcgcttgctcagcctgctttcctgtagaactcaggactaccagcccaggattggcaccacccataataagtcctccccccccatgatcactaattgagaaaatgccttacagctggatctcatggaggcatttcctcgagggaggcttactctttgtgataactccagcttgtgtcaagttgacacacaaaaccagttagtacacactgttaactgtatacatatttagatatgcacatatgtatggtgtgtgtgtgtgtgtgtgtgtgtgtgtgtgtatgtatacacatgcttgcttacctgtgggaacttgtgttcttggagaccaggggagattactgttattactgaatactaatgtattctccagttgcccatctttctcattttcatgaataagatctcactaaacctggagctcagttggcgtgattggctggctggcaagctctaggaatctgcctatccaccctcccccattgcagatgcgagccatgtgcccaggttttatgtgggtgctgtggagccaagctcaggtccctatgcttgtgtggcaagccatcttcttcggtagagtgctggtcccttctcctggggcttgtcacttactgagtctgttttatggaccagtgttagaagcagcttctgcttggctttggctcatcgactctaagtgagatcaaagatgcaagtggcacctgcagggtgcttgtctagcctgatctttctggtgtcgacacaaaactatagctgtaagaatctactttttttttttttgatttttggagacagggtttctctgtatagccctggctgtcctggaactcactttgtagaccaggctgacctcgaactcagaaatccacctgcctctgcctcccgagtactgggatttaaggcgtgtgccaccactcccggctaagaatcatttttttaagctgaataccgtggtaccttcttgtaattcccatattgatgaagttgaggcagaaggatcactgaacgttcaaggctagcctgggctacacagcgagaccttgtttcaaaaaaacaaaccagggctggtgagatagcttagtgggtaagagcacccgactgctcttccgaaggtccggagttcaaatcccagcaaccacatggtggctcacaatcatccgtaacgagatctaactccctcttctggagtatctgaagacagctacagtgtacttacatataataaataaataaatcttaaaaaaaaaaaaaaaaaagcaaaccaaagggaaaggagctgagggtgcagcttgagtggagactcttgtgaatgcgtaacaccctaggctcaaccccagcactagacagaaaccccaaaggagccaagggtggtggcctaagctttaattttagtgagacagaggtgggcaggcaggctctaggttaacaggctgcctgctctacttagcagttcaggccagcagggatatacagtgagatcctgtgtcagaaaacaaaaatcaaccaaacagtaaactccaaaccaaccaaacgaacaaaccaggatgcagtgcagctaaaacagcctccttacagccctacaatgcttcccaagggaggctctggatccttctgctttctctgtcagctcacagaggtgatgcgcaggacagcagctttgctgcacgcacaatgttaacagaacccaagctaaaggaaagtagtatctgagcctcaaagagatcaaagtgcagaaagatggagagagctctgggttgaaaaatattgatacgtgtgtgatgtgtgtctctgggaaacacttgtcacctgtctttctcagggactccttcatttgttcagcaactgtttactaagtgctctctgggtgagatactgttagggttgcaaggacgtaggacgaataagaatggaccacgcccctgtcagctagggcttgggctgtgcagatagtaaagaggagctggcagatggagcagaatatcagcctgttctgatgcttacctgcgaggtcagtggctctttgtcaacttctcctgtatcaggaactcaggtctcagagaggaacccaggtaggtgtgggtacagccgaggttgaggctagacccagctagaagggctctggtgttgtggccgactggagatggaatggtatttgctcactcctgcctgtggattctgctgtattttcagatggagtggtaaagtgtttcttccttcacccttctttccttccttctctacatcgtcccctctttgtttcctcctcgtgtatctgtgcaacacagggcctcattatctaggtcagtctgtcctggaacttagcatcctcctgcctcagcctcccgagtgctctgattacagcgtatactgccacagcaagctcaggtgccttctgagaagtgtctagaacctgtgggattgtcagtggtgaaggagcttcccccaagtctcagaatctgagcctgatctttgggcctcatgtggtaagcatgagaccattatgccatggtgtgtctagctcctttcccaaaatcaagtgttgatgaatattttggaaaaacccctgccctttgcatcttttggggaacagggtgccctctttgactactgagcttatcagggccctcactggacttagctcactaccttgtcttgctacctagctagccctaggatctgcatctccgtcttctgggggctgggtttgtgggcgaccacacccacacagctcttacgtggatttggggtcagaactctggtgtttatgcttgctcagcaaagttctttatccattgggtcattttacaaaccccaaagcaaagttcctcaaatgagttaaaagtgtataacccttgaacctggactaggccttccagccaggcagttcctgcgtatgagcagcagcttcactgttccagggtaaagtacttggctgcctttaaaaaaacgttgttttttttttttctttgtaggttctggttttttatgcattaagtttctttatttatttttgttttttgttttttcgagacagggtttctctgtgtagccttggctgtcctggaactcactctgtagaccaggctggcctcgaactcagaaatccacctgactctgcctcccaagtgctgggatttaaggcatgcgccaccacacccggcttcacctgcttccttttaatggctttcatcttttttgagaagtcatgccctctttagtcccaattttaaatatgctcccttctgggaaaagtgcaggattttcccatctttctactttgctttttaaaattcccaggcctcactgtaaacttagaaacagtcagcaacagccacgtgtgtgtcagcctagctgctgcgctcctggagcccctctacccttgtccccttcttctccattcttcatttagtgtttttaatacagtcttactgtatctcaggctgacctcagcaatgctcctgcctcggcctcccaagggataggagtacgggcaggctccactgcctcccgtttatatgagtttcttgcaggtactcctagtttaacctctagctccttccattcttgtgtgtgtgtgtgtgtgtatgtgtgtgtgtgtgtgtgtgtgtgtgtgtgtctcagtctgtttacctgtctgtgcatctgtctctgtgtgtgtggaagcctatagatgccaaaggttgtctcctatgctcagtatccttttattatttatttatttatttagttttggttggccagagacttttgagtccaacaattctacctcagcttcccaaggggctggtgctgcagggctatatctcctgcctggctgccttgctctcttgaagtctcttgcattcttgctttacagaattttatctcatgtagatagccaggcctgaaatctatgctttccactacttcttcatgcctcaattccaaagaatgaccaaggtttttgtttttttgttttttgaccaagttctttgtagcactaattaaatgtgcctggacttgaccgtctctcttccatgtccttatgccagtctggtgtcttgtcccaccttcgtgctcgtcctcacagtgactgccatggtcgtctatctcagttgctccttaccttcatgagcaagtccagggcatcagggtggtgttgctagtgggcgtgtctcagcctgcctgccctgacttgtgtcttgcttgtcggggaagcagtgtgggttcctgcagatccacctgcctctgacagtgcacctctgtcctcaccccagcgggtttctacctgctctgaaaaagaaacccagtcagcagtgagcacagctcaggcgctcagcgtgctgggtcttcacagttgttcctgggagtgacggaaacatgacactaagacactgtgtaagagacttgaatcctgaaaacccagaagtgaagaaagcaagatgctgctgtccacacactgttgagcatcctggggagtggaagtatttataagcagaccactgtaagccacagtgcagcttgctgagcttaacaaagatggaggttatttcaggaattcaggagttgccttctgcaactaggaacagaaagatggctgagtcacgctccccagctcctccatcgcctcgtcacagccttgcttgccctctcgttgcctcacctccatgtcactccagccttcttccagacgtcctagctcatgtccctcgtatacagctgagcttggctagagtatagacaagctcagtttccccctacctgtttttttttgaaacatggtgtcagtagtacaagctagccatgagcttactctcatgctcctattgtagtgcatgctgctaaattcagttctcaacttaaaaataaaagagatttatttacttatttatttttaggttttggtttttagagacagggtttctctgggtagccctggctttcctggaactcactttgtagaccaggctggcctcaaactcagaaatccacctctgcctctgcctcccaagtgctgggattaaaggcacgtgccaccactgcctggcggatttatttttattttatgtatatgagtgatttgccagaatgcttgtatgtgtaccgtatgcatgtctgcagtatcagaagtagcatcaggttccctgaaactcgacttagagatggttgtgagccaccatgtgtgtgctgggaactgagccagcctcctctgcaagtgctcttaaccagcgagccgtctcgtctctccagcccttagctctcgactttgtaatctgacgatttttacatttacagaaaggttgaataaattgctttgaatcatcagctactaatgtgttcacgttttctcttagcgtataaattagtgtacacagacacacttggcttgtgctgaactgtttgcaggtttggtcgccatagagatgtggggactgggcggtggtgctgaaggtctcattaacaagcgagacaggaccagaaggagcagggtgggctgcagagcagttatgtggacaggagcgtgtcagaagagggggattagtcctcttccccatgtgctgtgcgcagcctgtggcaggcagttccaagcatcacttcccggttaggtagggtttggagttagttatgtctccgccctgtcacctggtcttggagggaaggtggggtggaacagggtgacagcaagtgtttgcaggttttagaggtgtagtatgagatttgcactagcagtagtgtggatacagaggaaatcggtgcatgtcttgtagcaactggatttttagttcagcttctacaagtctactgtaaaccctgaaaagcatagaaacacacttagttttaaaagccatggatgtgaggcaggagagacggctcagtctgtaagaggtgtcactgctattccagagtcccggataagagggttcacagctgcctgtaacccctggcctcgaggtctgcttcatgggcacctgtatatacatgcttgtgaaaggttcacacagacccacaaaaaataaatataaatcttagagaggaaaaaaaaagaagacatcaaagtgaacacagcgcaccctacttttgtattattcctggtgaggatacaggatgctgagctctccgtgggctggtctccctgtgaggctgtgacacaggcacgcgtccgtgtgctcccttcccatactgcctctgccctcatcccatgccctcctgaccttgtgtcctgactgcccctttgcttttcctttcctggtctatttagaggactttgagggtaggaattaggactcaagtggaacatcttcttcaactttgtggcacacagtaggcacttatcgacatgccacaaggaattcgtggtaggacaggatgctcctgtcctattgtagccagaacaccgggtggatgttctgtgctccactgtgcacccctcaccagagaggtcagtatgttcagtgttgctgatcagagggttgaggcagtgtccgacaccagcagtctgtacaaagctgacttcttaaactagtcagcggcagtgccaccttgtcaccgtaggaatgtcttgtgtggagacaggtgatgtgtgggaagtcacagtccagcttcaaaccctgcactgtgtcccctgagctgtgttgctgagcaagtcacttcactggaggtggtttcctcacttgtaaaatggtagtggagtgtgcggacccctgggttgttaactgagcttacacatgggctatagagctgcatctggcccatgggaagcagagggctacctcagttaattattcacttactcctttgtgtcaggatcaccaagagcctccagaagtgacattgtaagtagaaagattaccatctgtccgtcgtccctgtcccatccccttcctcttcgtaggaacaggggtaggttgttgctgagatctgggaggtctcgtgtgactgaaaaatgtgtagactatctttaggagaacatcctaaagactagaagttgtgagtgatgtctgtctgtgtgttggaatttatttactttgtaaaattttagttggaaataaggatttttgcagactgtattttattaaatttaaagcagtattttgtggaccctcccgacccccacaacgagctaaaactaagaggagcagtttgatctgccctgccctggggctttccctgccttgagtctagtgtgggtaaatccggaggagggggtgggacctacagcatcaggagagccattaggggaaaccctgttgtagtgtcagctaaaaatgtgacctgagacgggcagaatgtggctcctgtttagggtctggggcggggcacagccgtggccatggaactgccacagctgtttctgtttcatgcttttccatttttgatctgtgacaaatggaaaaggaaatcttttaaaaagaacctaggtttaacttgagataaccagccataaaaagtaggttgagtaaagaaaaggaatttagtaatacttggaatgctgggactggctacttcctccctctccctccctccctccctccctctctgtgcgtgtttgtgtgtgtgtgtgtgtgtgtgtgtgtgttaggggtgtagggggactgtgcagatgtcctctgaggacagaagaggttgttggatccctggagctggaattatacctggttataatcccccatacatgagtgtccaggagcagtgagggctctttgtttctttgtgtagtcctagctatcctagaacgaactgtagcccaggctggcctcaagactcagcagagatctgtctgtctctgcctcctacgtgctgggattaaaggtgcactccatcatcaccccctggccgcagcaacttaaaatgtcttattttttgagccgcatattgacgcatggtcacacatgcttttattctcagaacttgggaagtggagacagtaggatcagaagttcaagaccagccttagttagataatgagtgtgtggtcagccggactatgtgagaccctgtcttcagacaccaagccaaaccaaacccctgattttgggtatgcccagccctttagtggagtcattagcaagcacagtgcagtgccaacagccaaggctacaaagcagtgggcagatatggcagaaagctgcagtgttagtgtgctctgaagaaatgtagtcctaagtactgaaaatactggtggtgtaaagccagatgcaaaagtgacaaaaatacaagaagatatctgtgtttgaaaactagaatatgcaggaatcactaaagaaaatcagggaatctttgagaatgggggctgttcatattagtatttatataagtgttttcagtaatgtcattaaaaattttaaaaagaacatttatttttatttcaggctagagcgatagctctgtggtaaggtcagtagatctcttccagaggatctgggttcagtcccagcatccacatgaagatctgtagctatagtctcagcagatcgctctctggcctctaaggactctctgtgggttatgtggtgcatggatgtagcgtgtgggcacaacacccatatgcacacaataataagatacaatggaaactttaaagagttatttttatttttaattatgggtgtttgtttgtgtgcttttggcaagtgtgcagtgtcagaggaggccgatgagggggaatcccttgggcctggagttgcagacagttgtgagtcatccatcgtgcatgcagggaaccgaattcaagtcccatctaagcacaggctgcattcccagccgccgagccagctccccagctccgtcgtacatcaaaacttggcacacttaaatttcatgatgcagattttatctcttagttttcaaagaaaatcataccttgagctggagctgtcaacctgagagctgagtgcttgctaagagtgtggcacgccccatgctcaggtcttattgctgaaattaaaacagaacacagcaacaaagaagtcgggactgggagattgcttggtggataacatgcttgctgtaagtgtttagggaccagacttcagacacccagcaccctgacaaagcctgcgtggctgtggcacgtttgcagctgtgcagggggagacaggtgtgggagatctgaattccggtcctcgagcaagaactttatcaactgagccatctccctagcttctcctaatcccttcttcaaaagatttaatgtgcttaagtaaacttgagatagtgacctgtgtgacatgtttcaggtgaagcgattggttggcatgtctgaggcacaggccgggaggagacgcttctcctctctggggcaaggactcagggcatttccttggtctaagagaggtaaagggcacaggtgttgcacagtgtgagaaggacacgcatttcctggaatctgtccttgttaggaatcgctggggctggagctttgtcctacttattcctggtaggaggagtgtgtgtgtctggggctgcctcatttctgagaagcctgttcacatctagtgcttggtatacatgtataacctcagggtggtggtgcgtgcatgtgtgtgtgtgagggagggagggaggatgagtgacataggaaatgctgctgtgacccatcctatgtttatttgtaattacttggtaactgaagcattcagagaatggccgattatattttcattttgatcacattaaaaaaaaaaatcaggggctggtgagatggctcagtgggtaagagcacccgactgctcttccaaaggtccagagttcaaatcccagcaaccacatgtcacaatctcagcctaaacataaactttgtgtcttggtgtatcttttgtttctttctcctattgggtgaaatagacttttcttttaatttttttagatttatttttattttatgtgtgtgagttgtcctgcctgcatatatgtatgtgtaccacatgtgtgcctggttgccacagagtcttgaagagggcatcagattccctgaaactggagttagaaatggttgctggaagtcaaactttggtcttctgtaagaacaaagtacatttaactactgagccatgtagcctctaaatcttacctatctaaaatgactacataatgccattttgttaaaataccaggttttgatttgcggtggtgacacacacctttaatctcagtactctggaggcagagacaggtggatgtcttgagttcaaggccagccttgtctatagagcaagttctaggacagacaatgctacacagagaaaccctttcttgaacagacagctctcgccaccacacacacacacacacacacacacacacacacatatataaccaaaacaggttttagtgtgttgggtagtgagcatattggaaatttgcagtgtaacatagagcatcttggtgagccgatcactgtataggtttcaagagtaaggcagcagcttctaagagcatcagtttggggctgtggacatggctcacttagtaaagccctagctacctaagtgtgaggaccagatttcagatccagaacccacagagagccaggtgcagtgccttgtcttcactgcttttatgctggggtggaaggcaaagagaagaaactgttgtggaggagcgcagtaaagaaactgctgacatgatctctgtgctaggggaggcttttattatgagtaaagaggaaagtacccaggggcgtctggaagagtccagagcagagcgaagagaaagcagactggacttggtcaggcctaaggtgctgtgggttgccctggtgctatttgtgtgcaacactagggaagcaggggagtaggggtggggagaggggtgttgggagatagcaagagagcctagccagagtacagagagcagcaagatagtgcttgagtgtggggcagacaaatcacgtgggttgtgaggaggctgataagctgggaggagggactctttctggggatagaaaaccctttcacaagttcctgaggaatgctagcttttctctaacctccagaagtcctgcagcctgtgctcctgcttaagctcatttctagacatatggggagggaggtgggggtgctgagacctaacgataccccccccccccatggatgggcagctagcatgtcctatgcagtggggaacagaagagagctagcttaaactaggcagatggtaaggactaaatttgaggttttcctctgacacacacacacacacacacacacacacacaactggaacatttgctttgccttgttacttttctgaacacattctttttaaatttatttcatttatatgagtacactgtagctgtcttcagacacaccagaagagggcatcggatccctttacatatggttgtgagccaccatgtggttgatgggaattgaactcaggacctctggaagagcagtcagtgctcctaactgctgagccgtctctccagcccctgcacacattctttttaggtgtctttggctcctaagcttggagatggttttgatggttttagtacactgacgtcattgttcttacaggtggttgtgtttctactgtcagtgacagaatgtcctttctctcctcttctgtagattcgacggaggcgcctggcacgacttgctggtggacagacctcccagccgaccaccccgcttacatctccccagagggagaaccctccgggacctccaatagctgcatcagccccaggcccctcccagagtcttggtctcaatgtccacaacatgaccccagctacctcccccataggtgcagcaggtgagcctcagcctccaacctggaagctgtactttggtctcagcatctcgatgttgcctcactgattaaagcaatcagtggcctgaaggtcactgcggtcggtgtgtcttgcttctgtctgttcatttgatagtgactagtgaagacttctgcaaacccatctccttccccttctccagctccagttcctcttccagccaggctcaggtctggcgaagactgagttgctcctgctgagtttgtgaatttggctgatgcttctccctccaatccccattctccctctctataggcatgggctcccctaaagactgctctgccttcccataatgctgtctgggggttagggagcgcacatggtgggcaaagggcttcctgcacgggagtgaggacccccagttcccacagcacgtaagacttacgggttcaggaggtcatgccggtaaccctgacactcaggaggtagacacagggagggacattctaggacactggcgagccagtctaacaaataggtgagttctagttcagtgggaggtcctgtctcaagaacatgaaaggaagagacccaccaccaccttctgagtgtatagtgcacatatgcgtgcgacacacacacacacacacacacacacacacacacacacacacacacacacgatcaaaaagtaatctgtaaatggaagagtgaagtaatggtcgaatggcaaggccctggtttcttgtctttgtgctacattggcacaaaagtttctagaattgagtggatatcaagggtactgtggatggcagagcactcaccagcatgcgtgaggacctgggtgcagtccctcgcaccgcaggaatcagctctgcctgtgtggtgtttgtagctgtctcctcgagagctgcttaaccctggtaaaaagggtttgtttgtttgtttgttttaaataaatgagctcatagatgatgttcagggttgtctttcttaagaaatgatgatgtccattcacatgtgtacccggaaatattttccttcatgacttttctatcaagcatggtcatttcataattactacgtaacagttaaattatgaagtaggagctaggagcgccatgtatgtcatataagaatcatgtatgactgtggattccagtactaggtgctctttctcatgtcagctaaaagcatctgttgctttaagtcattagccctccacaggcctccctctgcgtggataaatgccgacccatcattctgttagtgataacagaaattcagaacaaagcgtcatttggtgggaacaacagctatgaaaggcgtgatttgagtagctgtggcaattttctcatagagttagcgttcaggattccagggtgagtttgtcctttccttgggaaatgtggtcgctgctatgctgtttcctcgctatgacgggggcgtccatcccttcagctctggaatatgttgagggcagcgccactcccatctgtttttcttactggctgtgtcacagctctagctccatccattcctcacccgcctgccgcttgtctcccaccctcgtccaggctggaggggagctcacgcagccatgtggtctgtcgatctccctcaagcccatgatcacaaactcaggaagagcccagtacacccaggcagcttcacggctttcctgtccactttccttctctgctgccgagtgtgcttctcctcgctctcatgcacacactcagtgtggagcagacacacatgcagaagggaacctgtacagcctctgtcatcgcttctgtcgggctcctgtgtgcacgcccagttcttgttaggcctcagtcagtgcctgcacttcctctcacctagcgaagcctcacttctcacagctcccttttccttctacctcaggtgaacccttgttaaccattctgagaccttgcagtgcactgtgtgtacagtgctggcgactgtgaaaaggagccccttcttcccatttcccctgctggtccccacccctctctcccctgctgctcccacccctctctcccctgctgctcccccacccctctcccctgcagcccccacccctctcccctgcagcccccacccctctcccctgcagcccccacccctctcccctgcagcccccacccctctcccctgcagcccccacccctctcccctgcagcccccacccctctcccctgcagcccccacccctctcccctgcagcccccacccctctcccctgcagcccccacccctctcccctgcagcccccacccctctcccctgcagcccccacccctctcccctgcagcccccacccctctcccctgcagcccccacccctctcccctgcagcccccacccctctcccctgcagcccccacccctctcccctgcagcccccacccctctctccccgcaagccttctggactaaatccctcctcctctgactttagccctgcaccctgtgctgagctgagcaagcttgaggggaacctctgctctgagtctctgtctcctcgcttggtggcttcaccccctcacctctgaaacaccgtttagcttccagaacagtcttgtcctggttcccgtcctccctgttccttttcagtgactctagggcagcatgccggcgttcagtgtttaaactcttgactctctatgtttattctcttactgatttcatctagtgtcctggctttagtattttttccagtttgataactccttagtttacatttccagctcagatctgcatcctgaactttagactcataatcttatgacccatttgacgtctactttctttctcatcagcatttcacccttaaaatcttaaaaataaatatgtgtgtgttcccacacatacacgccatgtgtaggtatgtgtgcagatgtgtgttcatatgcctattcctgtgtgtggaggccagaaataggtgtcaagtattccctttgactgtgctctgctgtgttttatgagacagtgccttcttgagcccagcttgctgatttggctaaggcgcctggccacggtaacctgagatcctgctggctctggctctggctctggctctggctctgcagcactggggttacagctgtgccttgctaacctaacctagcttttgtgtggatgctggagagctgagctcaagttctcatgcacgtgtggcaagtactgtgcttagtgagccattttccccagccctttaacgtcaagcttagggggctgctgagatgacttagcaagtaaatgggctcgctaaacaaacgtgaagagatgatgtcacactctagaactcacgtaagactgggaggaaagacatgattccacagcacgagcctctgaccaccagagacatgctgtgggctatgtggtgtgtagcttaaaggtgtttcaagaaattatgacaattgtcattttgaaagtgaagagttgccggatatgatggcacacacctttaatgccagcatttggaaggcagagacatgctgtggtgtatgagcccccccccccaaaaaaaaatccaaacaaaccctgccttagaaaagcaagatcagggcggtgggatggcttagcaagcagagacacgcactggcaagcctgatgacctaaacttagtcccctgacccagagtggcaggaaagaagcaacctctgtaaggtgccccttgacctgcccccctacacacatggggtggggggagcatgcgtaggtgtagtaggcttcccccatccataaataaataaagatatgaagatgatttttaaaaggaagaaatagaacccaaaccaggctaacaaaatatttttagcatccctttctcagaaaagctgtctttggccactgtctagcatacataacaaagtgccatgcctcttggctctttccagcattgtgttccttgtacacctgagtgcttgtgtgccctgtttagtctgccttccctgatggagtggaaactctaggtctggctcaggagttagtgtttgttgtgttcactcgtgtgcctgccatgcctggcattagctcaaagatggggtgaactagtgaatgagccccaaagagaaaatgaccagaacagcacaggcttgtgtaacttaaaggtgtttcaagaaattatgacaattgtcattttaaaagtgaagagttgctgggtgtgatggcacacacctttaacaccagcacttggaaggcagtggtggctagctctgtgaattcaaggccagtcaggtctgtgtagtgagttccagggcaaccctgtctcaaataagtataaaataaagaaaaaaagctatggggctggcaagatggctcagctgataaaagcgcttgtctctatgcccgatgacctgagttcagtcctgggaactcccatggaaagagaaaaaacgtcaccctcacacaccctcttcacccctctcctaaacccaacagtggagagaaccactgtgctgtctcagctccttgacatgcagtttatccccttgtcccgagactcatgctggacagaggagagcaatggtttttgtcacaagtgttagattcaaactacaaattgaagttcatgaagattactcctccccctgaaaccagcaagtctgccttgtcgttcctcctgaagagagttttatcatccctgaaccattcatttccttctaaaattaaaaaaaaaggacaaaatacttgggatgggcacagagacatagctgatgcccgtggacctctgtggagcccatgatgtcccacttctccctcagcaccatggtcctcaaagtcccacctcatacaccattcccagaagctgcttaacgctttcactcagctcctcctttaaagctaacagtggagagagagacctctaaggaagtgagttcatttggaaatgaccagagtataggaacttgtgtattgcaggggatcgggccttgtgtaggcacatgagtacttaggggatcatggtcggtcatgtgtggagacaggaaggtaggcagctgcccaggtaaagggggggggggggagcttatgtaagttgttttgaattatcactggccacaaagatcagtaacaggggaggccttggtgcaaggttgcctgggttgctaggcagctgtcctcacagagaggttgcactggcctttcagcaaggccgtggacttgcgagactgttagtgggttttgttacgctgtgaatgtggtaggatcgttcctcatggcctcgtggcctctcgtggatttgggtttctcacgggagaccgacagtgacggacactgcttttccttctcttaaaaggtggtgcgcatttgctgtgctctcactgcagctgactgctgtgtgcacatgtgtgggtgtcagtcctcaggggccaggtcaggactgagtgttttcaactctgccttgggctagagatgtagttaagtgaagagcacttgcctagcctttgcaaaccctggcttgattcccctcaccccccaaacatacacactctctctctcacaaacacacacatacacacacacatatacacagacacatatatgcccagctatcatgtttttgttttgtttttaaagacaggttctcagtgtgttctccctggatggcctgaagctctatgtagacagggatggcgtcaaattcatataacctgcctctgcctttccattgctgagctaaaaggccacaaagctaccttaaaacaacaacaacaacaacaacaacaacaacaacaacaacaccccagcattactgcttggcaaacgggatgatccctgtctgttggttacaggtgttactctcacttccctgaacctgctaatgtctctaggttgtcacagtgacatgctaaatgctgaacagtcgtgcagccccacttagtgtgtatttcaaccatgccagctcttagctcagtgcttacagtttattgggtgttgggataaagtactcagggagagcaggagggaattcgtctgctctagcgacaaccatgagcctcagtgatagatggggtcagcagggtccagaatggtgtgggcaagcaaggctgtgcgcaggaaaggcagaggcagaggcctttagtgcagaagtagccttggtgtttgatgaaagagcaggaaagtccaacccatgtcctctaattttgagtcttcaatgaagtctttaacacgttagttgtgcatttcggggacttcagctaagggaagggcactcttatcagcacactgcctttgcctaagaatggtaccagggactttggccgagttgtaatcttttgttctattaccagttgcttatactaaagtcctttttcctcttacacttggcacgggcttgggagagggaaagttttgtgtgtggtttagaaactggctttgcagctgggcatgcaattagtggaagagcttgttagcattcaggagaccttgggctccatccaatgaaatagaaacagccaaaacaaataagcaaagagaaacatacagctgggcactactgtcttatgcctgtaagcccagggcttgagaggcagaggcaggaggatttccacaagtttgtggccaatgtaggcttcgtagtgaggtctgtctgagaaaatgaaatcacaaagtcagatactggctagagacagagacccaggcagaagctgctgtggagctgctgcaagggagccccaaacaccctgaaggtttctcttggttggaaccttcctttttgcttgcacatttgttcctaggccacattcgtccccttgtgaatttggagcaggtgtcagtgtcttgttagtgatggtgtgtctgcaccagtggtcccattgtcctgccatctcctctgctcaaagccttcccagcctgacctgaggccggctctgcacagcactgctgtcgtccctgtacctgcctcaaaggtaaattctgtgagggcagaggagcaatgccgaacacgggaggagttcctggaaaacgtgtttcctttatgtgtgcacacacccgtgcatgagtccacagatatgcacgttcacgaacaccagatgacagttttaactttaacagaactagaggggctagagaaccttctcccttagtcccattactgagcagataaacagagacactaaacttaaaggacaaatcacagcattcatagagttgcctgcctgatgccacatcataaatttagaatttgtgtgtatgtacatacatgtgcgtgtgtactcgtgtgtgcattagagctcgaatgtgtgtattgtgtgtgtgcacttgtgtgtccatgttgtgtatgcagtgtgtgcattcctctgtgcgtttgtgtgtgtgtgtgtgtggtacatgtgtcaggtggtaagagggctgcctcagaagtcatgccttagcaaccttcttcctttttgttttgagatgtactcccactgacctagaaatttgtggagcagaagccagcttgcagatgtccacctgtctgagagtccgtctttccatccatgagaacacgcatgagcatcatgcccaactctttcttcttaaagtacagacactgggagtttgaactcaccaagtgcttgcctctgagccatcctctcagccccttcctttcttttagattcttaagggtcttgctaagtgtctcaaactcaacactcttgcctctgcctcctgagtgctaggattacagcagacagtaccatccatggcttcagagattttgatttttatctatagacgggagtgaatggatgactggatgagatctttatgatccgcccacctctcctattttcatttataaaaatattttattgtgtatgagtgttttatttgcatacatgtctgtgtaccacatggctggtacctctggaggccagaagagggcattgaatcccctggaactggagttgaagaaggttatgagctgccctgtgacttctgagaattgatccctggacctctggaagagctcttaactactgagccatctctccagcccctcccctacttctaattttttttctttttttcttttaattttttaagattcatctcatgggccggagagatggttcagcagttaagagcactgtctgctcttccagaggtcctgagttcaattcccagtaaccacatggggactcacaaccatctgtaataggatctgataccttcttctggtgtgtctgaagagagcaacagtgtactcacacaaaatgaataataaatctttaaaaaaagagagagattcatttcattatgtatacagtgttctgcctgtgtgtatgcctaaatgccagaagagggcaactannnnnnnnnnnnnnnnnnnnnnnnnnnnnnnnnnnnnnnnnnnnnnnnnnnnnnnnnnnnnnnnnnnnnnnnnnnnnnnnnnnnnnnnnnnnnnnnnnnnnnnnnnnnnnnnnnnnnnnnnnnnctccagtcctaaattactttttttttaatttgatttttgtgatagggcttttcagtgtacaacttgctggctgtcctagagctcactctgtagaccaggctgttttcaaaattagagatctgcctgcctacacctccctagaattaaaggcgtgcatcaccacacccaacaaggctttaactttttaaatatctctcgccttaggaagatgggggatggaacaaaacattaatccttgaggcttacttcatccactgtgatttctccagcaggaagtgggaaagactgataacagtggtttcagaagagagggatgccatgggctgttgcttttggtgggtttttgtcttgataacttacagtctaagtaaagctaggggccactgagcttggtagatttacaaagcaggtagatcattgtgatgtgtagagatgggaagcagtgggcgcatgtgactgtgggggaactgggatgtgaagatgtttgaagcacaggaccaagaggattcaaatgctgtctttcttacagtgtgccccggcacttcatccctgctgtggtatgtattgtatattaaatagtcttagtcagggtttgtatttctgcacaaaacatcatgaccaagaagcaagttggggaggaaagggtttattcggcttacacttccatactgctgttcatcaccaaaggaagtcaggaatagaactcaagcaggtcaggaagcaggagctgatgcagaggccatggagggatgttacttactggcttgcttcccctggcttgctcagcctgctcttttatagaatccaagactaccagcccagggatggcaccatccactagttgagaaaatgccttacagctgaatctcatggaggcatttcctcctcaagggaggctccttctctgtgataactccagcttgtgtcaagttgacacgtaaaactagtacaagcactctgtcttaaataaagttcctatgtttagcgtgcatgcgggcaccacagtcaaggccagaatgaacaccaaatgtcttctaagtctctgtccacctcatgttttagagacagtgtctcttgcttaacttagagctggccattttagctagactggccacaggcatctccctgccttctgccttcccaggctagcattgaaggtggctttcacatggggtcaggtctttctgtttaccaacagagacaacaactcagcccatgaggttaaaaaaaaaagtaaagtatgtagttaagttccttgttatcagtctcagtatgaagtagccttttctgtgattgataaaataatcctgcattattttttacttattttttgtttatatcttgaatgaatgagttgttttgttttggctttttttttttttaaaggatttattttatgtatatgggtacactgtcgctgtctttggatagaccagaagagggcatcagatcccattatagatggttgtgagccaccatgtggttgctgggaattgaactcaggactatctggaagagcagtcagtgcttttaaccactgagccatctccctcgcccttgagtgaatgagttttaagtcttatttcagaactctgatggcgtgagatgccctatctgttttgagtcttggtaggaatagtgactagcttgcagtttccttttgtgagtcctttactagttttaacaaattggtatgagtttgaagatggtggaggagtgagtatgcttttgtgatatcctagtgtggagacaggcaggctttctttctcatgatgccaggacggttaaatttaccagttactagttatctcagcgggtagtggtaattcatttatttttaagcatctcagttcactttcctttttatgaacaaagataaataaatactgtaaatgcttgcctagcaacctttttgcatcctttgatttttttttttggttgtttatttattttgaaacagaatttctcttcgtagaccaggctagcctcaaacttagagacctgggtgcctatgcctcacacctggctaaggtgatttttaaagttctgtaacaaacataactttaaaggcattgagcaaagctctctgagaaataatctgttcctcctcctgatgctggttttcatgccaccataagctctgtagggacaatggtggggtcagctttttcttccttcaaacacattccatcaacagaaccatgatctgtacacaaggagatagatggggcagtgaagccaggctgtgtctctcagcatatctgagttcagttttgtagcaaagtggaaagactgtccacaaacacctacatccacaccatctggattctgccatcaacacctgttactgggttgttggtttgttgttgttgttgttgttttgtttgtttgtttttcatgtctgtcagtccattagtgtatctcgttttcagtccatttcaagagtttttctgtcctgttgggtcgctgaaatagctaacgtaatgggtaaagacatcagccaccaaccctcatgacatcgtagaaaacaagaactttctatactgtcacaaaacctaatttgttcatgggcactgtagtaacagttctgggattgtggtttctttaaaaaacacagaaataaaagagtgtgctttcatttgaatctcaggtatggattgcttcaggctgtctgcagcagctgactatgatttgccctgtgctctagcagaggcatggttttgccagctgtggatagtttctgtaattgtatgatgtttggaattctgggaacttgacggggtatataaatgtgagggctcctgagcggtagctttgggggttggtatttgggggtggggggaagaggtttagtgcggtttattactagacaaaacaaaaaaaattggattcagggatctccctttctctctctctctctctctctctccccccccccttcgctcctatctagtgatggggtgaaaccccagggagataaagggtggggggaaagccccacaaagtagcaaagacctggcttcaggctccagttggacctgctgaaggagaggcggtgagttttctcaggcatcacgtgcagctcgagtgctgaccttaggtgatgcacagtgataaatcgtgacctctttgtaacagtcctggtttgtctgacaggatcctcacggtcaagctttccaagggcacctgtgttaacctctgccttcactcttgggcttgcattgtgtcacctgtcctttctctctttttgccttgcctgtgtaggagttgcccatcggagccagagcagcgaaggcgtcagttctctcagcagctcaccttccaacagccttgagacacagtctcagtccctctcccgttcccagagcatggatattgacggtgtctcctgtgagaaaaggtaacttggtgctccctgtctataggaagggaagtctccactctctagtctctagccagctgtctgaagtggtaacccagagagccattttcctatcaaactaaatacaaacttcattcttaagttgaggtgtttctgttctaaatgaaacgttgtttttatatttgttagtgccaagcatcttatgagctagagaggtggctcagcagttacaagttctgtctttccataggacttgagctctaattccaaatgtcttttatgagatgtaaggtatgagtgaataaaaaaaaatatatggcctcataatgaacacgagatacatctgaataaatctccctgtataaatggcagataatgccagtgtgtggaacagtagtgagctctgacagaagccacaaacctccgattgcgttgagatgctgaacagcggtccatagtagagaagccataaagggtatgattacagcaagtaccctcaagattcttttttgtttgtttgtttgtttgtttttattttttttgagacagggtttctctgtgtagccctggctgtcctagaactcactctgtagaccaggctggcttcgagctcagaaatctgcctgcctctgcctcccaagtgctgggattaaaggcgtgcaccaccactgcctggcctaattctttattattgaaaacaacaacaacaacaacaacagtgtctcatcctggagccctaccatgtagtaccagaaatagctccttccttatgttaggccttagtgcttcctcagtgtcaccactcttggacttaggggtcactgttgagtaaagttagagatacttgaagtcaagtagtttggtaaccaagctaccaaatgaccaatgagcagatagcatgtaccgtgcagatcaaccaggcagagggaggactcccacctggcagagtggagcagggtacaggacttcaccctgccgctcagcagcatgcacttcacaactgagttgtttatgaaacttccggtttcatagtattgatgagtgagtgaactgagtgaagggagcccacggactgctgtgtatcctctaacccacagactactattatcttctaacccaattccagtggttagaaggattctaggatgatgttgagtttatcagtagctatacctgttccaaatatgtacacacttagtaatctaccatcagcgtatcatacaagcgaaggctgacagagcgctaggcagcaaattgccatacctaaaaccatcctagagggattcagacatgtctctttcggccagaaatacatcaaggagaggaagaaggtgactaagcagacagattaagcaatgcagccagcaaccttgatctaatgaaagtataggactttacatactctacaggccgaaagccaccagagtcagaaatgtaagggctgtgcgttctgacttgtatgtcaagccagaaaagcaagtcagctggagacaaggtgactgctggggacagaagtgactgccgcaaatcccacagatctttaaaatgagacatggcggaatagtgttctcgtcaagtgtcatcatggggggtcgtctgaatgcatgtgccggacagtcagtgctgtaaagacgcttgtgttctgcactgtgtaaaaatagcttgtcctgaaaatccattctgctgatttcttcgtttttgaaagtgagcccaaggaaatgataccttgggaaaaacgactgcagcacgtaagatgaacaggacgcttatgtgctgccagtttgggaggagctgctagacttacaggaagaagggggtgggggagccagtgttactgtgctttcctgaccagtgagccttgatgctgggagttttagaaaagatgaacgacatgtttgtcttctgtacttaaagcatgtcccaggtggatgtggattcgggaattgagaatatggaggtggacgagaacgaccgaagagaaaaacggagcctgagtgacaaggtcagtgatggcaaagggcgctccgtttctcagtgctcgcttggctagcctgtcctagccagagcgtctgtctgtctgtctgtctgtagctaggcttgtccttttgaagaatgcttagtctcagccttgccccggaaagttctcactcctcagtctgagctggcttggaactggcagtccacccgtgtcagcttcaggtgctggaactgaagatcccacagtccaactttagtctgcttagcagcagcagcagcagcagcagcagcagcagcagcagcagcagcagcagcagcagaactgggcccttttgtacagtgaaacccctccattctgcttggcttggctgcatgtttttgaggtcggtcaggtgggttgggtttttttgaggtagaaatcctcctgggtagcccggaactccttcctatctagaccaggctgctccctgatgtgtgtgcctgttcaacgtgtgtgggtattaaagacaggctgccatgactggctgggtccgcgctttcataagtaaaacttaattttgtggcagcaagtaaaaactcagggaggcctttctgtttattttcatttgagctttgttccctaacctcaggtggcttgggtttgggtggcgcacgcctttaatcccagcacttgggaggcagaggcaggcggatttctgagttttaggccagcgtggtctacagagagagttccaggacagtcagggttacacagagaaaccctgttcaaaaaacaaaaacaaaacagaagttggaccttagcctccaggttgtctctattcatggagttcttcatgtttcttttatgtgataatgtatttgacatgtaatcagtgagacatgttaacgtttgtaaaatatccttgagagaaaatggttatataccaacaacatgaacctggcgcttgagagttccgtatagcacagcacagttagtagcgagggtggcagcacgctcacgcctctgcttttctggccaaacttttatgaatgaggacatgagcttcatgggacactgattttgcagctacttcccctgtccacaaaatcttacatgtaactctgcatggcttgagacttgggttgtgtagaccaggctggccttgcgttccctgtgtcacctgcctggctagatggttttatgcatttaaaaatatccttgttaataaatgaatcagatcagaacaaaatgtcttaatgcatgtcttctactacagattaactctcacatcctccccactaggagccttcttcaggtcctgaggtgtctgaagagcaagccttacagctggtctgtaagatcttccgtgtctcctggaaggaccgcgacagagatgtcatcttcctttcttctctctctgcgcagtttaaacagaacccaaaagaaggtgggactctttgtcagagcaactccatacgggatgtcaggccatgagggtctctgtcctcttgctgtgggactgcagttcctgttacggggtggggacacagctgtgtggtcactttcttccctgagagtattgctaagtgatttttaaaatttgtttttatgtatgtgtgtgtgctgtgtgtatggtgcatatatctatgctcaggtacctctggaagctagaagagagcgttagatccctccctggagttggagttacacagggctgtgaggcacccagtgtgggcgctgaggaccgaggtggggttctgtggaagagcagcaagcttttctaactgctgagccatctctccagccctgatgtgtgattttacagaagaaaactaaataagtgaatggttttccctgtctggggcaggaagttttcctttatggtagaagactctttgagaagacatcagctcctgtagggtagaagcgtgctgagtgggccccaagactcagctacccgcttgcatctgtagtgcagcgagcttctttctgcatgtcattcatcttctaggatctgaatgcttaccaggcgatttgtagacagtcgagtgagatctttttatcaaattacttagcaaactagaatatgattatattttgttgtcctagggttctgttttaagaggtcagctgtgctgacctgtacttaaaataatcacatgctttgtaagacagctttattgagcactgtggctttaattgcttgcagcagggccagtcagtgtgctgcaggctttgtgctttgatttacactggcatgtaatgcagttgccgtgactctctgctcatgggtgtatatccctgttttgtataagatgggttttcacggaagcagtcgctgttagcgtgggttactgttaccttttacttggcctgtcttctgcgagggagtgaaatttctgtgttcctggaaggtgggtcggtttctgatggggtcgcctcttagtacttgtagttgtgaagagctgagcagccttaggttttaaagacttgccactggatactctggctgtcagctctaaggatctcacatctcataacgccttgtacacatcagtttgtgtcaacttgacacaagcaggagttgtcacagagaatgaagcctcccttgaggaaatgcctccatgagagccagctgtaaggcattttctcaattagtgatcaagtggggagagggcccagcccattgtgggtggtgccatccctgggctgatagtcctgggttctataagaaagcaagctgagcaagccaggggaagcaagccagtaagtaacatccctccatggcctctgcatcagttcctgcttcctgacctgcttgagttccagtcctgacttccttggtgatgaacagcagtatggaagtgtaagctgaataaaccctttcctccccaacttgcttcttgtcatgatgtttgtgtaggaacaggaaccctgactaacacattatctaaccagatgaaactgccacagaacagggctttggttcagtgatatccagaatgtgtccatagatcaacagtgatcaactaggatctgcaaagaatgagaaaggagctagactgtagaatctgctttagaatccagagggtggctcagtctggagcctttcagaggcccttaggagccttggactctgtaaagtgtgtgctggctgagaaacactagctcagctgcatgtgttacggtgtatgtatgtagtaagggcagatctggtagcgactggctccttctacagttaacatttatcaacagtagctccctgactgcactctaacttgatttcaataagatttaattttgggatagttttatatttatagaaaatgattggaggccgtcccgagagctcatgcatacgcttccctcagtgtcctctcatgtagcagtctgtacagtagactgtgtgtgcccagactcggacaggactgtgcactgagccagttcgatggctcctcggcctgttggcctgagtgccatccccaagaacccatgtgggtggatggaagggtctcttgaaagttgtcttcttctgcatggcactgtgcacatacacacacagatgcaaataaatataaaataatttttagaaaaaaaattactgggaaccacaccagagcttttttgggtttcagctaaaatcctttcactcttgagaatccaatccaggatcccagcacacagaatcagaatcggcctggctctttggcttattaggatggtataagtgaggacctatgaataacctgcttttcactctgccttcccaacagtgttctctgattttaaggatctgattggccagattttaatggaagtactgatgatgtcaactcagacacgagatgaaaatccatttgccagtctgacagccacatcccagcccatcgccacggcagctcggtcaccagaccgcaatctcatgctgaacactggctccagttcaggaacaagccccatgttctgcaacatgggctccttcagcaccagctcgttgtctaggtcagtgtggttctctgctgtctcactggtggaaaacagctgtgactgttgagttcgggttcacagggctgatctgtgtctcagacatgtgggaggagagagggggaaggggatgtggccattggatgtggctttaccattccttggttggatttcttagcattctgtggttaggttgttggttaaattttagacacacgtggctgtctgtgctacggtactctttgaaaggggtcaccgacatgagtgtagtgattatagaggctggtcatttttcaaatgcttatctacttaaattcctagagtgtgtagtataaatgtgctatcctttaaaaactgacacccattttagttatctcaagtttttctttgatttttttttcccttccctcggtctctcaactaactcagcctctatgaaacgagccccgccccctctgccagtttatggagttttgtgccagcgctcagcccatcctttgccttaccttcccacccagccccacaggcggctatgccttcccagtcccttagcccccatggtgtagccccacaggcggctgtgccttcccagtccctcagcccccatggtgtagccccgcaggcagctgtgccttcccagtccctcagcacccatggtgtagccccgcaggcggctgtgccttcccagtccctcagcacccatggtgtagccccgcaggtggctgtgccttcccagtccctcagcacccatggtgtagccccgcaggcggctgtgccttccccacccctcagccctcatagtacagcttctggaaatgctgccggaagccagccctcatccccgaggtatcggccctatactgtcacgcacccttgggggtcttcaccttgccccaccccacgatcctccattctggctagctccccaggcttcccttcccacgcaagtagtccccgggctgtacctgccagctcctccagacagaggccccgcagcagggtccccgccttcccacctgcctcgcccagtgccgccagcagacgtccctcctccctgcggatctctcctaggtatttatttgcaggagagctgcgtgtgtgtttgcagtgcagggagaggaaattaacacggtttggaaagaactgctgtgtgacactgacctcagttgaattctgggagtcgctgggttattaacctgtatcgctcgcaagctgtggtaggcatgcgcctgcctccatgattctggcagccttttgtccacgaggaagtgaagacgcccttcctcccctgtcattcctcctgtcatctgcacacaaaaaccaagcactccaccttcttctgtgatctagtcctcggagactctggtcagtgttttgagaaatggggctcacaggatgcctttttggactgggccggtgtctgctctttctatgagtcctgcgtttctgtcttgacgtctgattgcatgtagttccagtctctcagaaagcagcagccgcagcccaggaatctggtggcctcctttttcaaatgtccctgggtgtttctgtaactcaggacgttgtgtttctgcatgtcagtgcgtacagcttccgagtgtgacatttactttaaatgacagcctgcagcagcagcttcctcctgttccctctatcctctgtccctgatgaccttttttgcttttgttgtggtagtatgtccaacagccctttctccttcctcttcctcgaactttctggggacagtagtgatgatgatgaagaagaagatgaggaggagttggatgaaggtggtggtgatgatgatttttcttatgtccagtttgggtccaggtaccggcagaatggagtcttgcccctgcatgtgcttcaggtgcttagggactaacgttagtgagcactgctgagagctctctgctttgagtccagacagggtagtgttaagtgaggaaggctagcaagtgtgcactgaagtgagaggaccttaccctgggaagaagtgacacatagacgattcgttaaactggtaattcagcgtatctgcgtcatctgtcacatgcctggagagagcgctgaaccgccattcagtcttaagctcccctgccccctgctaggaggagatgaggggcttccactgctcatcgccagtgcgttcctgagtatgcttgtgtagattgtaggagctgaagactagcactgtggtttgggggtgtgtggccatttcttccacatcacgcagtccagtgtaactgggattctctttttacatatgaccttgagtctccctgagcatctcttgagtctcaattgagcagtggccttttgtttctggggccactcaatgctctcccccactccgaaaactgggttaaaaactgcatttctagatgatttggggcacacaaatttaatgaccctttgtttctacatcttcaactgaatttccctctggacccacccagtttgtgtttgtgcccagtacaaataactccaggctagaagtagagactacagcaggagctgggcgcgcgtcattagatttggcagctcctgaagagagagaagaatgttgctgcgaggtgaccccaaaagatagatgcttatattaggttgaattttttattaccttttcccaagcagatattaccaaaggccactgtgtgtgtcttgtgcctgtaacgtctgtgtgatgacagctcacacagcagacatccctaggagtgacttccatacgtggtaaaatgcttcatttggtttggtttgagctgtctgtgggcgaaatgttttggttagttctttagcagatcgcgtcctgcttttactgacacgtctctttgtagattccctgtgtccagccgtgcccgagctccaggctctgtgcttatccactggctgcggtgtgactgtggatcggtgcttgtccagcatcgcctgtgtgctctctgtgatgggacttggactggagcagcgggaggacggctgtggtctttgagtttcatctctgctgctcaggttctttgtgtggcttctgttcttggacagaagggccagcgtttttaggctcagttacaaggttacattttcatcagttggctccagcttctttggctacactgaaatgagatatctggcctgtctattggagattacgagtagactccagataaagtgtatgaagatggttgcaggatataacactaaacaaatcgagagtttgaggatacatggaggtcaggacagcaagaggtagcaaaagaacttgtttctttttgagtggaatcttttttcctgcttgtagaatcccatgtgactccattgcacacagcagacgtctgtgggagcatgttttgatttatctgtgggataaatttatgtagctgaggatgtcctgtgacttggtattgggattgttagccagagcaatcagagcagtaacagagaaacaaacaggctgtgaataagaaagaagtcagattttcttttgttttgttttttgagacagggtttcctggaactccttctgtagaccaggctggtcttgaactcagagatccacctgcctctgcctgctcaatgctgggattaaaggcgtggccaccacgttccctgaagtcagattatctctatgtacaggagatgtcgttctatagctttctcctcctcctcctctttgttaagatttcttttatttattctatgtgtagggttgtcttgtctgcgtttgtgtgtctgtatcacattggtggctggttggggactagatttacagacaattgttaatagttgctaacacgacagtgctgggaattgaacttaggtctctggaagagcagctggtgtactttatctctgagccgtttcctcagcctgattctgtagctatttaaaactgtattatttcatgtgtctgtgcctctgtgtgtgtgtgtgtgtgtgggtgtgtgtgtgtgtgcacttagaagcatgtaggtgcttttggaggccagaataggttggaactggagttagagatggttgtgagcagccatgtgggtgctgggaaccaaacctggtcttctgggagagcaaccaatacctttaaccatctctccatctctgtgatctatgttaacccaaccagaaagctgcaaagtttactagcactttaagtgaagtcgtgggatgcaggaaaatgagtcatttttctgtataatagaatgatcatgttaagaaagaaagctaaaaagcagtcccacagagcagtctttcagaggtaagaaataaatcaccttggaaaaatagtgctgcctctcaggaaagggcttgtatgctgacagccttgaagacactccttgtttgaaggtcgtcagagttcatgttgtggaaggactttaatacctacagatcattttattaagtaagccaggcccagaaagacaaataacactttctccctcatatgcagaatctagacttaaaactaaagacttggtggctgggagtggctcagcagttgcgagcacatactacgcttgcacatgcatacacatgctctcacactcgtacacaaatgtgcacacagaaatacacattaaatgaataaatgtaatttttttttaaaacagcgcgggggaggggggtaggggggtaagaattgtctcagggaagagtccataaggctgtaagggaaggcttatcttgtcttaccgccctgaggactcctatcctctcttgttgcagagagctgtgcagtttgccacttactttcctcaaggcttgggctccagtgtcatctcctcaggggctaacgtctgactgtagcgacctagggacgaaacagtcccgtgcctactcgtgcaacttcccagtgctgcgccacacccagtctctgcctttattcactgacagccttcatctgtgtcattcattgtagagtccctggactatgaacggtgcacacagtggtcccgtgtgcacatttgtagagtgaatcggctggtgtgaacttgattaactctgggccttagcttgagaaaatacagaatttcaaggtctatacataagagcttggtaaatgggaggcttgagagatggctgagtcggggtgcacgcctgggaacctgggtttgtcccatagatgtgcttagaacaaacttggtgcggcagtgtggcacatgggtgtggtttgagtgctggcgaggaaacgcaggcagaaggatgtccagtgcattcagtgagctcccgagggtacagcattcagtggtgagcacacacagacacgcacgcacactcacacgcacactcataggcacgcgtgcgctggagtagaaagaacactccaggtaaatggaaatgtgagtattcccattagagaaggaaacacacaggatcctgtaagacgcaggtgattgttattgttacatttgaaatgtaatttggtctgcctggacatgagatgtgtgttatttttgagaatattttcattgtttgggatattctgttacactcctgttctaggaggtagttacctgattagcacctcacagtgctgactgactcagactgctgatgtcgttattagaaaatgctggtgtaagtttttaacctgtcccttcttgggacttaaatatgaaacgtttctaggatcttaggatgtcagagctgtgcaaggatcatgagtgtggaggctggggacctgctgtgtcgtcagtactggtggttatccttcctcagcctcctcacctgctgagcagcgggaccatcccactgccgctgacgtcccctcggctgtgctcctgacgaggttaatgtgctgagagtctgtgctgagtatctttgccgtcattttgacctctgactgttgacttggcgttgatgagactgggatcatggtttccttgggtactttgagtactgatagagctagtattttctctctctgtctgtgttgggttaaaggttcatctcacctttatcccccttctgatgtaaatccgctaattgcttgctgtctgattcatgaatcatctcttagctttgaaaattccttgatatttcctcaggtctcgcagaggatggatagacttctacatacttggtcatcttaggcatctgcccgtctgcccgagtgcagagatcacaggtgtaagccggtgcaccggtcacctgccacttcacgttctaggggaacacttgcagtgtcgtggttgttcagtggagtgtattgctgagagctgtttgtaactcgagccacagctgcctgagcccacgccacaggtgcttcataccctcaggcacaagtcacgtgctcatctgggtgccatgtcacactccgtgcagctggcaaggatctcctggcatcaaatgttaactttttaatttttttttaaacttcagaaagtgtttgaatgtgtgcttatcaggaaatagtttaaaattttcattttaaccaccaagttatgttttcactgacttatgtgagagctgctacaaggacaatgactgaattacacataggagcagggctgtattagcaaagcctttggattgtgcagtgaacataatcagggagtcccaggtaaaactcaggctgctgtgggtcaggcaggctttccccgtgaacttcccagggcttgctctatcagcacgcttgtggtaggtttgaatccactgttgggtgcctgtctcctgcgcttcacactgttcctgcttctgctgtccagccagttgggaccttccagagtgtggcttagtgagtaaggcacacctgaacactccttgccgctgtgaggatgaacgtactctgcttcagcgtctccaggccaccgcgtctgctgttgtcctaggtctggctaggtgctctgcagcccggaggcctgccccgtccctagacttcccctcagcctcattctttccttttaaaaatgttaacacactggagttagattacagtaattcgggtttgttagtccctgggggacagccttgattttgcagcatggtttcttgtgcactgagtcacctccacaccccacttccattctcacgtctgctgtatgtgtttccccaaatgccaaggggagttaagcgcacattttccaaatgtagttacgcttgtctctctgactgagtgtgtagcctattgttgttctctcagttcttaattggatctcttagttcctgtgctttgtctgggtggggttgaaggagagatgtcaagtcctgctgtctcccatctctgtcatcttccataggggatatttttgcctaactttccccctttatttcagaatttcctgcttcttcctttgtcttcatctcttcgtgatttttgtgttaagtacaaacacaaaaatcagtgtggtactggaacatccgttttgttggagattaacctcagcttctttgtccagtatccttggacctcaccattgtgctgcttggcctttgtctgggaatagttattatatatattatatagtagtagcagggctccacagcgccccctgcaggtgtagtggaagttcttgttgcagggaacaagctaagctggtaccacgccctgagtccgcttactctttgtgcaagatttttgtttatttggttttcactgatttgcttttccttgttcactgaaatttctgaaaattcaatagcaaacacattcatttttccttccaacttggcattctctggcctgttgtgatgctgtgaagtctcttcaggtctgtgtagacatcttgaggatgagagtggtaccctagtagtcacttggagcatctctcctaacgtgagagactatagcactgtctgcccaagtggtgccactcgttttggctcatgaacctgtggtgactccagcctgctcaacgctcagcagcagtttctagtccttccgatttgtaagttagcatccccagcaaggccaggtcgccctgacaggctagggtgtttcccagacatcattggttggcctgggcgcagacaaagcagcaatgagctgcagtgtggctgcatggggaaattgtgcttcaccgtgggtgcaggcttctaaccggctttctgctgcaaagtggccagctgtgctctagaaagctgtgctctaggagtggtactgaagaggaaagcattgtcaatctgttttctcttctccaaagtttgggagcctctggtggagcaagtaactgggattcgtacagtgaccatttcaccattgaaacctgcaaagagacggacatgctgaactacctcatcgagtgttttgaccgagttggaatagaggaaaaaaaagcaccaaaggtactgcggagcttatttatgcctgtgctgacccctgcgcaggagcagctcttagggcctgtctgtgagaacggaatctagtcctggagaactcacagcaccttgtagaccttatgccagagctccgctgtgagtgggcgcgcctgggctctggagtctgtcctctcctctgtctgcccatgatgtccgtggtcctgataattgctgattgtgtcagttttccagtgctagcacagaatgtccaggaagctcaaagcaagaaaggtgtattacgctcacaggtccttaaatccatcaccaaatgagtccattgtttctgggatatggtgagcatctttgtagacaggtgtggtacagctaaattgctgttgtcatggtgaccaaggagcaaaggaaagcagaggaagtcctgggatgagctagctagactgctcagccacactctaattgacctgcttcctttcatgaggccttacctgccaatcctaccgtatcatcagtcagtgcattgctgaagctagagccacagctctggtgccccttcacccctcaaaaaatgcccatcagctagaaaccaagcctataacataagaagtcctccaggggcatatttctattgaaaccatactgctaggtgcctgagataaccatacaaacatccgacattacagagcatccgttccctggactgcagcaactgttacagtccatgagcttggattttcacagttgcccagtgagtccccacagccgcatgagtgagtgatactcctcagaggtgaagctgcagttgtacaagctgcaggaccatgctaagacaaggaagtagccccagccctgtttttgagacatcgtctctctgtgtagccctgggtggccttgaacacagagatccacttgcatctggaagctgagatggaggtgtgcaccaccacggccggcaccttccgctgtctcattccatatcccctcattcacatctcactgataccagactgacgttagaaactgatgtccttgggggctagagaggtagatcagcggttaagagcacccactgctcttccagaggtcccgagttcaattcccagcacccacatggtgcctcacaaccatctgtaatgagatcggatgcccttttctggtgtgtccgaagacagctacagtatactcatatacataaaagaaataattctttaaaaattttaaaagagatcacatttaaaaaaaagaaaaagaaactgttgttcgtaatctcagcaaaagcaaacaaatgctgggtgtggtcccgggagcctgggacaggaggattgctctagatggagatccacctgggctactgtacaaaagactctgcctcagagtgtgttataactccgcccaaaaggaaatggagtgggtgtgccctgtggctctgccgtcttctctggttaacctcggtacagtgggcacacctgccttacttggtccattaggagcacagggtgagagaagcaggccatttcatagccatgcctctgctcccagcctttttggttctttatgctgactgttgtctctcttctcagatgtgcagccagccagcagtcagccagcttctgagcaacatccgctcgcagtgcatctcccacaccgcactagtgctacaaggttccctcacacagcccaggtatgacggacgacactcggttgctgtgcttctgggtgggtagggaaggccagcgctcagtgcctgtcagccgccagttgttttataccatggtgagaactctgggtcctgtattgtgactgtctctcagtcctcagagctcgggctggagagatgactcagacttaagggcactggctgctcttgccaaggacttgggttcaattcccagcatccacatgatggggcgtagtatctgtaaccccaattccagtagatctgatgccctcttctggcctctttggacactgtacacatgtggtgtcgtacagaaacatacatacatgcaggaacaacatgcgataaacatacagccacctaaggatagcgaggtatttaggagtaaagatgcacttcctcctcgtagaaacggtggaaataaaatgttttcttcattttctaagtagtacggaacattttaaaaaaagaagttatttatttatttatttatttattttatatatatatgtgtgtatatatattttaagatttatttatttttattatatataagtacactgtagctatcttcagacactccagaagagggagacagatctcattacggatggttgtgagccaccatgtggttgctgggatttgaacttcggaccttcggaagagctgtcgggtgctcttacccactgagccatctcaccagccctatttattttttaagagttctctatactttgaaatatgtagagccaaggcaaaatatcgataatttaatatctagtgcttgggatcattgtctgtttttgacaaaataacgacattccatgtgcttccacattgattgttactaggtactagagaacaacgggggtgggggccaggtgaggagggacattatctatagtcctagcattcaggagtcagaggcaggaggagcaacaccagcacaaggccagtctggcctatataggaagttgcaggcccgcctgtgtttcatattgagaccctgtctcataaaaacaagataaaccaaagtacagttgtagggaaaatatttgggataatttgctataatttgtctttttcagaaagttttgtatagctctcaaggttaataaaagattgcatatttcattcattcattcattcattcattcattcatttatgccaggggtggaggcctttagtcctagcacttaggaggcagaggcaggtagactctatgagttcaaggtcagcttggtctatacagcgagttccaggacatccagggctacccaaagaaaccctgtcttgaaaaacaaaaataagacaatacaaaattttatttatgagtatgtgtatttttctgcttgtattcttgtgtattccatgcatgcctggtggccatagaggccagaagagggcactttatccccccaccccccgcagctggagttagcaacgattgctgccatgtcactgctgggaattgaacccagggcctttggaagagccgtcagtgctcttaactgctgacatcacatttctccagccctatatttcatgtctatcatgtaaaaacagctaaaggaaaaatggaaaaaaatgggattcttttttttaattttggttattgcctgtactataaccacatggtttttaatcttttcaaaatggaagaaaattaggccgtatagtaccacatgtctgtaatctcacagcactggggagatcgatgcgggattgactactagtttgaccttcgtgggctccgtagcaaaaccttgtctttaaaatccaactaactaagctggatgaattggcacatgcctttactctcagcatttggaaggtacaggcaggtagatctctgaatgcaaagccatcctagtccagggagttccaggacagccagggctacccagaaaaaccttgttttttttgtttgtttgtttgcttattttttgagacaaggtttcactgtgtagctctggctatcctggctatgtagaccaggctggactggaactcagagatctacccctgtttcctgagcgctgagattaaatgtgacactgctgtcgctgctaacaattgaggaaccttaccaaaccaaaccaaaccaaacaataataaaatctccacaaaaccaagtcacagaaaaaaagaaaaggaatttgaaagagattatggctattttttttcttcaatgtagatgagacataacgaggattttttatttttaatttaacaaaattagattcacttatgagcctttgtgtgtgcttgtgggtgctcttagaggtcagaaaaatgagttgagatctcctggcactggaattacaaaccgttgtgagccaccacaggggtgctgggaatcaaacaggtcctctgccagctcagccagtattctcactgctgagctgtctctctggacccataattgatttttttaatgcatttattatttatcttccattgctgaggatcccggcctagggctctccgtacgctaaacaagtgacgtacctcccagcccctaatgcttcatttagaaagacttgttgtctttgcagtttccactgatgtctcctttaaaaggccagatgtcaccattgtcaggaaggtcatgctttgcctaagtaatggttgtacagcagtgtttggtaggttttgtgtttccgtgacgacgggcggcctgtgcggccatggcattccacacgctcccatcacagcccttgctcttcctgcatctgcaggtccttgcaacagccatccttcctcgtgccgtacatgctctgcaggaacctcccgtacggcttcattcaagagctggtgaggaccactcaccaggatgaagaggtgttcaagcaggtatgctccagcttttagctaagtgcccctctgctgttagatactccacggcatggggtaggggcgagactcatgaagccccacctctccatgaagttagtgggggctgcaggctggaaagatagataccttcttgagtgataaagccactggtaaggtgggaaaggaagggaggggaaggaagaggcgaccggggcctgaagttaagaggaagaagagaatgaatggagtgggaaggagacgcaggcatgtgatggggtgagggtgataaaagtgcttttatgtgcgtgtacaaaaaggccgtcatgaaacccatcataggtaacatgtgctaaaaaggaaataaataagaaggccctagatctcactgcgggcattgtcggctggcagcacgccttcgccttgctttctgtctgtacactcataactcttggtttaaagaccgtcggcttcttacgtttgtaaaagcacagtccaggcctttgacccagcactctccagtccgaggcaagtaagtctctatgggtttgaaaccagcctggcctatacggttaagttccaggctagacttcatctcattggggggctaggggggtcagggggagaaggaaggaagaaagaacaattcaggattcaagaagaaaaactctctgtaaagcggttctactctgcagttggtgacctcggtctttggtggtgtcttgtggacacaggaacaataagggagcacctgagctgctcatctttaggcgaatccggaaattcgcgtgggaaaacgtcattgtctctggagagttaagagaggcagcctttggggggggggggtgacccttaattagaaggattttcttttttcgtacaagccagcaatgaagaacccagagtaactttaaaatcaggtcaaaaattagctgaagggacattttgtgcttattttattgataaacttatgctgagaccataataaagtgaccttaggtggctttgtaaaggacatggcatgaactcagtggcagcaaacagcacagataggcctctgagtcacagaaagctggtgctctctcgggctggctggctggcgtgagtgctgttgtcttcctgtgtttgaggtttctttggagagaatgcgaaggaaagggactggagaccccagaccacgtcctgccttttacctaacaggtgcggcaactatgacctggctaagtccttgactggaatttctacttcctctaatgtttgagtgatgtttccaaatgaacaaacagaagtaaatagcaacttaatgtaagggctggagattagcgttgaagcttctatctcccctggaggctcttacttggaaataaaagagtaacgtttagtatgcaggtcacaacaacagtatggtgcctaggcaggcaagctgtctctaggcagaaatgcttgctttgtaagcctgacggcttgagtgtggttcctgaacccgaaagggaagacacctaatagttgccctctgatctcacattcatatgcacacatacctacttatacaacatattatatgaacacagtaagattaaaatttaaaaatagaatccttgatgataacaatttatgcttattcatattttgcctgtttattatcaattaaactcttacttacacaggaggataactctactaaaaaaagtaaattttaaatattttttggatggacagttaatggcgtttatctgtgtgactgtagaagttttgccttcttgattgcggttctggcatctcttgcctgtgttgagtgttttcagattgcttaagaaagcacaaataccatccaccctgattacttgagttacagagaccagaatgatctcttccagcgctgttctgatacctggctgtgctctgcgcaggtgtgcgctatctttctatcccgtttctcctgtgctgaaacttccctgggatgggatgagctttgtggcctgagggattggtacaggtttctagtaggtttatactacgcgccctttacagctgtggttcacgttgccggctgctgtgtaccttctcctcgtgatggtgttagtcttagatgctagcccactcctaattgtgtggctcagtgagaaggcactgttaaatttgaaggtgagctgtgctgagcagcagggcttggccactgtcaccaaatcagtgccagccttgtgtgtctgactacccttcaatttcctggtcaggtgactgtgttagcaagacattcttactaaaaataaaattttcagtttgaacattcatcagctgtctccttgttctcagttgaatgcaacagagggaaacaatttcttaagtgttggtggattcgaggagaaagtggaacacttagtgtgatttccatgcagatcatgggtgtgtgttaatcagcaacactgtgggggcagggcaagtgggagtgctgaggtgtgcagcaggaccctccccccacgctctcagccgccctgtctgcgccctacaggccgtgggccctgccagagtgctgctagtgctcaacgctcgtccttccctgcacagctgagctctggtgctgcttggacagttgtcctggtggaccagccacaccaaagagttgtagagttgtttttatggatggggaaaaccagtgtgtcttggggggagggggggatggggcaggggagagtgcaagtgtgtggactacagactggtagtcatcttcagagcctgcgtgctaacctttctcacacctaacgtttgtggttctctttcttacagatctttatccccattttacaaggcctggcgctggctgccaaagagtgctccttggaaagcgactactttaagtaccccctcatggtaaaagctcaatctttcctttttaattgatatataaataatcccctcatggtaaaagcatattcctttttttttatcagatctgtgtttaaccttgtttttccttttctttctttttcttttctttttccctttcctttcctttcctttcctttcatttttttcttcctttcttgagacacagtctcatgtctgcgttagctcatggccctgcgccctcctctcgagtgctgagattacaagtgtagatcactctcaccttcagatgtaaaacctgagaccctgctataggccagacacttgtgtgactgtgtcctgagccaccctagtgtattggcagctttccatgccccgccactgccagtcctagacagcagcgagtgaggcactgtgggaatgtgccttgctattctggggagccagcacaaaggatgactgtcagaggcatcttgctggtttacagaacaacaagcaagccatacttgggatttgaacatcaagcatcatgagatagcttgctcttgagttactagatgcttgctgttcaggcctgacaactggaacccacgtcaagatgagagagagatcccacatacatactcaactccccctttccccggacacacacacacagtaataataaatggagacgcaacataggattggggctgggaagacagcttagcagtcaggagtgtctgatgctcttccgcatggctcgagtgtggtttgcaggacagcctggaactccggctccagaggatttccctcttctgccttcacaggtgctgccgagcactcaggaggcatatacctggcacacacaaataaaaataaatctttaaaaaatccccaacagatcattttagtatcttcctgtgttgtgcaggctggccgtgtggtcatgaacctgcatcattatcccgaatgctaggatgactgctttgtgttgccatgcccgactgggccagagagatgatccagcaggttaaaatacttgccacacaaccctgtgacctgagtttgctttctcggaatcaacattaaaagacaggtgtgctgcctactatctgtagtcacaggatagctagggtaagataagaggctggtacaggataattgtgggctagctagcttggagcagcaaagcacaatagtagaaaaaggagattctgccccaaaacctggtgcagggcactaaccaactgctgagcagttttactttgacatctagataggggctttggcatgtgtgcgcctgtctatacatgtgcgtgtgcacatgcacacacacacacacacacatacacacataagcgcacactaagtgagtaattttttaaaattttaatagcctgttaatacaggttaaggagttgatttagtagctaaagtgcttgcctggcaagcaggaggactaaacccacataaatctcggtgtgtctgtagcctgcctgccattgaggccacacatctcatccgtggtctttgtttccaagtagatgtgcctggtgccccgtggtgctcagaacaaccatagactataataagagtctttagccagattctcaccgaggactcaactgttataaaatactgctgtccatacaagaggcatcgtggtccatgactttcatcccatcacttggcaggcagaggcgggtgcacctgatcactgtgagttcgaggccatcatgggctacatagttccagaacagccagagctctatagagaggccccatctggggaaaacaaaacaaaaaaccttaccaaacagcaacaagtgagaggttcttttctgtctgacatttgctgctttgaaattttgagagatgaatgtcttttggtatttttgttacaggattataatagaaaaaatataaaaccatggaactcactcactatatgacttacatacaggtacaactttgtataggatgaggccataaagaaattgaaactctatgtttgttcctttactaactcttttcgtttaattccattttgtggatcactcataatattggggatgtgccctgggtaccctaggcgcttgtaaagcaagctctctttccttaggatattcgtaattcagggtaaaagtcgcatcatcacaaaacatcttcacagttaatctgtggcagatggtcacataggtaacagaagggctactgttagaaaatcaagacaaacgggcagtggtggtacacacctttaaccccagcaaccgggaggcagagactggcggatctctgaatcaaggccatcctggtctatagaactagttccaaggacagtgagggccacacagagaaaccctgtctcaaaacaaatggaaaaacaagaccttcatagcagtaacaaggagaagttcataataatgttgggaatgaggtgaagctgaaccgagtgtggtagttcacggtcagcagctttggagatctgagccgtcaaggtcatgggttggccagcctgcgctacagagtgtccatttacacaaaggcaagaacaaaagccaggtgtctgggttcaccttgatccctgcacagtctgagcaggaggatcaggagctcagggtgtctttgatcccagcacagtgtgacattatactgggcacacaacatcctgcctgaaatctcactttgagccgggtgcactatagttgagtagttgaggctgagggaggacgatcattccaggacttcctagtgagaaagtccagagaagtctgtgctacatagtgagattctgtctccaaaaaaatcaagaaagtagacaaagaaaaactttgagcatgtttctggggctgtttgttataaactgtatggctgggcacaggaagtggaatctgctgctgctgctgctgcctcagtagggatgccttttagtcagtgctgatcacccttgttgttctgcaacacagccttggaactgctgtgctcctcatctggtttagcttagtgactcggtgacgagaatgtaatgacaggatccacaaaatgcccttggtggaacacagtcgtcctttgtgggggtgggggtgggggtggggtttaactggggctgttatgctggtacagtaacgagggtgcatcaggagggcatgaggggaggaggactgttggagcacaggaacaactgttgttggattgacaactggcagactctgctatgtcctatgctgtcacctccagggtgttgtttcttgtgctggtgctactgagcatgtgtcagccccagtatttaagaggttaaggcaggagaactgagagttctgggccaacctgggcaacataacaaagccttattcagaaggaaacacacacatgcacaagcacaaacacccgacacctcacacagatgcaaacactccccatcccacgatgataacagcagcaacgataaatcacaacgatgacgtgtggcagccagcctcaggttttttccccagttgtggacggtttgctgcctggtgtttggtgttgagattgtttccggctttccctgcggtattaatgtgatatcctacagtgggccatgagaacttaaacttggaatcagttccctccatccctgacctgtgagcccgtccaaagcctcagtgtttggtacgtagtgtctggggtcccgagaatgccctgggtgttgctgcccgggattagcacacacagcctatgcagttgatcttgtgttgtgaattgataaaaatgaaaactcagtcttaaaagctaagtgcacgtgtttggaaagctgttcaccaggacaccacagggcgctttgtatgcgatcgagtgattgaggtgtgagcgcctgctgtgtgggcattgtgctctatctatctatctatcatctgtctttctgtctgtctatctatcaatcgtttgtctgtctgtctgtctgtctgtctgtctatctatctatctatctatctataagtaggaacactgttaaggctgatggcctcacagagagctttgccaagcatttgcagtgggaatgaaagctgttccttgctgtcacacatggcacagtgtgagacagaagacatggcagtgattctttcccttcttgtttctaggcactgggtgaactctgtgaaaccaagtttgggaagacacaccctatgtgcaatttggtaagtgtccaccgggtgagtctgcacatgatctctgtcaaccggcaaaggccagttttaaagtagtatcagccaaagacttctcttgaaagacatttgtatgtgggcggggctaccctctgttccgctgctattatagagtgtattctacgacgagggctggtttttgtagaggagcaggtgctgtgggacattgaacagcctttgagtagcatcagaataggttgctgacctgcggcagagttgctggtttgaggagactcatcctcagcagtgtgccctctgctctagtcgtgctatagcagtgtgaccttgttgcagtcacaggtgcctactcacactcctgtcagtgtccttactcagctgcagcaggctacagagacagcacatgagagtatggggacctgagggaaggaggggcttagtgggagggagacagtgacaggataggacagtgcaataggaatacatcagaccacacacttgcatacacacaattgtgaaagaataactaaaattttaaacgtatatcttataaaatacggaagttggagagtaccctctatctgaggtcagaactattatagggaacccgacctgctcgtccctctgtttccgggtgctgggtggctctgagtgttgctctctaagctcctcctgtgtcagctgcctctgcagcttacctgggccctctgtcctgtgtctaggtcgcctctttacccctgtggttgccgaagtccttaagccctggttctgggcgggagctgcagagactctcctacttaggggccttctttagcttctcagtcttcgcagaggacgatgtaagtactcagtgcgcagccaggcagctcattcctgtgcccactgtgctctttgtgattgcctgcgtccccttctcttccaggcaaaggtggttgagaaatacttctcagggcctgccattaccctggagaacacacgcgtggtcagccagtcactacagcattacctggagctgggacgggtaggtgttgagaggagagagggcctccctagggaagaagggtctgtcccacatgtccagtgcttgccggtcattcgtgtcatacaaatcagacagcttacaaacagagcgctctgtgttgaccctaacccgatgcttttagcacttgttgctgctgctgttgctgctgtcagtgggcagagataagatacaagcctgttgccggatgtggtggcacgtgcctttaatcccagcacttgggaggcagaggcaggcggatttctgagttcgagaccagcctggtctacagagtgagttccaggacagccagggctacacagagaaaccctgtctcaaaaaaccaaaaaaaaaaaaaaaatacaagcctgttacctcaggtgtgcccggcaaggtgtctcccagtgactgaaacgtagctatgccacttctctgggaacgtcatacgcaagtaaggaagctttatgtgtgctctaggaggtaggctgtccaacatgattcttttaaacgtgatttcccagttaattaaacagtggttcttccctttgtgaaaaagtgcagcgaaatgctgaaggagcagactttgtagagggacagagcagacctgagctgggggctggcacgcctggtggccaggctctctccagcttttactatgtcttccgtgtgccttgctaatcgaggccacgctggtcatgcgagctaagaggcaaaggcgggttattaacactgactgctcaacatccttcctgttgcaagctgctgtgcgttctctctctctctctctctctctctctctctctctctctctctctctctctctctctttctctctctcacacacacacacacacacacactctctcttttcttgactgtacttgggttccctacaaggagagagatggggagtgggaggctctttttaaagtaaaaaagaaatcaattgttttttcattttgaaaataatttagcaagaacttttcaagattctacatagtattttgttaaacggcgaaactcgtgaagcggctctcagctacatggcggcccttgtcaatgccaacatgaagaaagcccagatgcaggtaggagtccccaagtgctttcagttactcattaaacctgtttctccagtgcagatatgattttgcgcctcccaggctgcgttctgggggttgggaaggcagcacagaacaagacgggcaagcatcttgcttctgtgcagcccgaggtctcaggcagggggtggccatgcaagcacagcatccaggcagtagtagtcgctgatggaagtgtgaaggattcaggcgtacttgtaaaatgccggaacggcagcacaggggtggctgttgatcaggcagcagaacagcctcgtattaaagcttcgactgaagagcggctccttacaaggctgagaaaagagccctcctggtgatcgtgtgttaggttagaaatgagccagctttattgcaagcccggcacacacagttcctttgactcaggggacatgggcaggtaacatgctcttgagtctattttaccgatgagaactctagtagaatccacagaaggaaacatgtgtcagccacaaaatgacaaggtgtggggttggaagcagacctgaagaagcaccaagaagtcttgaggactccagtgtgcatggtaacagtgggaaagttaaaactgtagactgtttttagtaagatcttggaagcaaaagaataaaagtatggagaattgcaaaatcccagtgtctttggacactcattagtattctggtatgtcatctgttgacattgtcacatggtagtgtcacccataactcaacagccaagaatacacagtcaaagaggtcatgtgcaaaaatccatcatgttctgtgtaagtctatagttttacattgggccacatttacagctggcttttgccacatgtagtcggtaagttggccacatctgatagttacttctctgtgcctcagtttcttcatttgctaagtgggtttaagagtgaccactaatttgtgagccttttacatgtagaccattagaatcgttctgagtgtgtcgtgatccctgaacctctgtcattcagccagggctgtactcactgtgtaagatgggaaagctgtcatgtgggctaaggacagctcattgctcttgagaaataagaaaggaaacggaagctacagttgctgtgttttactgacaccgattcattgactcttctctgaagtgtgagttatagtgtatggactgtgggttattacagaggtcagtgagtctgtggtgatggataggtagaaccttgctgggctggcacctgctagctgattgacagtggtagccacgtgtcctgtcactggctttagggcctggttacatttgaatgtgctttcatagatttgcaaaatgtgtgcctaacaattgtttcaattgcttcacgtcttatgtcacaggcagatgatcggttggtgtctacagacgggtttatgctgaatctcctttgggtcctgcagcagctaagtacaaaaatcaagttagaaacagttgaccccacttacatattccacccaagatgtcggatcactctcccgaatgatgagacacggataaatgcaacgatggaggatgtgaatgagcggctgacagagctctgtgagtgatgtgggcctggccctctcatcctcgtcgctctgagagagagagagagagagagacatagttaaaatcagcagagtaaaaattcatcctggaagtactcaacacagcttcgtagaatacatgggtgtgaaagtgaaaaaaagaaataataacagtaactttttaaaagattcatttatttcacatatatgagtgtgcgatctgcatgtacaactgtgtgccagaagatcccattacagatggttgtgagccaccatgtgggtgctcggagttgaactcaggacctctaggagagcagccagtgctcttaactgctgagccatctctccagcccaataacagcaactttatattatatagattttgtgttacattttgacagttgaaactatgactattttaaggtgtgataacaataatcttgcttatgtgtggaatagaatgaattcctacttaacctgaaaatggaaatgcaatgatcaaatgtataccttctaaaaagtaattatttagtgctcagcctttcttagtgcatacggatagccccagcacttaggagactgagagaaaagaatcatgagttcaaggtcagcgtgggctacacagcaagaccctgccttccaagaccaagaaaagaaagaagtagatgccctttaatgatttatttcctcactttagagtagaattcggcaatacttgaataggaattgtaatacagttgcagaggtgaaggaggcacacggaggacagttattagagcagcagtggcccggggcgaagtgacccagggcttagtagcttatgagttgaggactccttccctgtgttgcctaggctagcttcaagttcttagactcctgccttatctcctaagcagcaagaccttgcccttgcagcagtgcagctggttaagggtgcagtcatgcaggagaaacagcctgatgctctttagcacggcaggatagccatgagtagtggcagctccggtgtatttcatagacgctcatggaattatttgttctaacacaaaaaatgataaagcgctccgaccaccacagttgtacacaagtgtgaagtgtgaactctaccctatgagcccagctatgtcctaactaaaaaccactgtataatggaaccctctccacgattccagttttctgcctctacttgcaacattgatggcttcgtaaataggtcttcctagaagatcaaaaacacaaacatgtaggaaaatggccataatttattaatatgccctaattatttcagattgaagtaacatgttcagcttggggaaatgaagacggttttatagagtataccagaaagacacattataaaagattgatctatgccaacatttaatcagataagacgatataggacattaactaaagcatgaggaatttatttctcttgcaaaatcgcataagttagtaatttaaaaaaaatgttattggaggctgggcttagtagtatatgctttaattccagcactgagaggcagaggcagaggcagaggcaggcagatctctctgagttccaggacagccagaggttcatagagaagatcctgtctcaaaacaacacaaaatgaaatggcctggcctggggagatggcttactgggtctgtaaagcactgtgaggcgagcatgagttcctgggctcagcttcctcagacctcataaaagctgcatatgggtgtacgcatctgtcacgccaaccctgggggaaaggagacaggatgaacttgtattatccccagtctagcctcgagctcatgatgtctgtcctcagtgatataccctgtctcaaaagtgaggtatctaaaggcacaagctccagcctcacgtctgcaaagccatgtctgcacaaatacacgcacacgcatgcacactgtgtccacacacacatgcacaccatatacacataccatgtcctcacagacagacagacagacacacacacacacaaatgcacacagaaatattctaggctcataactgatttcactgaaggattcatgtttgtttgtttgtttgtttgcttttctttgtagatggtgatcagcctccattttctgagccaaaattccctacggaatgtttctttctcaccctgcatgctcatcacctctctattctgcctagttgtcgtcgctacattcgccgacttcgagccatccgcgagctcaataggtatgtgccacgctcgctctcctggcttgctgttactgctgcctacaggcacaaggagttggttgtggtcagaatgtctgagagtaggctgtgtgcattacagggtgctgtctgcctctactactgcgatgcctctcatttgtccagtgttctggtgactcaatgatccaggccttgatctctgagcccttggtgctcctctctgtgtgtggttgctaaagtctgtttccactaatgtgagaatgatcaggaaccgctgtgaagagtatctgcctttaagtatatccatcttgctctggactttctttttcttttgttttttgtttttgtttgtttgtttgttttttggagacagggtttctctgtgtaatcctggctgtcctggaactcactttgtagaccaagctggccttgaactcagacatcctcctgcctctgcctcccgagtgctgggattaaaggcatgcgccaccacgcccggcatgctctggacttttcaaactctgttttcctgtgataatcaagagaaacaagcaattggactttggcctgttgtttgtgtctgaggagcccaaagtctggcttgtagcctcacctgtcaaccatggaatcattagcaccattgctgtttgtgctccaagcatctgtggatggtcaggttccccgaggaaaggaccctctcggcacatggagacagacgcctgatggacaggctgttctgagccgcttccatttggtcttgggtgactgtcagaaaaactgtcatattgaatatctaactatacattcctcagatcatggatgccaacatggactccatagattcttttgtttgttttcaggccagctctcttgtgtagctttggccatcctggaactctgtagaccaggctgacctagatagaactcacagagatctgcctgcctctgcctcctgagtgctggctggcatcaggggcctgtgccactgtttggcaactctgtagattgggtttttgtttctttgtttgttttttgttttggtttggttttggttttttggttttttcgagacagggtttctccgtatagctctggctgttctggaactcactttgtacaccaggctggcctcgaactctgaaatccacctgcctctgcttcccgagtgctgggattaaaggcgtgcgccaccatgctcggctgcagattgttttaaggtttggttttcacatatgatggtgtcacagtacattcctttttatactttcattatttagtttatttattgactataaattatcgaagcaatttgttagatttgtggttttccttcatgtgtgtctatgcaccatgtgtgtgcagtgcccatggagatcacaaggagacatcaggccttgaactggaattacagatgaatgtgtgtccatataggtgctgggaaatttactaaagtgctttgcaagagcaacagtgttcttaacccttgagccagctttccagccccaggattttgggttggttttgggagtgtttcgttgttgttgttggtttgtttttgtttattttgcttatgtgtacaagtgttttgcctgcatgtatatttgtgcaccatgtgcttggtacccttagaagccaaaagaggccaatggagttagagacacttgtgagccatgtttgtgctcagaagggaaccctgatcctctccaagagagtggtgctcctaacagctgagccatctttccggccccattcttctatggcttctattatagcgttaaacagaagtgtgagaccacttctctttatagtcatggccgtcttgaaactcactttgtagaccaggctgtccttgaactcagagatccgcctgccccgtctcccaagtgccagtattaatatcaagcgccaccatgaatgctataaaaccttattatttgcactgtgtcttcttatgaatacatacttataagatttaataaattaagtacactgagggattaacaactaataaaaaaatagacaattataatatactttaacaaaaaccagagatccacnnnnnnnnnnnnnnnnnnnnnnnnnnnnnnnnnnnnnnnnnnnnnnnnnnnnnnnnnnnnnnnnnnnnnnnnnnnnnnnnnnnnnnnnnnnnnnnnnnnnnnnnnnnnnnnnnnnnnnnnnnnnnnnnnnnnnnnnnnnnnnnnnnnnnnnnnnnnnnnnnnnnnnnnnnnnnnnnnnnnnnnnnnnnnnnnnnnnnnnnnnnnnnnnnnnnnnnnnnnnnnnnnnnnnnnnnnnnnnnnnnnnnnnnnnnnnnnnnnnnnnnnnnnnnnnnnnnnnnnnnnnnnnnnnnnnnnnnnnnnnnnnnnnnnnnnnnnnnnnnnnnnnnnnnnnnnnnnnnnnnnnnnnnnnnnnnnnnnnnnnnnnnnnnnnnnnnnnnnnnnnnnnnnnnnnnnnnnnnnnnnnnnnnnnnnnnnnnnnnnnnnnnnnnnnnnnnnnnnnnnnnnnnnnnnnnnnnctgtaaaactcagcttaaggtttgtacagttgattgacataattatggcccagcttcttaatagcaatccccttgccagagtatgcaccctgagcaagcactcgtatgtccctgttatttctttgttgttcttttctctcaaggtaccacaggacttgttgctaccttgcatatttccgtatctcattatttaaatctcagcagagaacacacatgtgtatatccggttgagtcgttagtaagtgttctcgaccgcagtgtaacctcccccctccatccctgccacactcatgttcaggacacgcatccagatacaggctgccacggcagttgccacagcgcactgtggcggtagaaagatccccgtcacctgtgctcttaatcactatgtctaatgaagacgatctgtcccatagaacctacacctgaatagccctgcggtaaaagcagagacacacatgtgcatcttctgtgctgtgttcagaaggcaaagctgtgttagctgttcacgggctctttactgggattatagcgaaaagtgtctctctgatttccatgacaagcgaaattttcacgtttttgtttgctaatactgcagagtgcttttgagatataaaatggagctaggtgtagtggctcatacctgtaaccccaacactaacccaggccaagaagggagtgtggctgtggtttttaaggccaccctgagctacagaatgagaccctgtcttacccgaacgtcaggatgcagaatgaccggagctcttctttcagatctgtagcctcccttatattccattgttgtgactaaggggtctgtaagaagctcaacatccacttgcacgatgtggctctgtgtgtctcctctggcaggcggccctctgagatgtggcctctgtgcctctcctctggcaggcggccctctgagatgtggctctgtgtgtctcctctggcaggcggccctctgagatgttgcagacagatattttgcttgagagtagcacagaactgttgatgctgaaattcagatacaacttgtctggctttttcccactaattgtccaagttcctgagcgatgatgtcagtgactgaccttcagcactgactgatggcctctctgctcagtggcttgcatggcctatcttcctgttgtctttattctgaaaacagaaagaccctgacacaaccaccagtgtcccgaggctaggcagagctaccgaacctagacttctcatctcctggcccctcactgcctactcatgctcaggggccatggcactggactaatctgcgggccggggcccatcctcttccacagaaactggtacggtgcaaggcctgtgctgacgctggcttacttgacgagagcttcctaagaagatgcctgaatttttatggccttctcattcagctgatgctgcgcatcctggaccctgcatatcctgagtaagtgtgctctttgccgtgcctcgtcttcacggtggctaccgggctattgttcttgagtcataactaaaccttgagaatttttatagttatgcataaatacatatgaagctagattaatatttccccatgtgttttttagtggctgtcagttttaaaattttgctataacattggatggctagaaaaggaagtttataaattggaagcaaagtgctagaggtgacaggctcctgagcctcctgagcaccaagtctcggagagccgaggacaccgacagtcactgttgttgtttaagtcaggtctcttacgttctgtgaaccccctaggtcacaggtattggttagtttggcctgtgttcctaaaagactggaaaagcttatataaagtatatgctggctttatccacccagtatgagttgcttgaaatgaccaaattcgacctttgggtttctttcccattttaactacttccttaagtctggcaagaaaagaagatgaggcaaacacttacaaaacacgcccaggccttcctcatcctttctgcacactgcgggtcagtcgtttgcctgtgcacttttacacatgtgttacacagtgagggctgctctttccacatggggcatttggaagtacaacaccccaggtaatcagtgttccatgatagcatttgtaaattgtggggtttttctcctctacagcgtaacactgcctttgaattcagaagtccccaaggtatttgcagcattgcctgagttttatgtcgaagatgttgctgaatttttattttttattgtacagtaagtacttcccgtactgtatgttcttctgcttatacactgtgcctggtcctctgagctgtgtcttcttctgcttatacattgtgcgtggtgccctgagctgtgtgttctgctgcttatacactgtgcctggtgccctgagctgcgtggtgttctgcttatacactgtgcctggtgccctgagctgtgtgttctgctgcttatacactgtgcctggtgccctgagctgtgtgttcttctgcttatacactgtgcctggtgccctgagctgtgtgttcttctgcttatacactgtgcctggtgccctgagctgtgtgttctgctgcttatacactgtgcctggtgccctgagctgcgtgttctgctgcttatacactgtgcctggtgccctgagctgtgtcatggttcacatagctgcgcttcagtcggaggttgtgtgactctgtttacctgaatgctgctcagaacttagagaaagaaacccccttcagcagcagctgattccaatttgatctccaagacagaggcagtggcaagttctctgtgaaacctgagcagtgtttgataattgaacaggctctggagaaatgccccaggaaatgtccaaaaccaaaagtacccacagctgtgtttgaaccaaaactgtctccatttgtaaaactggagaagctgcgtgtctggtacgtggggggagataggcagtttgtttggatttttgtttcctaaaatcctcacttcaggggctagagccttctctggcctctcagggagacccctcaggtcagctgcccagcaggtaaagggccctggactcaatccccagtactactgaaaacaaaaatcaaagcaaagcccttcacttttcattttgaaactgtgagaggtaatttctcatcaccataactatatgggaactggttggcagaagaatgtgtgtgaaatctggtttcaaacgcaaaagcaggatagaccagaaacaacatccaaagttatacaaagcaaatttgtgttatgtcctaaaagctgcccccagccgagcatggtggtgactgacacctgtaagcccagcacctggaagctcacacaggagcattgtgagttccaggctagcctggtctacatatcgagccgctccctcgatcagcaaaaggacagacaagctctctctgtgcaggcccagtcagtggtggtaacgtggaggggttagtttttgtttttttgagacagggtttctctgtacagccctggctgtcctggaactcactttgtagaccaggctggcctcgaactcagaaatccacctgcctctgcctcccaagtgctgggattaaaggcgtgcaccactaccgcccggcttacattttaatttcttaaaatttgaactttttttttttttaattggggcaggtggctagagagatggagatcaattccagcaatcacgaggtggctcacaaccacgtatcctaggatctgatgccctcttctggcatgcaggcaaacatacagagagagcactcatttacaaagattgggtgatatttgagactgggtttctctgtgtagctctggctgtcttggaactcgtcactctgtagatcaggctggcctcaaactccagagattcacctgcctctacctcctgagttgtgggattgaaggtgtgtgccaccactgcctggctaaaaatattttaattacatgtatttattcgtgtgcgcatggggtccttgaatgctacagaggtcctgctaacaattgggtcctagagatggaattcaggttgtccattctgaagctgggcatggtcatgcattcccataatataagtatttgggaagtagaggcaaatgataacacgttcaaagccagcatatagtgaatttgaggacagttgaagctatttaaaagatcctgtcttttaaaataaataaaacccccacttttggacagtgaagatctttttgtgaagtttcagttatggcttttgcttactttctaaaacacattgcagccaacactcaggtttgctttgaatctttgtggctccagtgtgcacattgttgaaccatgtagaggcactccagtactccccctctgctgtgtgccccagtatccccctctgctgtgtatgtactccagtacccccctctgctgtgtatgtactccagtaccccccctctgctgtgtaccccagtacccccctctgctgtgtatgtaccccagtaccccctctgctgtgtatgtaccccagtacccccctctctgctgtgtatgtaccccagtaccccctctctgctgtgtatgtaccccagtacccccctctgctgtgtatgtaccccagtaccccctctctgctgtgtatgtaccccagtacccccctctgctgtgtatgtaccccagtacccccctctgctggaccctgtctccttcccggcctagcgagctctccgagactcaccatgtgttttctcctctttacagatactctcctcaggtgctttatgagccctgcactcaggacattgtcatgttcctcgttgtgatgctgtgcaaccagaactacatccgaaacccttacctagtggccaagctggtggaggtcatgttcatgaccaacccttctgtccagccgagaactcagaagttctttgagatgattgagaaccatcctctctctaccaaactgctggtgccgtccctcatgaagttctatacaggtgggtttcagagtgggccctggggtatgtggtaatgtacttgacccaaggttgtttcagagcgaactgaaatctaaatctgtgacctagattcacaaatagataaataaataatcctgccatcaaggctttaacatctgcttatgtaaatcacttcctagccccagctcagagcacaggctgtcgcatgccttctctcccggcctctgagagctcgcactggccactgcgtgtgcggccttccgttgatttacactgttcgttgttgttagtccaagctgatgttttcatctgagttgttaacctggttcatttgctgttgagtttacagtatctgatatataacaccatcctgtggctgccttttcaaagagatggaacaggagagagtttgatatatgcattctaggtcatccttgactgccacagcaagtttgaggctaccttaagcttctgaaaagaagaaaaaggcaacaacagaaagtgactgggcggggctggagagatggctcaacggttaagagcactgactgttcttccaaaggtcctgagttcaattcccagcaaccacatggtggctcacctgtaatgggatctgatgctctcttttggtgtgtccgatgacagtgtactcaaataaataaacaaacaagcctttaaaattaaaaaaaaaaaaaaaatttaagaaagtggttgggcttcacccgagccagtgagctgagcattctgggatgctctgggagtcctcccacattcatcagcgtatcacattcactgagctcctgccatttgctaggtactgtctgctgtgctcagttacacttggaaatgacagggtatggagaatgagctgtctgggcagactgtattccacattttgactgtttaacaaaatttgacttttgaactctcgggttaatctctcctctaacaaaggcttccagtggctaatggaagttcctgggatctgccctgccttctcatcctgtatagaatctggtactttctggccatacagtcaagtgtctggcatttagtagaccttgctgagctctgcggagaatacagcctgttgctgttgactggggtggcctgtgtgaggattcccagtgttcccactgcctgtttggactcagggtcagccaactctcccaccttgtaaggggctctgggaatctgcctgcctacttccccttggtcactgttactttgttacatccctcccttagactctcctgtgtctgaagtaagcacttgctgacttgagtattttgataacattctttctttggagaaagtccagtgcactggcacaccttttggggaaaaaggtcatggtctcctagccatgtttcaggataagctcggcatatttaggtacaaatgccaccttgtgtgtattcagaacaggagcagtgtacactgcaggttggaggccagtcaggaatacttagtgagaccctgtgtcaaaaacaacaacccaaaaatttactgaacaatccaagtaatagccacattccacaggaggtatatattaatattaaaaaatagatttttgttgaatctagttagtattcggttagtggtctggacctgttactgtagcttcagagagacagagggagggagggagggagagggaggagagagagaggagaaagaaagaacacacacacactggcgtgcctgaggagcatgtgggtggatatcatccaccctttctctctgtcgtggagcacagtggcctctggcctgagcccttccatggtcatgggtagatgacacctttcctaataatagttgccacttgtggtcacttgatccgaatagccatggaaaagatgggtactataaatacgtccattttctaagtgaggaaactggagcttagaaaggtcaggatgcttgcgaaaggttaaggcctgtgagtggcaggtgctcagcagctggactctagcaagtgtgcctggctgctcttctggccttcaccctgctgaaacttcacagtctccatgggcctgcccagcaccccaccaagataggacttagagttgtatatcccaaggtcaactgcagcaaccagcatctctcagggcatggcacataggaggtacttatgcacaatcttgtttcaaaaataaaattagacttcaaaataagagggttttaaatgagtcctaacagtcttccttaaggaagaattccttaggaattcctgaggctccgaaggctatggctacaagacttatttccaggccccttcctcataactggctggctgcacagaggcagggcagactccacctctaacttagcagcgtttgtgttgggcctactatgagaggaccccaagatccctcatggaggcagacgtggaagagttggggacagtagctgtcagagaaaatgggctacttcacaaaaagtggtctaggcagagctctctgggatggatgcagacatctgcatcagttgatctcggctgaggagtgacagaaaaggcagtgaggtggacctggaaggtggcagcaggaagccttgttcatgctggacgtggtggcacatatctttagtcccagtggtcagcaggctgagtcagggggatcaagggcagcctagtctacatggatgttccaggacagggtaaggcttatgagattagcaagagtcaggtccctttaaggacttgggaattggaacctgagcaatatgattttgagggacatttaggagcaaataaagcagaaatgtggggagaggggtactggtgggcactggataactacagtcttggttaatctggacccctgagatctctcaaacactgaaccaccaaacagacagcatgatacaccagctgatatgaggcccccaacacacacacagtagaggagttccgggtctgtgttcattcagagatgaagcatctcaagagactggaggcccctgggagtttagaggtcaggtgggatagggtggtggcatctacatggagacgtggtgggatggggaggaggtgtgggatattcggagcagtcagagggtggatggggaggggcggggaacagactatggagtgtaaaaatgaattataaataaaattaaaaagaaaatggaatcctccctttctcctgtgccttccgtctgagacacgggtagcgcttcccagcctcactgtcactgagatacgggtagcactgtccccgctgtcactgagacactgccatgtcattgcatctggaaggtcaggatgtgtgtctgagtccctttgtctttcctccttagatgtcgagcatactggagccaccagcgagttctatgacaagttcacaattcgctatcacattagcactatttttaaaagcctttggcaaaacatagctcaccatggcaccttcatggaggagttcaagtgagtattggggcctgatggcacagcttgctctcaggcagagcacaggtgggaggggaggctgctgaaagcccgcccagcggctccctgtggctgctttctgtctctgcctctctcaagtaaccacaagacactgctcagcgtggacacctacgtgattgtctgcttactttagcgttgttgacactgggagtggcttacatggcagaatgttctggaaaaatatttatgtggagtgatttttgtgtttactctgaattctatcctattaaatgcagttatctgactcaggaacattaagaacacatccgaggtttcgaagcacttgggttaaggtggcctcttaatttattggctgcgcttatatgccaagcttgaaactgcagggcctgtgtaagcctgctcagtagccattcctctaaattatttgcaagtccttaagaaagatgagtgtgaacattgaacccttgctttatccatcaaaggaagtttagccccattgcataccagatctttcatcagtctagctgtctgtcctgtgttcagttactagtcggtgttgccggcaacgtgagctgcatctgtccacactgctttttgaaaatggaagttctggtgtcccaaattcctgagtctgaggccttgtgttcatgttcatgttcccctctcctcccagcatgggctttctaggtgcacctgctgaggacactgggccttctctttttgccaagtctctgtcagtttcagaagttcacagttccccagtaagtgccttcattacagctctcagcaggctccccttagacttgacgctttgggtctataacctgagttcctctcttcctttattgatattataggactagtttttcttcaggtatcttcgttgtgtgagagacagcttcatcagtagcctccatctcttgtgttttgtaatgtgctcttggtgctggttctcttccagcctggaagagggtttcctctacgtagaaacaacagctctgtacagtgaacctctccagcaggaagaatttcagcatttgctgcttttcacagtgtaacaatgtaaatagttgccaagtttaaactgccaaggaagtcagctcagggaattctggactatgtatccgctggctcctaccagccccacagtgctggtccagctgccacttgagtgagcttgtcacagtgaatgggaagagcagtgaggcagagcttggtggcgcctgtctgtcatcccagcgctgtgatactgaggcaggagagtagttcagatatcagcctggggtaggaggaagacctttctcaaaaccaccaccaagggagtaacaaaatctaaggagagagttaattggcagtccttaaactccagctatatcatctgcgacaggatttgcagtgtcacggggagtcttggtacctggggaggcttacattctctctccgtgcccagccaggtgttcaccacacactgtcttgttgccctttcagttctggaaagcagttcgttcggtatatcaatatgctaataaatgacacgacctttttactggacgaaagtctggagtctctgaagcggatccatgaagtgcaagaagagatgaagaacaaagaacagtgggaccagctgcctcgggtgagaaccgcctctgcgcctgtacgggctctggggggcgggggggtcgggcaacactaggtctgactttctgctggggcctttcctaccttaggcgtccgtaaagtagcatttcaggtttgagataggaagagatgatgcttcttaaaggtttttatctaaagacttggggcagagggtgtggctcagtggtagagtgcttccatagcatgcttatagtccccagtggtgtcccaaacccccgggaagaaaagttcactctctgcttgagtttcgggcaagaatgttccttactttactaagactggctatcaggtgtcccctcaaagccagattctcattgccaaaaccagtctcatcggttgagagcacttcactgttcttccagaagacccagcttcagttcccagcaccaacagcgggcagctcacagctgcctgtgaatcagctctgatggtctgatgccttctggactcatgggactccttcacacacagtgcacataaactcactcatgcccactcacatttatataaatataaacggatatatatatgcagatgtgtgtgtgtgtgtgtgtgtgtgtgtgtgggggggggcaacgaaaacctgtctgtgaatagaccttagaggcaacttgtgcttaaaaaaaaaatccattaagggaagaatcaatagtatttgtctcaagtaaatgtcctgatggtgacagagagaatgggcttcaggcccagagatcaactcctaggagattagctggtctaaataacacaggannnnnnnnnnnnnnnnnnnngtaaaactcaggagtagaacagaagcttaacatgtggggagactctggattctaaaaccatccaccaaagtatatcttaagttgaagaaatgagaagcctttcccagtgtgtcatgggtactttctctgtcttttcatttacagggttgttagaggaatgtttcattgtatatgttgtgccttttgacttgtgtggtagctaggaaataactctcaggcttctgtctgctgggcaggagttgggtttgctcgaaaggcctctgcagatgtctgacgatcacctaggaccttagtggagctttttctctcctgttgatcttggtttttactagaaaaagttgccaagttccgcgagaaatgcatgctgtaccagtgacagtgcactgccctctcctaactcagtggaagccgttcagatggttcctggtaacctgggacgtcccgacaactcccgggaatgtcatcgtgggcttgggttagctcagaatcaaagcagctttccacagggtcctgcccccatggggagtccctggtgggaagtggggtggtgctgcactcactgtgaggcaaagtcctgttgttgagtttaaaacatcttcactataggacactgaacatttaagggaactttttcttaaggcagagtctcacccctatgtgacactggttcccctggaattaagagctccacttgcctctgccttctaattactggagttaaaggtgtgtggaccatagctcggtttgggggtggggccgggtctcatcacaggtattcctgcagctgtgataagaatgtcacatcctgctccttccatagcattctgcatgggggtccatgaacgcctggccctccctgtagccgtggccccaaacccttccctgttgagataatggaggttttccaatgggtcctgttttctccaactggaccctgggttcatttctaaaaaatcttcaaccatccttaatatgttagacctctctcctattcagaaatggccagtgccccatgcagccccacctaactctacctctgctcctgcccctgcctcacctgttctccctcctgtgttatttagaccagctaatctcctaggagttgatctctgggcctgaagcccattctctctgtcaccatcaggacatttacttgagacaaatactattgattcttcccttaatggattttttttttaagcacaagttgcctctaaggtctattcacagacagcttttccttgacccttgaccctgaggttcctggctgcctttcacttcctcatccatcccccagcctccaagcaatggtagctccagagctcagtcctctacttctaagtatgccccgcccctgcccttgggtaatttctctgtggggcactaacaggatgctgaagcatatctctgtaagaaactgttgttcatttaacaccagccatgtgtgtcttcctgtgtttcagtctgtcctatctccttcatcctcaccctccacccccaaccctgctcacacagccaaacactcctgcacgttccctgatgcctctgcttgaagtcactgccaggtgatctcatcttttccagggctttaaatatctgtattttaaagactgcaaaatatggctgcctgcttagagcgctcctgcctgcaggcctgagcagtgtggcctgctttgctttggctgtgccctaattgcctcagtcctgacttgtcctttaggtctcctctctgagtcacaatgaccttaatcaatggcagcttcattctacccatttcctggttgcccgtgattagtctgtgccccatcccctgtctagactgtcttttatctccatgggctgaagctttagttcagtggtggggcgctctgggttcactccccagtaccttacaacagaatgtggtcgtgtccccctggaatggcagtacttaggatatggggcaggaaggtcaggacgagtgtgtgtggcctcttccttctccttccaagtcaccattctgcattaccctcattgttgcagcagcatactcgtagtctccaccctcaccagtgcacatagccaagggatgccccttctcacacaaaggcttggtatcctagcgggcatgtccacttttctgcccttagcttcccaaccccctgacccctcagtctactnnnnnnnnnnnnnnnnnnnnccccccctccagcaacctctccccctccagctactcccccactggcctttcccacttcctctttgcattcacggcccctcttcccacagtgctgtttacccagactgaaaacctggctggggcttgctgaccccaacatcattcttgacctgactccccaattccttgtcagcctttttgtgtgtctattcaaggggtgtgatactttattaagcaaagtctccaacagagttgggagtctctctgagccattgctgtgcttcagtcccatgcctaaggactccataagagtgcggagatacagctcagcatagcctctagcaccctgaggtgttgtcttcccactaagatacctgtgctgggggaggggagccagagccttggctgctgtgaaggaagaattcaagaccagctatccagaagcaaagccagtaaggttttaagataaaggactttatctacatccttcaggttaagcaaagtcagtaaggttttaagataaaggactttatctacatccttcagtttaagcccaagcgttttgagagaggggctctcttaggtgattttctattttcagttgtgagcctttaatcttagatgctttcaaaatggagatttcatgtgtgtgtctgtgtgtgcatttctgtgacttaaattacagtgctataatttgcaaggagtaaagtttagtatttaaaattgaaataaaatatatgaatgaagggctggagagaggactcaggtttgtttcccagcagctgcatcccaattccaggagatctgacagccctctctggcctccttgggtaccaggcatgcacctggtactaacatacatgtaggcaaaacaaaacactcatacacatgaaaaataagatctatgtatatacatgcgtgcacacgtgcacaaggactggtttgcttatttcttatcctaaaagaattttgttgtgtaaatgtaattttaacgtgactttatgaggttcactgcttaactgtaagggtgagtgtcttagtcagggtttctattcctgcacaaacatcagaccaagaagcaattagggaggaaagggtttattcagcttacacttccatactgttgtacatcaccaaggaagtcaggactggaactcaagcaggtcaggaagcaggagccgatgcagaggccatagagggatgttctttactggcttgcctcccctggcttgctcagcctgctctcttatagaaccaagactaccagcccagagatggtcccacccacaaggggcctttcccccttgatcactaattgagaaaatgccccacagttgtatctcatggagacatttcctcaactgaagctcctttctctgtgatagctccagctgtgtcaagttgacacaaaactagacagtacagtgagagaagttgtgaacacagttaaactcaaggtagcccacactctgaacgtaagcaaacagttggttgttcttacatttttgagatgtcttttgtccagagcactaatgtctatagaaaattgtgtttaatcggttgtgttaaagtttcagcctgtccatctgtcttgcctcagaccaagcctgcataatatctgcaagggaaagatgggatactcagactcacactgaggccattgaggcctggctgttcctgggcccttcctggtgcagcttcctctcaataggctcattcttagcccaggagaagtgggcagctcaccagcccactgcagagtctccaccaggcacggagtgcagcagcagcccagagggaacttgctgggctgtagctgccattccagctgtttgcccttcccctggggggtggggctgaagccaggcggggtggcacccagttgtaatcccactgctgaggtagtggtgacagtgagacccttcaggcttgctggccagttagcggtgtctacttgacattttccaggcgggtgagaaaaactgtaaaagagaaaaaaaaagtttggggtcgggggacccaagaacaagacccaaggattttctctggcctcgacatgcatacctacatgcataacagtagcaaaattacagttaagaaataacaatgaaagtaatgtcgtggttggggcaccacacatgaggagctgtattaaagggagggccacagccctgggaaggttgaggacgactggtctaattcatcctcccaggaactaaccctgcctgttatcgatgcgaacactgatgctcagaggggtcagccatgggccaggactgggtgtaacttagtggtagagcctgtgtttagcatgggccagctgggtgtaacccaaaggtgtcaaggccatcagaggacccgtcctggaaggagcaagcatgagctgtgtggtcagtgtgctggtgtggccattacctctgtttcagagtgcactggcctgtcaccctctgcaactgtaagccggccatgtttttccttcacacttggccaagtgttctgagtagccggctggtactgagatttctttggcaactgtttgatgtttcccaggatcagcagcaggcccggcagtctcagcttgctcaggacgagcgtgtttcccgttcttatcttgccctggcaactgaaaccgtggacatgttccatctcctcaccaagcaagtccagaagccgttcctgaggccagtgagtagaaactggggtgcttgtgtgatctttaagggtctgggtacagaacttataactcagcgcatgttcattttacctacagcaaccagggagtagaattcttttttttcttcctttggtttttcaagacagggtttctctgtatagccttggctgtcctggaactcactctgtagaccaggctgacctcaaactcagaaatccacctgcctctgcctcccgagtgctgggattaaaggcacgcaccaccacgcccggctgtgaatagaattctgattttgttcccagttggtccacatcacatggtactctacagggctgaaatgaagccccttaacgtatactctaaaatgttcacttcaagattgctctcttctgattacacagcacatttggatcaggatttgtgacacaatttcattgttactgaattacctgtttatatatcagaaaagtataaggtaacacattatgatttggaggacattaagtagagtaataggtaaaagatgcttgctgcttataaaagagctttgaggcaacattgagggagctgggggctcctgagaactgtgactgaggcttactgtgacctgatggctgaaactcctggcccagtcctgttccgaggttgagagtgggcagtgtaatggagaccccaccccagtaaagagctgaggtacctgtggggtggcagtgcgcagggagctgaggtccatctgcagctgtctgcacatgtgcagctttactgtgtattcctctccttctctgtgcttcctcactgctctgtgacaggaatcactgtgttgcctccagcagggccactgtcacacgggggcctgtctacagactgagatctgggtcttttcctgtttcttgataagcagatgtcagcatagcagcagatgcgagcgagcgggaagcagctcaccgtggtccacattcctgctcccttagggatgtgtaaaggggatttgctagcatctcctaccaaggctgagagagcagccggttaaaggtgttggagatgtgtctcaggcacctgctcagctgtgctcctgtgatagcctggacatagacaagcctgactgttttccaaaagagtgaccacattcaaatacaactttatgtgtgggtgtgttagggacggtatatgctatgtgcttgccagcgcctttggcggtcagaagagagctttagactccctggagctggatttgcctactcttaggagcgcactgatattggtgctgggaaccaaagtgtgtgtcctctggaagagaagcacgttttcttaaaagccaagccatctcttcagcccgcctgcatttctgccctccttccttgctcgcttaagcactttttcagcccccagctttccaacactgggctaaaaccatgatttctacaacaggaagctcaggagatttttttgtatgaacccagtcactgcatgaggacctcattagttaaggaatctttttgctggtcagtatttaatgtctggtctacagcagctgtctctgagctcagaagccatgtttgtcccagctgcagcaggtactgttggcctgccgactcttgagggctatttgtccttaatattctgtcagtttaattcatcacagtggcaagacgtacgccgttgacaaatgtcaccgtcttctctctcttcagtaagtagattagaacaacacgtgcctgactgttggggacttgagaagtttatggggaaatgtggacatgaggcttcccagccacagtgacaggacagcgagggcctctgtcctctccctgcttctcagtgactttggagtgatgctctaagagaaagtgtctctttccagaagacttctgtgggcgttcatctctatgcaatcagaccactccattataggggttttcagatcaatggcgggggagatgtttgattccaatgctttctctagctttgtgctgcagctcagcacaattcaggggtgctttgcagattgagcagcccattcccactggggtaggagcttctgggcctggactttgcagcagcttggaccgtcctgttgtccttcatttcctaggagcttggtccccgattagcagccatgctgaactttaacctgcagcagctctgcggacccaagtgccgggacctgaaagttgaaaacccagagaagtatggttttgagccaaagaagctgttggaccaactgacagatatttatttacaattggactgtgctcgctttgctaaagccatcgccgatgaccaggtgagcactgaggaggcccatctcatcaggaggcctggcactgagccgtgtggttggcatctgtggtctgcaccttcacagcagaccttgtgcgtgtgtgtgttgtcgtccccctccaccctgtgcgtgtgtgtgtgtgtgtgtgtgtgtgtgtgtactccacacctcaaaagaggtaaaagcaggaattttaaagtctcgttttcagaagttgttaatgcagtgaacatgaagtcgaggaccacagctggtccaggagaagaactgatgcttccttgggagaatagagcagagctggccccctaatccctcagacccccaaacagattctgtttccaaactctgtttgctgtgtcaggaaattgcaggtcttcccaagcgccctgcttaccagctgccatgaatacatggccttcaagccaacgcctgcctcctctcctttatccaagagccttgggggtcaggtcagctcatgtaccacagcctccagtacaggccttccctctgtgatgtcacagaaggggatcctgttgactgtcctggtggcacaagcctgtatcccaaatactcagggggctggaaacaggttggtcacaagttcaaggctaacctggacttaactgagaccatccatgaaaacaaaattgagctaggagtatagttcagcggtagagcacctgaacttgcaaagttctaggctcaacccttagtccagccggagacttttgcagagaaaagggaaagggttcctcccctccatggtctctgagcatctttcttcccaggtcttttgccataatgtctcgtgtagactaggctagcctttgaactcctgatctcaaactctcctcttgagtacattgatgtgtgctaccatgcctgacatctgggcagctctgcagcacagtaatgcttcgtgtttactgtataccgctctgaccactcatttgataagcatgaattctatggcacagcttctactaaaccctttgttttaaagtaaggaacacagggcacagaggagcttagtggcgtgtccaggctcagaaagtatggtatagagggagaatgtgtgactggcagtcaaaccctgtacccatattctcaccatctccctaaatgttcagagtgtggtatattgcttcccatgtcactatctttgtatgcacagcatatgttacccatcctcagaactctccaaaggtcactgcctatagctaattcaaaggagcaatgttaaaacacaagagttgtatatatactcttgttttcttagtttggtttggtttggttttttttttttttttgagacaggctagccttgaacccaggatcctttagtgtcagcctcccaagtgctagaatcgcaggtatgtgttgatcatacactgccttttttttttttttaagatttatttattatttgtaagtatactgtagctgtcttcagacaccccagaagagggtgccagatcttgttatgaatggttgtgagccaccatgtggtttccgggaattgaactcaggacctttggaagagcagtcagtgctcttaaccactgagccatctttccagcccatacactgtcttttcaactacaactttatcgcacaattattaatgtatcgatgcttcttgttgtttcttactgtttgggacactgtctcgctgtgtagccggccggctgcctccccagtgctggggttccaggcgtggacaggggagtggagcggggatatgcagaggaagcaggcctgtgtggttatttagaaatggaagctttaaaatgcagtgctcgggggaaagggacaggcagacttttgaattcagtgccagcctggtctacataaaacgttccaagccaaccagggctccatactgagattgtcgctcattaaaaagaaggcagatggattaaggagtttcccccactgctggaaagagatgagtctgtgtaggtgtcagtgtagatcctgctcacaaggtcacaagatgagcagcagactcggcagaggcctcacagtgaaacagaagctcctgcaggccctgtcgctggccccttgctctcacactggggagcagagggggaccctgccatcctgctcctcctctgaatctcacgtgcagtctcacaggccggagagggaacggcagcattggaaggtggagtcttcacgtaagcaaattcatggacattggtttacttgatggttttggtttgtgttctgttgttgctggtgtgattagagactgtggttgtgtccctgggccccaggagacccattctcctttgtatcttggcctaagtcagcaagtgggcactgtgaagcacgagtgctgtgtgttttgtggtgtgggtgattgttacacagtagatccctcagagctgagtcgctgaccacgtcacacctgaggaatctagtttgggcaggttagggatttacatgagactacatgactgggggctggagagatggctcagcaggtaagagcgctgactgcttttctgaaggtcctgagttcaaaccccagcaacatggtggctcacagccatccataatgcgatctgatgccctcttctggtgtgtctgaaaacagctacggtgtacttacatagtaaataaatctttggggttttttttgtttgttggttggtttttttggttttttgagacagggtttctctgtatagccctagcagtcctggaactcactttgtagaccaggctggccttgaactcagaaatctgcctgcctctgcctcccggagtgctgggattaaaggcgtatgccaccacgcccggctcaataaataaatctttaaaaaaaaaaaagaaggaaggaagaaaagaaaaagaaaataaaaaaagactgtataactgggaggtaatgggacctgaatttgtgtctaggtttgtctgggtgtgttgtccactgttcgcatttctacaaatgatgtcagtcacctgcttataggaggggttcagtgctgtgggaaatgtggcattaggaagtgttggtttcagtgagtgacgatgctcagctgttgcctggtgatttggcttactgtgctctgttgagtatggcctcaccatgtagcctgcgctaggagggaaggaaggagtacacgtgtgacggccaccatgcccactcatgtgagcctagggaaccagcggtgactagagcaaagctcccctctaagtatggacagtaatgggccagtgacctatgcttggttcgcatctgtgctcacccttatgtaaaaaagcagaatttagtcatgtgctcccaggacacagtggctgacacaaacaaataacctcaatctcctctttataacaaatgcttgctagctcctaaagttaaaaacttccggtttctctgggtcctggagctttctccacaggtgaccttggcacacgtgagtctgtctctgtgcagatgtctgtaactatatccagtgcccccttgcccacggtacagtgtataggagaagatgggatgcagaatgtatggtcacagtcattaggagccaaggatctcgcagactgcacttggccgtttctgatgtgttttcttctcaagtgtattctcatcttacgtgaccttccttgtgtgcagcgatcctacagcaaggaactgtttgaagaagtcatttcaaagatgcggaaggcgggaatcaaatccaccatcgcaatagagaagtttaaacttcttgcagagaaagtggaggaaatcgtggcaaagaatgcgcgggcagaaatagactacagcgatgccccggacgagttcagaggcaagtccgcatgctcatgcagtgtaacttggagtgtgtggcattaagggtgctttcttggtcactgtttcattcctgtgaagctattccacaatcaaggcaacagtttgagagggtgcatgcacgatcaggatagcagggccatggcgacaggcaggcaggtgtgggtctgagagctcacatgcagacccaggcagggaggcaagctgccagagagtgcaagtaggcttggtgtggaaaccttagagtccacttccagtgacaaatctccatcaagaccacagccattccaacaaggccatacctcctaatccttttgaaactggtctgttaactggggaccacgaattcaaacatttgagcctctggcgagtcgttctcatctagatcaccacaagggtggccgctggctctgcttcttgattgtctgatgctatagctgattcttgagatttgtcgaaaattatgcgtacaaattgtagtgaatattgtagattaaaatgttgaacatccgaggctggagagatggctcagtggttaagagcactgactgctcatccaaaagtcctgagttcaattcccagcacccacatggtggctcacaaacatccaaaatggagtctggcaccctctgctggtgtgtctgaggacagcagcagtgtccgtcctacattgaccatccccagtgcggtttcatcaggtacccaggaagactttaaaggcagctctgccactatcaggaaggagtctggattctaaggcaaagggttctgccctgggcctgctgcctggctgtcctctttgctcttttctcctcccagcagcagtgacagaaggcagggcaaggccttcatcatttgctgccttcctttactgaggggcttgaggggctgctcgctccacagctctccctgagactgtctcgctggtaggaaccatctgcttttgttcttgagggttagtgtgttctgctctgtctccacagaccctctgatggacaccctgatgaccgatcccgtgagactgccctctggcaccgtcatggaccgttctatcatcctgcggcatctgctcaactcccccaccgaccccttcaaccgccagatgctgactgagagcatgctggagccaggtaggaggccagtgagtgcagccagaccgtgcgggagactgagagctggccggtgccgcgaggcctgtagtcccagctaccggggtggatgaagcagaaggggagagcctgttcatggcaagtaagttccgacagtgtaattacaacactgtctcaaacaaaaaggaaaagatggctgggcctgcacagagcccttgcccaactgtgtacattcccaggctcagtccccagcaccaccaccaggaaaagggacattggatccagaaagtacccaaaagccacagagcactccgctcactttggctgtaaatgtttccctgtccatggctgttccttctgcagtcttcagcgcccacagggagtgagcaccgtggactctgtgtccacgcagatagaactgcagtggaagagcctgtcatccgggtcattcatcccctgtgctttctccctcagtgccagagctaaaggagcagattcaggcctggatgagagagaaacagagcagtgaccactgaggccccatcgctcctccgctggaagccgccacgccagccagccaggccgcagcagcatctgcctcgaggctgcagctccagcctgtaaccagatgtggccagatcctgagagcccacccgtgtgaccaaacagtggagatctgaggggatgacgagaagaggattcctgtacatatatttaagtgacaacagtcaaagcttgagggacgagtttacgatggcttgtgtagtaaagcgcacccttcgcctgtcgctacctggggctgtggcagcggaagtgtttagtgacaagtgggtctgggcagcttcccctgagcttacgttttgttttgttttgttttttcgatgtgaatagagaactcggacattttgctgctaaacaatctcccctccctcaccctacttgcactgctgtgggttttttaaagagaaacagaaccagactcctttcccggccctccaaacatgtattctgtgcgataactgtgcctgcgacaagtgttaatcttgggatcgtatttttatatcatattcacatacttgtttttttaattggtgttagatgacatgattaataaaaaaggcaagatattttcagaatttgaatttcagtttttttttcttttgaaatagcccttttaaatttttttattataaacaaaatgaagagaaccctgtgagcctggtccttctagcaaccctcagttaagatcctgagggacaggtgcagcagcagctggctggagtggatcaggactcctgtgactcgtggggctcgggggaggtgaggggtgtgtttggttttttgttgttttgttgttttgttttaatcctatgtgacaattccaactatgcggttaccctctgaggataagttcctcagcccggggttcttttatatgctgtgtccttttggggtttgaccttaccaaagcaaagaaacaaaaaacaaaaaaacaaaaaaaaaaagggtgcaagaaatgtggaaatctgtctgcttgtttacatggcccgacgacaccacctaggcgcacgcgagcagaagccctctctgtattaccgctccctacgcaacatacttgaattcttgagttccctttggggtgagaaaggatttgaaaccataaagtgttttaaagaaatgaactcttcagaaacagacttcctcctcttttcctttctcctctgctccacagcctgtgctctgttcagttcccaacacaatcgacaataaacggtgatgcccattcggaaggagcctcctgtgagtcgtctttttgttgaaagaaatgggtggggaaggctggcatggtggcgcacacccttaaccccagaactctcaagaagaggcagatggatctctgagtttgaggtcggcctggtctacatagagagttccaggtcaacctggcacacataacaggatcctgtctttataatgtaatatatatgtataaatatgtatatatgtgtgtgtgtatatataaacatatatatacacacacatgtatatatatgtgtatgtggatggatggatgaatggatagatagatagatagatagatagatagatagatagatagatagatagatagatagatagatagatagatagatagatgatagatagatagataaaacagggccaaagagatagttacaagagcagagagggaccccggtttagttcccaacacccatagcttgcaactgcctggaagtccagatccaggggcctagacatctgtctcccatgacactgggcacacaaatgatgcacgtgcatatacacaaagcatttatacacataaaggacgaaggtccaacaagagcaggtgtctgaagaaatgttctttctggagccaattagaaatagccttcctttaaaataaagcacagcgggccattgagacggttcaggggataaaggggcttgctgcgctcattcctcttggaaggagagcacagacaagttatcctccgtccgctacacaggctgtagcacactggcatcatatgtatggtaagtaagcagatgtgtgaatttaaagctttctcatccccgtcgtccacatccctgatgtgccacgctgttctcgcttcacttctggcgtgaagggactccgctgtgtcctctgctctctgcctggctcttgatgttaccttggagatctcaagtggccatgactcctactcaggtcccacccacttcattaccactccagtttgcaaagtgatttctaccagcacaggcgctaataatgccagctcagctatgggaagcacttaggtgccacttctgtgtgccaggctgtgcaaaagcctcatctttatagtgccaacctcaggagagacagtactgctgtgtttctgcttggttttgctgccatggtcttcaggaggtcaggctgcgggctgcagagagattcggtagcttgcccattgtctcctggcaagtacatggctctcaggcccgtgaggtccatttccttatgagttcttttctttcttccttcctttctttctttttttttaagatttatttatttattatatgtaagtacactgtagctgtcttcagacattccagaagagagcatcagatctcattacggatggttgtgagccaccatgtggtagctgggatttgaactcagggcctccagaagagcagtcagtgctgagccatctctccagcccatgagttcttttcttgaacacattgagctcaccatcccctgccacctcagccccaagtacacaatctgggctaggatgtagctcagttggtaggaacatctgcctagcatgcaggaagctctggggcaatccccaggattgattgtttgaagatagggtttctctatgtagctctagctgtcctcaaactagctctgtagaccaggctggcctcgaactcacagagacctggtgcctctcccttctgactgctgggattaatccccgtatcttaaagatgatcatcatcatgatcatgacaagacacaaaaaggaaattactgacgattccaccattgaggtgattctggtcagtttactttttacaagcgttttacccacaagcctatgaagttaatgatgttaattaattagaagcatgcctaacgcttactggtttcacaattgtgggttgctaatctctccatccctaagaggtgctgtttctgtcccgtcagtggacagctgctgcttcccgtgggattttcagaattgaagggtttcaagagtggacttatggaaagagggtggggcaaggatgcagccaatctctttgcctctaggggcgtggtttgaatttttctttgattcttagagtagctgtttcgtggaaatttattgtttgcctccagcctgctaattagaggtgatgggatccagaatatttcaaaaataagtctggtttagaaggaagattgtcggactgaagagatggctcagtggttaagagcactggctgctcttccagaggtcctgagttcaactcatgatggctcacaaccatctataatgggatccgatgcccttttgtaatgtgtcagcaacaccttactcatatacataaaatgaacagatttttaaaaattgtccgaaaaggagaacttgtatgttctcagcagaaggaaagtccttgagaaaggaacgagaatgacatcatgctcattttctgagtcactgctgaatgggtaatgacagggattgggcacagtgcctcttctctgtctgtctaggcagtgctgaaggtccaactcaggacacgtacatgctaggccggcacttgacatccaactaggcaacatccctggcctttagaacagcctttgaaccatgagtgtcttacgcggtttgctttgcacttggcacattgaacggtgagttgccagctgtttcagttgtgcctttggtgtgacctaggcatggtctaagtttttttaaaagatgcatctgcttttattttatatatatgggtactgcctgcaccacatgtgtgcagtgcacatatgagtcagaagagggcgttgggtgccctggaactggaattacggtgtttgtgagctgggtattggatatggcaccaaggttctctgtaagaggagcatgtgctgccagagctctagccctttcagaagctttttttcattgtggaaacatgagcacagtattgtgtgagccagccttaggctataggaactcatctgggacagatggttagtgattcccatttcttgaatatgttcagggtgcgatcactcttacgtgtagtcataactcgtttaatcctcaacagccagagttaggagacggtgtagtgaaactgagccatgaatctagggcttctggcttcgccttgtgttaccaccattcctgctgcatggcaagatcgttcagaatagtcaatattcagaatagtcaggggctgcagagatggctcatcggttaagagcactgactgctcttccagaggtcctgagttcaaatcccagcaaccacatggtggctcacaaccatctgtaatgggatcccatgccctcttctggtgtctcaagataacgacagtgtacacacatacataaatagttcagaatgcaggatgaaatagaaagcagtgcattatgggagggccttcggccttgatgccagcccaatataatgatctctttttgttctttggggtttttttgtttttcttttcttttttttttttttaaagatttatttattgattatatgtaagtacactgtagctgtcttcagacactccagaagagggcgtcagatctcgttacggatggctgtgagccaccatgtggttgctgggatttgaactccggacctttggaagaacagtcgggtgctcttacccactgagccatctcaccagcccccttgtttttcttttaagatttatttatttattttatgtatatgagtatgccggagctgtcttcaaacacaccagaagagggcatcaggtcccattacagatggttgtgagccaccatgtggttgctgggaattgaactcaggacctctggaaaagcagtcagtgctcttaaccgatgaaccatctctctagccctttttgtttgtttttgagatagagttttactctatagcacaagctggcctggaactcactatgtagcccaggtcaaccacttgactacttctcattgcctgtggaaaaatcttaagaagggctaagagatgctcaaaggttaagaaacatcatgtgctttacagggtcaaggcggctgagtgagccaggctctgggttgacaaaaaatactcagagatgcttcatacagacccccagattcttaatactactagcaataagcattcttagcctctgagctacctctccatctcctctgctttattctttacagccacacgcggtcttaacacgaagcttttcctatcctgagatggaaccatgggtggtgccacccacctgacttggtgttcagggtcttcttgttggttttgtttgagatggttttgtgtcatccttgttggcctcaaactcactgtgcagctgggaatgacctcgttgtcttctgctccatcccaggtgttagaatcgcaggcgtgtgccagcacatcggctctgtggtgctgcaggtcaaaccctgggctgctcgtacgccaagctggtgctctgccagcagagccacaactcaagcctccccttctcaccgctattcttagaaaagaggataagccgagcgcatttgtgatgctcctaaaataatccaggagatagtcaactgcgcaggactcggatcaaagcaagtgcagtgaacccgggggaggggagaggctggactctggaataggtcgagttccgtgattgaggtttgggaatagattagaggaagtgcagccgtagtcaagtagacaggccacgtgacttcaaaggacatcgaggacaatgttggggatactgagtggagcggcttggggtgaagtgtaaagatttcaggcttgacatagatatctgtctgtagtataagagaagtctggactggcgacataaatatggggcttatggttcctggtatgactgaaagctgtcagactggaggcatctgagcactttaaatcagtgtggtaggctaacatggtagcaacagcgaagtcccaacatgtcatcacggatgtaggaggattgcgacttcaaggtcacctttggctacatagcgcacacaagatgagaccagcctaggttacatggaaaaactgtaaaaaataaataaaccaataaataaaataagcattagaagccaagcactgaagggcttaggcctggaatctcagatattaggtagaggccagagagtcaggcattcaagggcagtctccacctcataagaactctggggctgtcttgggctacctgagacccaaacccacacaaaacaattttcaatgcccctgtctctgccagcttctcggtcccaggccagtgtctgctgtgatagggttcattttctagttctaagcacctagcccttgttcttaagcagatcacctaaagcctgtgggttaaaccagaaactgtgctttttatcatcgtaaatcgtggtgtggcttgaccgagctcaggggttttgaggctgactgagggaacttacatgttcgtggtctaattgtggctggggctaagctgtcctgaaggtctccacatctggttcttgcctagcacatctgcagtgacctctaagacctccatctgttgcagacacaggtggtgtggctttcaaagattgggaatacaaacccgtttctcaatgggaggagtgccgatgtcataggttaaaaatagcctaagaaatagaaagagatctttctttgttttgatttgtgtttagtttgggtaatggggtaaagcccaaggccccacaaatactaagcaagggatctggtactctaagccactcctttattttgtcataaagaaacacgagcaaggaccttgctccagtcatttccaaagcccctgggatcccagggccagtggaggatttgtgatattgctggtttccagcagagtctcaaaatcttctgaccttttgtatcgtgtatcgctttgtagtggtttaaattattcatgctgttttgttgaaagctaagcatgttggccactgagggaaggggaggaagtggaaggcacagtgcattgtgggaggttagaggctcttcggcattgcgatagcttaagactcttggtgaaggggtgtgtgtgtgtgtgtgtgtgtgtgtgtgtgtatgttgatcagacacaagacagacagagatggttgtttatcagtacttctctgtttacctagtctctgtttacctgtttgtttgttggtttgtttgttaagatatatggagtcattatgtagccatggccagtctataatttgccatgtagcccagactggtcttgaattcacagagctctgcctgcttctgtctctcggttgctaggattaaaggcacgcaccgtgatgtcctgctttctcttttctatgtgtctgtatgtatcatgtacagccatgtacatgcacacatgcatgtctccatgtatacgtgggtgcatgtgatctgcctgcctctgcctccctgttgctgggattaaaggtgtacaccaccaagcccagcacaagtatcatttagatggttctccaccttatttattgaagtgggttctcttcacgggacacaaggcttgccagtatggtctgtctagctagcttgcttcaggatcccctgtctctatcttaggagcctaggaattacagccagcgcacccataattgttattactaaatttctagtatacaaaatactggatttcattatgacattttcaaatatatgtaacacatatgttcgtatgcacaccctccctgtctgtacatttatacagacctgtgcgttttatttctctacctttctgctccttataacaagacacccataacgtctcggagatgggaggaaattgctgatgaaatggccttctaatcttcttaaacctaaaggtcttgcacagaaaacacattattgataagaatgcggagctaatttctagctactgcagagttggctgcttatatgaatggtgcagcccacctttgaaaatattctctgtcttagttacttttcaactgccaagaaagacaccatgaccaatggaacctataaaagaaagcatttaattggaggcttgcttacagtttcagagcattagtccttaaccatcatggctgggaatgtggcggcaggcaggcaggcgggcaggtaggcgggcaggcaccggagcagtaacggagagctcacatctgattcacaagaactgagacaaagaaaaatggcgtggacttttgaaacctcaaatctgatccaccctcagtgatacacctcctccaataaggtcacacctcatgatccttcccaaacaatttcatccactatgtaggagccaagagttcaaatatatgagccaatagggggcgctattctcactcaaaccaccactccctgtcttgcaggctctgcattatggggccttgcataccacctcgaagactaaggccatgcggaaaccacatctctagagcataagatataatttgctaaacacatgaaactcaagaagaatgaagactgaagtgtggacactatgcccctccttagatttgggaacaaaacacccatggaaggagttacagagacaaagtttggagctgagataaaaggatggaccatgtagagactgccatatccagggatccaccccataatcagcatccaaacgctgacaccattgcatacactagcaagattttattgaaaggacccagatgtagctgtctcttgtgagactatgccggggcctagcaaacacagaagtggatgctcacagtcagctaatggatggatcatagggctcccaatggaggagctagagaaagtagccaaggagctaaagggatctgcaaccctataggtggaacaacattatgaactaaccagtaccccggagctcttgactctagctgcatatatatcaaaagatggcctagtcggccatcactggaaagagaggcccattggacttgcaaactttatatgccccagtacaggggaacaccagggccaaaaagggggagtgggtgggcaggggagtgggggtgggtggatatgggggacttttggtatagcattggaaatgtaaatgagttaaatacctaataaaaaatggaaaaaaaaaaaagaactctgaagaacatcctcctatagttacactttatcttaaaactttgcagatattgtcatggcgaaattaaaaaaaaaaaaaaaaaggttgaaaaggagatcagaagaacaaaggcaatgttgttgaaaataagaccaaagctcatcaagacagtgataagtatgaaggatgaggggctggggtgtttcttggaggggaaagagcttgcctaggcatgcatgatgccctgggtaccattttggtgccagaagaaagagaaggggtagaggtgacagatgagagagagagagctagacagagagatagacagacagacagagagggggaatccacgtaaacagacaggcttaatggatattaataattaaaaaaatgtagattcagtcaaaagctagttaaggccgggtgcagtgttgcacacctgtaatgccagcactgggtggaggggtggggggtagatcaggagttagggtcatctacagacacataaccaagcagaggcaggcagatctctgagttcaaggccagcctggccacagactaagttccaggacagtcagagctacacagagaaaaccctgtctgaaaaaaacaactaattcactaactaactaatgaactaagtaacattacagagtgaggccctgtacacacacacacaaatacgtacacacacacaaacaaacaacaagtagcaaaatatgtgattgcacatctgtaatctcaaccttaagaggctgagacaaaatgattgtgagtttcagacctgcctggattacgtagcaagaccctgtgtcaaaagaaacaaatctagtttatttctatatcaggattgaattcaatcctagatcccaactttcctattagttggctttcttggcaacaggacagtcaatcggtttctttcagacctttgtgtttcttggtgcagtgctggggactgagcccagggcttggcctggcatggccagcctgccttctgcttctcaagcccagccctcatttttcttttgagtaagttaaggacagaattccaatggaagccaatgaaagaaaacaacccgtatgtaaagctgtgatggacagaggaggctgtgactgctgccaagtgcgctctttatctaggaactaaacacgacagccgcctacttcttacaaagtgcatcttcttgttaatgtgcacacgttcttggcggtgatgtggtggtgacctaattctgctgtaaagtgggtgacggagtgagcgtctaaagcagcaactctagtatttgcacaaaagagagtaaatttggcacctggctattgatggagtttggggttagattttcttctttcttggtttattgattgctcatttctgtttgtatgatgtttgttttgtgtataagaaatcctgcgctgtactcaagagcctgaggtggtgccctcagcttgaatcctggggtcacagcccctgttgattgtcacagtcaagaaatgatctttatgccaggcagtggttgctagtgtctgcctgccgggcgtggtggtgtacgcctttaatcccagcacttgggaggtagaggcaggtggatttctgagttcgaggccagcctggtctacagagtgagttccaggacagccagggctgtacagagaaaccctgtctcgaaaaaacaaacaaacaaacaaagatctttgtgttgacttcctgtgactgctgtaacagatgctcacagacctgagcatctgaacataatagaagtttattctacttggttctcgccccccccctacagtgtgtgtgtgtgtgtgtgtgtgtgtgtgtgtgtgtgtgtgtgnnnnnnnnnnnnnnnnnnnnnnnnnnnnnnnnnnnnnnnnnnnnnnnnnnnnnnnnnnnnnnnnnnnnnnnnnnnnnnnnnnnnnnnnnnnnnnnnnnnnccctggctgtcctggaactcactttgtagaccaggctggcct

SEQ ID NO: 88 - DNA, 5528 bp, Mus musculus
gggaagagggggtggggcagggggcggggacaggatgcaagcgaagaggaaatcggcggcgcgacgcccgctgcttattggctggcgaatcccagagcgagaagccccgcctccccggcgagggtcacgtgacccctttcaaagatggccgccctgttgttttgatgaataattcttggtggggcgagggggtaagagtagggttggaggggtaggaggatttacgcttccagcgagggcttcgccagtcccgtccctcccctgccccccaccggggttctcgcgtggaggcggggcgagcctggcctgcttttagaggggaggggcttcccggtccggtgctgggctctgcctgggctgctgtagggtcgccgcgcctcgggggcatccagtgtgcagtggagctgttcccgcctgggcccaggggtgggacccggagcagggtctgcgggagaaaaaaacgcagctgacgcgtcaccgccacgaagacacggcgcgcagcgggcacgagccgagctggagaccgcgccgcccgccctgggtaacctgggaagctgaggggagtcagtggcgcctggagaggaccccatagcggtggccgtggccagaggcggcagctctgggcgcttgctgctggaggaggctgcggcggtgcgagcggccgaagccaaggcgattcagtgcctcgtgttcttagtttttaacctctgactatgcaattctgaaacctcccccattgggggaccagacagcccgatagataccttccactcttcctttgctcccgccctggtctcaagaactgaaggatctctctaacgcctttcaccattaagaggaaagcgatggaggagctgagcgctgacgagattcgacggaggcgcctggcacgacttgctggtggacagacctcccagccgaccaccccgcttacatctccccagagggagaaccctccgggacctccaatagctgcatcagccccaggcccctcccagagtcttggtctcaatgtccacaacatgaccccagctacctcccccataggtgcagcaggagttgcccatcggagccagagcagcgaaggcgtcagttctctcagcagctcaccttccaacagccttgagacacagtctcagtccctctcccgttcccagagcatggatattgacggtgtctcctgtgagaaaagcatgtcccaggtggatgtggattcgggaattgagaatatggaggtggacgagaacgaccgaagagaaaaacggagcctgagtgacaaggagccttcttcaggtcctgaggtgtctgaagagcaagccttacagctggtctgtaagatcttccgtgtctcctggaaggaccgcgacagagatgtcatcttcctttcttctctctctgcgcagtttaaacagaacccaaaagaagtgttctctgattttaaggatctgattggccagattttaatggaagtactgatgatgtcaactcagacacgagatgaaaatccatttgccagtctgacagccacatcccagcccatcgccacggcagctcggtcaccagaccgcaatctcatgctgaacactggctccagttcaggaacaagccccatgttctgcaacatgggctccttcagcaccagctcgttgtctagtttgggagcctctggtggagcaagtaactgggattcgtacagtgaccatttcaccattgaaacctgcaaagagacggacatgctgaactacctcatcgagtgttttgaccgagttggaatagaggaaaaaaaagcaccaaagatgtgcagccagccagcagtcagccagcttctgagcaacatccgctcgcagtgcatctcccacaccgcactagtgctacaaggttccctcacacagcccaggtccttgcaacagccatccttcctcgtgccgtacatgctctgcaggaacctcccgtacggcttcattcaagagctggtgaggaccactcaccaggatgaagaggtgttcaagcagatctttatccccattttacaaggcctggcgctggctgccaaagagtgctccttggaaagcgactactttaagtaccccctcatggcactgggtgaactctgtgaaaccaagtttgggaagacacaccctatgtgcaatttggtcgcctctttacccctgtggttgccgaagtccttaagccctggttctgggcgggagctgcagagactctcctacttaggggccttctttagcttctcagtcttcgcagaggacgatgcaaaggtggttgagaaatacttctcagggcctgccattaccctggagaacacacgcgtggtcagccagtcactacagcattacctggagctgggacggcaagaacttttcaagattctacatagtattttgttaaacggcgaaactcgtgaagcggctctcagctacatggcggcccttgtcaatgccaacatgaagaaagcccagatgcaggcagatgatcggttggtgtctacagacgggtttatgctgaatctcctttgggtcctgcagcagctaagtacaaaaatcaagttagaaacagttgaccccacttacatattccacccaagatgtcggatcactctcccgaatgatgagacacggataaatgcaacgatggaggatgtgaatgagcggctgacagagctctatggtgatcagcctccattttctgagccaaaattccctacggaatgtttctttctcaccctgcatgctcatcacctctctattctgcctagttgtcgtcgctacattcgccgacttcgagccatccgcgagctcaatagaaactggtacggtgcaaggcctgtgctgacgctggcttacttgacgagagcttcctaagaagatgcctgaatttttatggccttctcattcagctgatgctgcgcatcctggaccctgcatatcctgacgtaacactgcctttgaattcagaagtccccaaggtatttgcagcattgcctgagttttatgtcgaagatgttgctgaatttttattttttattgtacaatactctcctcaggtgctttatgagccctgcactcaggacattgtcatgttcctcgttgtgatgctgtgcaaccagaactacatccgaaacccttacctagtggccaagctggtggaggtcatgttcatgaccaacccttctgtccagccgagaactcagaagttctttgagatgattgagaaccatcctctctctaccaaactgctggtgccgtccctcatgaagttctatacagatgtcgagcatactggagccaccagcgagttctatgacaagttcacaattcgctatcacattagcactatttttaaaagcctttggcaaaacatagctcaccatggcaccttcatggaggagttcaattctggaaagcagttcgttcggtatatcaatatgctaataaatgacacgacctttttactggacgaaagtctggagtctctgaagcggatccatgaagtgcaagaagagatgaagaacaaagaacagtgggaccagctgcctcgggatcagcagcaggcccggcagtctcagcttgctcaggacgagcgtgtttcccgttcttatcttgccctggcaactgaaaccgtggacatgttccatctcctcaccaagcaagtccagaagccgttcctgaggccagagcttggtccccgattagcagccatgctgaactttaacctgcagcagctctgcggacccaagtgccgggacctgaaagttgaaaacccagagaagtatggttttgagccaaagaagctgttggaccaactgacagatatttatttacaattggactgtgctcgctttgctaaagccatcgccgatgaccagcgatcctacagcaaggaactgtttgaagaagtcatttcaaagatgcggaaggcgggaatcaaatccaccatcgcaatagagaagtttaaacttcttgcagagaaagtggaggaaatcgtggcaaagaatgcgcgggcagaaatagactacagcgatgccccggacgagttcagaggcaaaccctctgatggacaccctgatgaccgatcccgtgagactgccctctggcaccgtcatggaccgttctatcatcctgcggcatctgctcaactcccccaccgaccccttcaaccgccagatgctgactgagagcatgctggagccagtgccagagctaaaggagcagattcaggcctggatgagagagaaacagagcagtgaccactgaggccccatcgctcctccgctggaagccgccacgccagccagccaggccgcagcagcatctgcctcgaggctgcagctccagcctgtaaccagatgtggccagatcctgagagcccacccgtgtgaccaaacagtggagatctgaggggatgacgagaagaggattcctgtacatatatttaagtgacaacagtcaaagcttgagggacgagtttacgatggcttgtgtagtaaagcgcacccttcgcctgtcgctacctggggctgtggcagcggaagtgtttagtgacaagtgggtctgggcagcttcccctgagcttacgttttgttttgttttgttttttcgatgtgaatagagaactcggacattttgctgctaaacaatctcccctccctcaccctacttgcactgctgtgggttttttaaagagaaacagaaccagactcctttcccggccctccaaacatgtattctgtgcgataactgtgcctgcgacaagtgttaatcttgggatcgtatttttatatcatattcacatacttgtttttttaattggtgttagatgacatgattaataaaaaaggcaagatattttcagaatttgaatttcagtttttttttcttttgaaatagcccttttaaatttttttattataaacaaaatgaagagaaccctgtgagcctggtccttctagcaaccctcagttaagatcctgagggacaggtgcagcagcagctggctggagtggatcaggactcctgtgactcgtggggctcgggggaggtgaggggtgtgtttggttttttgttgttttgttgttttgttttaatcctatgtgacaattccaactatgcggttaccctctgaggataagttcctcagcccggggttcttttatatgctgtgtccttttggggtttgaccttaccaaagcaaagaaacaaaaaacaaaaaaacaaaaaaaaaaagggtgcaagaaatgtggaaatctgtctgcttgtttacatggcccgacgacaccacctaggcgcacgcgagcagaagccctctctgtattaccgctccctacgcaacatacttgaattcttgagttccctttggggtgagaaaggatttgaaaccataaagtgttttaaagaaatgaactcttcagaaacagacttcctcctcttttcctttctcctctgctccacagcctgtgctctgttcagttcccaacacaatcgacaataaacggtgatgcccattcggaagga

SEQ ID NO: 89 - protein, 684 aa, Mus musculus
RISLTPFTIKRKAMEELSADEIRRRRLARLAGGQTSQPTTPLTSPQRENPPGPPIAASAPGPSQSLQVHNMTPATSPIGAAGVAHRSQSSEGVSSLSSSPSNSLETQSQSLSRSQSMDIDGVSCEKSMSQVDVDSGIENMEVDENDRREKRSLSDKEPSSGPEVSEEQALQLVCKIFRVSWKDRDRDVIFLSSLSAQFKQNPKEVFSDFKDLIGQILMEVLMMSTQTRDENPFASLTATSQPIATAARSPDRNLMLNTGSSSGTSPMFCNMGSFSTSSLSSLGASGGNWDSYSDHFTIETCKETDMLNYLIECFDRVGIEEKKAPKMCSQPAVSQLLSNIRSQCISHTALVLQGSLTQPRSLQQPSFLVPYMLCRNLPYGFIQELVRTTHQDEEVFKQIFIPILQGLAAKECSLESDYFKYPLMALGELCETKFGKTHPMCNLVASLPLWLPKSLSPGSGRELQRLSYLGAFFSFSVFAEDDAKVVEKYFSGPAITLENTRVVSQSLQHYLELGRQELFKILHSILLNGETREAALSYMAALVNANMKKAQMQADDRLVSTDGFMLNLLWVLQQLSTKIKLETVDPTYIFHPRCRITLPNDETRINATMEDVNERLTELYGDQPPFSEPKFPTECFFLTLHAHHLSILPSCRRYIRRLRAIRELNRNWYGARPVLTLAYLTRAS

SEQ ID NO: 90 - DNA, 168298 bp, Homo sapiens
tcttgtgccccagcctcccaagtagttgggattacaggcgcccgccaccacacctggctaattgttgtatttttagtagagatggggttttaccatgttgcccaggctgatctcaactcctttttttttgagacagagtctcgctctgttgcccaggctggagtatagtggcatgatctcggctcactgcaacctctgcctcccgggttcaagcgattctcttgccttggcctcctgagtagctgggactacgggcacatgccatcatgcccggctaatttttgcatttttagtagggacggggtttcaccatgtcggccaggatggtcttgatctcctgacctcgtgatctgtctgcctcagcctcccaaagtgctgggattacaggcgtgagccacctcacccagccaagttagtatgtgtttaaagatcacacttgtaatcctagcactttgggaggctgatgtaggaggatcacttgaagccaggggtttgagaccagcctgggcaacataaagattacaggcgtgagccactgagcctggacccttccctctcttaatctgttcaggctgctataacataatactgtaggctggctacagagtttttaaaattagtattttttttttttttgagacggagtcttgctctgttgcccaggctggagtgcagtggcgtgatctcggctcactgcaagctccacctcccaggttcacaccattctcctgcctcagcctcccgagtagctgggactacaggcgcctgccaccacgccgggctaatttttttattttagtagagacggggtttcaccatgttagccaggatggtctcgatctcctgacctcgtgatctgccggcctcggcctcccaaagtgctgggattacaggcgtgagccaccacgcccggcctaaaattagtatgttttttgttgtacttgtttttgtttttgttttttttttgaggcggagtttcactcttgttacccaggctggagtgcaatggcgtgatcttggttcaccacgacctctgcctcccgggttcaagcgattctcctgcctcagcctcctgagtagctgggactacaagcatgcaccaccatgcttggctaattttgtatttttagtagagacagagtttctccatattggtcaggctggtctcgaactcccgacatcacgtgatccacctgcctcaacctccaaaagtgctgggattacaggtgcgagccacctcgcctgaccaagttagtatgtgtttaaagatcacacttgtaatcccagcactttgggaggctgatgtaggaggatcgcttgaggccaggtgtttgagaccagcctgggcaacatagggagaccctgtctctacaaaaaatacaaaaattagttgggtgtgatggttcatgcctgtagtctcagctactcaggaagctgaggtgggaggattacttgggcccaggaggtcggggctgcagtgagccagtgaccatgccagtatactccagccctgattacagaacaaacccctatctcaaacaaacaaacaagtacataaatgaaagaaagtttgtgttcctaccacaggtgtgtccagtgagaagagtgtgatgttgcagatgagaggggataaatgctggaccaaagtccttgagaaggtgagagagaaaggagagaaaggaatccagagtccagatgaaggagttgatctctgatggcagccgagataacagcacatccttacggttgtaggtggctttgtagatctaagaagatcaggaagattgctggctctagttttgtagattatcaggaagattatcagaaaaacatatcttaacctggtgagctctctatgctctggcacttgaataaaagctatcctaaaatattacaaattctagaatttaccttcacaaaaactttttcattaactaggaggcttttttttttggatacggagtcttgctctgtcctccaggctggagtgcagtggcaccatctaggctaactgcaacctctgcctcccgagttcacgcgattctcctgcctcagcctcctgagtaactgggattacaggcgtgtgccaccacacccagctaatttttgtatttttagtggagacggggtttcaccatactggccaggctggtctggaactcctgacctcaggtgatctgcccggtgaggcataacttttatttcagtctcacatttcagtttgttctgtggtctcctcctttatttgttgctaggtaaaaaacatttttttttttttttttttgctggtttccaggtaattctaagaactaactaaggtcctgttgcttggtagttactaagggaggcagacagagtattttgcaccatccaaaggaggtaatgtaatgcttaaatggaagaaactgaaccaaacaacgaaaatatgggctatgtattacaaacaactctgacacactgttatttatgatattataggaaagcttctcccaaggaaagtggtggaaactccatcacttagacaagttagaacacaactgtaaaggtactaaaaagtgtattagagagattcatcctgtaaaagaccctgggggctgagtgtggtggctcatgcctgtaaccctaacactttgggagggtgaagcagaaggatcacttgagtccaggagtttgagaccagcctgagcaacatagtgagaccctatctctacaaaaattaaaaattagcctggcatggtggcatgcgcctataagcccagctacttgggaggctgaggtgggaaaattgcttgagcccaggaggtcgaggctacagtgtgccatgtttgcaccattgtactcaaggctgggaaacagggcaagaccctgtctcaaaaaacaaacaaacaaaaaattaccctgataagtacattatgtggctagagactttgtttccaatttttctctttttttttttgagttggagtctcactctgttgcccaggctggagtgcagtggtgcgatctcggctcactgcaacctctgcctcctgggttcaagcgattctcctgcctcagtctcctgagtagctgggactacaggcatgggccaccacacccagctaatttttttttttttttggagatggaatcttgctctgttgcctaggctggagtgcggtggtgcgatcttggctcactgcaacctccgcctcccaggttcaagtgattctcctgcctcagcctcccgagtagctgggattacaggcgcctgccaccacgcctggctaatttttgtatttttagtagaaatgggtttctttttttttttttttttgagacggaatctcgctctgtcgcccaggctggagtgcagtggcgcgatctcggctcactgcaagctccgcctcccgggttcaagcgattctctggcctcaacctccggagcagctgggactacaggcgcccgccactgcgctgggctaattttttggttttttagtagagacggggtttcaccatgttagccaggatggtctcaatctcctgacctcgtgatccacccacctctgcctcccaaaatgctgggattacaggcgtgagccaccgcgcccggccagaaacggggtctcaccatgttagccaggctgctcttgaactcctgacctcaggtgatctgcccgcctgggcctctcaaagtgctgggattacaggcgtgagccaccacgcccagctaatttttgtatttttagttcagggtttcaccatgttggccaggctggtcttgagctcctgacctcgtgatccgcccgccttggcctcccaaagtgttgggattacaggcatgagccaccatgcttggcctaatttttatatttttagcagagatggggtttcgccatgttgtccaggctggtcttgaactcctgacctcaagtgatctgcccacctcggcctcccaaagtgctgggattacacgtgtgaaccaccatgcctggtctctaatttttctgattctataaaattacattctatttgctgaaagagtactttagagttgaagaaaaagaaaaggagtggaattcccctgtaaacaggaaaaacatccatgtatttattggccttaaaatagtgaaacatcttgaaaaaaaatcaatcctatgtcagaaaatccatctatcagaataaaaggttgaatcattgataagctagacagaacatggaatttatggtgaacaaaattctgtggtataataatttttacaatatcactactcagcaaataaatgtacaacagtattttatcttgcattttcttgaatactcaatatatactagatattgtatctttcactttctctaaccacaaaatgggaaggatactttcttataatatctgaatattaaactattaaatatgacttgtaaaagcaaatgtattacagtaaaagcagaagtgacaaaactaaaaatagataagttggactacatcaaatttaaaaaattttttttcagtttagtttttagagacaaggtctcactttctcacccagactggagtgttatggcatgataatagctcactgcagccatgatctcccggactcaagtgatcatcctgtctcagcctcctgggtagctgggactataggcaggcaccactgagcctggctattttttttttttgagatggagtctcactcttgttgctcaggctgaagtgcaatggcgtgatatcggctcaccacaatctctgcctcccaggttcaagcgattctcctgcctgagcctcccgagtagcttggattataggcatatgccaccacgcccagctaattttgtgtttttagtagagacggggtttctccatgttggtcagtctggtctcgaactcccgaccgcaggtgatccacccgccttggcctcccaaagtgctgggattacaggtgtgagccacggcaccaggccatgagcctgactatttttttgttttgttttgatttgttttgttttctgtagagatagtgtcgctatgttgcccaggctggtgctggcctcaggcgatcccctcacctcggcctcccaaagtgctggaattacaggtgtgaaccactatatcaggcccaaattaaaagtttttttttgttgtatttttgttttgttttgtttttgtgctgcaaattatacaatcaagaaagtgaaaagacatccacagaatgggagaaatatttgcaaatcatatatctgataaaggactagtatccagaatatgtaaataacttttacaactcaaaaaataataataaaagaaaaatagtttgggaatcgtataaatataaacaacataaaaacaaacaaaagaactcttataactcaacaataagacaaataacccctccccctccccctccccctccccctccctctccctctctttccatggtctccctctgatgccaagctgaagctggactgtactgctgccatctcggctcactgcaacctccctgcctgattctcctgcctcagcctgctgagtgctgccacgcctgactggtttttgtatttttttggtggagacggggtttcgctgtgttggccgggctggtctccagctcctaaccgcgagtgatccgccagcctcggcctcctgaggtgccgggattgcagacggagcctcgttcactcagtgctcaatggtgcccaggctggagtgcagtggcgtgatctcggctcgctacaacctccacctcccagccgcctgccttggcctcccaaagtgccgagattgcagcctctgcccggccaccaccccgtctgggaagtgaggagcgtctctgcctggccgaccatcgtctgggatgtgaggagcccctctgcctggctgcccagtctggaaagtgaggagcgtctctgcccggccgccatcccatctaggaagtgaggagcgtctctgcccggccacccatcgtctgagatgtggggagcgcctctgccccgccgccccgtctggaatgtgaggagcgcctctgcccggccgcaaccctgtctgggaggtgaggagcgtctctgcccggccgccccgtctgagaagtgaggagaccctctgcctggcaaccgccccgtctgagaagtgaggaacccctccacccggcagccaccccgtctgggaagtgaggagcgtctccgcccggcagccaccccacccgggagggaggtgaggggtgcctctgcccggccgcccctactgggaagtgaggcgcccctctgcctggccaccaccccgtctgggaggtgaacccagcagctcattgagaacggaccatgatgacactggcggttttgtggaatagaaagtggggaaaggtggggaaaggattgagaaatcggatggttgccgtgcctgtgtagaaggaagtagacatgggagacttttcattttgttctgtactaagaaaaattcttctgccttgggatcctgttgatctgtgaccttgcccccaaccctgtgctctctgaaacatgtgctgtgtccactcagggttaaatggattaagagcggtgcaagatgtgctttgttaaacagatgcttgaaggcagcatgctcattaacagtcatcaccactccctaatctcaagtacccagggacacaaacactgcggagggctgcagggtcctctgcctaggaaaaccagagacctttgttcacttgtttatctgctgaccttccctccactattgtcctatgaccctgccaaatccccctctgcaagaaacacccaagaatgatcaataaaaaaaataaataaaaaaaaagaaaaaaaaaagaagacaacccaattaaaaatgaacagagggaaaaagaaaaacaaaacaaaaaaacaaaaacacacacaaaaaaacagagggccaggtgcagtggctcacgcctgtaattccagcactttgggaggccgatgtgggtggatcacttgaggtcaggagtttgagatcagcctggctaacatggcaaaaccctgtctctactaaaaatacaaaaattagccgggcgtggtggcccatgcttgtaatcccagctactcgggaggctgaggcaggagaagcgcttgaacccaggaggcagaggttgcggtgagccgagattgtgtcagtgcactccagcctgggtgacagagcaagattctgtcttaaaaaaaagaaaaaagaaaagaaagagaaaaagccgggcacagtggctcatgcctgtaaccccagcattttgggaggcggaggtgggcggattacgaggtcaagagatccacgagagcatcctggccaacgtggtgaaatctcatctctactaagaatacaaaaattagccaggcatgctggtgggcgcctgtaggcccagctacttgggaggctgaggcaggagaatcacttgaacctgggaggtggaggttgcagtgagctgagatcgcgccactgcactccagcctggtgacagagcaagactccatctcaaaaaaaaaaaaaaaaaaaaaaaagaacagagaatatgaatgaataggtatttgtccaaagaagataaacctaagcagatgttcaacatcattagctcctaggaaaatgaaaaacaaaaccacaaagagataccatttcacatctactggtgtggctacaataaaaaagacagacaaaaaccattgttggtagagatgtagagaagttagaaccctcacacattgctggtggcagtgcagctgctttggaaaacagtttgacagtttctcaaaaagtcaaacatgtaatcctgcaattcctctcctaggtatatgcctaaaaggaataaaaataaaaacatatgtccaaacaaacacttgtacatgaatgtttatagcagcattactcataattgtcaaaaggtggaaacaacccaaatatcactatgaattgataaacaaaatgcgctacagcaatacagtgatacatttggcattaaagaaatgaagtacagatatatgctacaatatgcgtgaaccttgaaaacatatgctaagtgaaggaagccaaaccccaaaggccacacggtgtattgctccactgatgtgaaatgtccagaataggcaaattcaccaagacagaaggtagttatcctgcaggagtcttttttttttgtgacggagtctcgctctgttgcccaggctggagtgcagtggcacgatctcggctccttgcaacttctgcctcccgggttcaagcaattctttgcctcagactcccaagtagctgggattacaggtgcccgccaccacgcccttctaatttttgtattttgtatttcaccatcttggccaggctggtcttaaactccggacctcttgatccacccgccttggcctcccaaagggctgggattacaggcgtgagccactgcgcccagcccgggagtgactgttaatggctttgagggtttctttttgggatgatgaaaatgttctgaaattggacagtgaggatgactgaactgtgaacataataaaaccactgtacaccttaattgggtgaattgtatggtatgtaaattagatggcaataatgaggttaaaaaaagtaaacttttaacatcaatgtcaccaggggttcaagttctggcttacacagaattcctttcctggagagcagataatatgcaaagccagcagtgatttatttttactcacaaattccttacatatttttactcacaaattccttacatatctagtagtcaggttcctattttaagcatgtagcaaatacattgtaactcttaattctggaatgcagtctttatggcttagtgagccatccaatccacttatagtcttcgtcagcggcaaaatctggaatttcatggtactgttactttgatcgctcaacttagatttatattttataaatatatatatacatacatatatatatattttttgagatggagtcgcgctctgtcgcccaggctggagtgcagtggcgcgatctcggctcactgcaagctccgcctcccgggttcacgccattctcctgcctcagcctcccgagtagccgggactacaggcgcccgccgccacatctggctgattttttgtattttttagtagagacggggtttcaccgtgttagccaggatggtctcgatctcctgacctcgtgatccgcccgcctcggcctcccaaagtgctgggattacaggcgtgagccaccgcgcccggccaaatatttgtattcttgtgcaccggaggatggttttcccccactgactccaaacgtcttccttgcatttgctgtgtacaattcagtgatttgggtctctcatccatttatactttcaaattttaccaatactttttgaacacacttaaaaaaaaaaaaacccaggaagtatctctaaaaggccaaggtaaaataaaatgaatgggagttcttgtgttcgagttttcttccaactgggctttcctggaggaggtggaagagtgtgtggcagatgtttcagaaaatgagcgctcaatacggtagatcacgctcccggggtcaaggagacgttttccgttttcttttccctcgcttaggcggcgggcgcgcacagtccagtgggagcgatgaggtgtttctaggcccccaagtcacagaaaagcaggcgattgggaacaacggaggcgcggcgggcccccgggccgcgggccagcgccaccttctggtggatcttccccgacgcgagtctgggagtcgtccctccccttgccagcctacctggctcaggcccgccgcgcccgcagccccagcgcggtcgccgtggcaacgccccgcccagccgccagcctccctttgcccctccccacgtccggcgcggctgcgcgggacggggtgggacggaggcggggagaggacgcaggcgagaggaactcggcggcgcggcgcccgcggcctattggctgccacgtcccggcgccagaagccccgcctccctgacgggggtcacgtgatccctttcaaagatggccgccctgttgttttgatgaataatacttggtggggcgagggggaaagagtaggggtggaggggtaggaggatttactcttccagcgagagctacgcgcatcccatcctccccctcccccctacccgggctccggcgtggaggcggggcgtggccggcctgctttgggaggggaggggcttcccttacagtgctgggctctgccaggacggctgtggggtcgccttacctcggggtatccactctgcagtcgaccagttcccgccaggagcaaagggtaggaaggagagcaggatctgctgtaggaacgcagctaccgcgccactatcacgaagaaacagcaggctcggggcacgagacgaactggagaccgcgctgcctagctgggtaacctgggaagcagagggtaataagtggcgccttaagacaaccctgtagcagcagcagtggcggccaaaggaggctgctcagggaacaagcggctgtagtagtctgtggggcgactggagtgaccgaagccaaggcagtttagtgcctctcgtgttcttattttttaacctctgactatgcaattctgaaacctcccccattcgggggaccagacagcctgatagacaccttccactctccttcctcccgccgtggtctcgagaacagaaggatctctccttaacgcctttcaccattaagaggaaagcgatggaggagctgagcgctgatgaggtgaggaggttgggggacaccttgagggattagttggcaactcgttagcgctttggacagggatggtattgcgccagtgctgtctggcctttgggcttggagaaggaacggagatgatattttccaagaataacgtgactccccgatagggtctctggttttgttctcctttattctgttgccttctttcttcattctgaactccatttgcttctttccgagtgttcttttagggtatgaacaagaggagagagcatcttgaggtgtttattcttttcttcagggtatgcgaacaagaagggcgagatttacatgaagttaaagtgtgtgtgtgtctgtgtcttcaggaatttaaagaacaattttggatggaatgagaatgtatggtgggtgaatatttttaaagaaagcatttgaaattccagatatgtgtggttattgcactgtataagcttgattaaacatatatttttgcttgaggggtggtttacagacagattctttgatatttaacaaaatatgtatcttctccacagtttagagaattccagttatattctggtacttaatagaccactaatgacttctggcattcttctgttacattctatcttttcctacttcttgaatctttcaaacttgtgttttgctgtagcagagactgaacgggaagcaagtggaagcaaatgactttctaaactctctcctgttctcatttcttaaaggagttatacagatctacttcttgatgttttaaagattgtttaataaattaggttgttgtaaaaaaaaaaacaaccaaaaagcagtggcaattagggtacaaggaatttcctatgattctactgccttttctcttcctttttgcaaattaggagcttccctttcaggacccctactggccataccctctttagcctacctccacatttcttcactggttcatcatgtaaacttccctacagtattaggaaagcagtcatccatcaagttgattgtactacaagacttccatgctccagttttagctacagagtacttagtgtgtttacttagggactgaaattctcctgggataggacacgcagtggtgtgttaagggtcaggtaggaaaggaagcaaatgattttgttgattgtgatacttggatacttggtttggaaaatcaggactgcccattcggcgttactttgtttttttcgaatacagcagaaatgtaatcttaagtgaagagaatattacacagtttctttcattcggtaggaaatctccttagaatcgctttattttatgtgggtttttttttgtttgtttgtttttttgagacggagtcttgctctgtcgcccaggctgcagtgcagtggcgcgatctcgtctcactgcaagctccgcctcccgggttcacaccattctcctgcctcagccccctgagtagctgggactacaggcgcccgctaccacgcccggctattttttgtatttttagtagagatggggtttcaccatgttggccaggatggtctccatctcttgacctcgtgatgcacccgcctcagcctcccaaagtgctgggattacaggcgtgagccaccgcgcctggcctgttttatgtggttttttaaaagtttctctacctcccccgtttttcattaatgttaattctagtgagtaatttctcttaaggcagagatactgtttttttttttttttttttttttttgaggcggagtctcgctctgtcgcccaggctggagtgcagtggcgctatctcagctcactgcaagctctgcctcccgggttcacgccattctcctgcctcagactccggagtagctgggactacaagcgcccgccaccactcccggctagttttttgtatttttttgtgtttttagtagagacggggtttcactgtgttagccaggatggtctcgatttcctgaccttgtgatctgcccgcctcggcctcccaaagtgctgggattacaggcgtgagccaccgtgaccggccagagatagtttttttatttttttttattttttatttattttattttattttttttgagacggagcctcgctctgttgcccaggctagagtgcagtggcgcgatctcagctcactgcaaagctccgcttcccgggttcacgccattctcctgcctcagcctcccgagtagctgggactacaggcgcccgccaccacgcccggctaattttttgtgtttttagtagagacggggtttcaccgtgttagcccaggatggtctcaatctcctgacctcgtgatccgcccgcctcggccttccaaagtgctgggattacaggtgtgagccaccgcgcccggccgaggtagttttttagtagtcctttactcctataaattactttttttttttttttttgatgatctgttaatagtccttggtttagaggcttttgcatacttgagttttcaccaaaaaattcttttcaaaccagtgaggcattacagaccagtgaagatattgtataatctaaaatgtgtctcttcactttcatcagtccttgaggaaggtgtaacttttttttgtgaccatatgaggaacacatgtaacctttgtggaagaaatagaataaacttttttcaaggtcaacagaatattaaaataaatgaaaaaaattaaattcactaatacaggatcaatgtaaaattatcttcaacaaattagttgtccagaacacaaagggctggttcaataactgttaattttactctcagcagaacctagaacaaataatattcgtttgtttttaatttaaaaaatcttttttttttttgtagagacgggggtcttgccatgtttcccaggatggtctcaaactcctgacctcaagcgatcctcccacttcagcctcccaaagtgggagccagacaaatagttattttgggaaaaatatctttgaagtttttctttttaattcaattaaaaatttttgaggttaggtaagcagttctcatgagacatttccaaagcttttgcctttgtattgttactctgtagttgaaaacttgtgtcagatatggtaggtgacattgatttgattacaaaataatacacttatattattgaaacttcaagcttatatttcagggttaaaacaggcaaggcggtgatcttttaatctaatttaggaaattaggtaaggcagagtttcatattttaacaaaatgaaaatgtatgattatacagtccgtgaaaaaggctggtataaccagactggtagctttaggaacttttaaattatgtgcactttttggtccctgtcatagatcacctagaattcttgtgctttttaaatttttttgtgagacagagtttcgctcttgttgcccaggctggagtgcaatggcgcgatcttggctcattgcaacctctgcctcccgggttcaagcgattttcctgcgtcagcctcccaagtagctggaattacaggcatgcgccaccatacccggctaattttgtatttttagtagcgacggggtttctccatgttggtcaggctggtcttgaactcctgacctcaggtgatctgcctgcctcggcctcccaaagtgctgggattacaggcatgagccactgtgcccggtagtcttgtgcttttaagtagagtactttaacttcactgttgtttgttatttatatagtgtattacagtgagttcattgccctatagttcactgcctataggttcattgcagaaccatgactaagttcattctcttcaggaacctacattccaaggcatcattatttacattatattaattctataatctactcatgtgttgtttttcgtatctcaaggtggtgctgtgagtaggtggtgtgtttatttttgagatagggtctggctctatcgcccagtctggaatgcaatggcatgatcttggctcactgcaacctctgcctcctgggctcaagtgatcctcccacctcagcctcccaagctgagactacaggctcatgccaccacacctggccaatttttgtatttttttctagagacagggtttcaccatgttgcccaggctggtctcaaactcctgggctcaagtgatccacccgccttggcctcccaaagtgctgagattacaggcatgagccaccatgcccagccaagtaggtgttttaaactgtttttcgacaatggtaatgagattgcataagtgatttttctctcctaactcttctttatgacctagttcatctgcaagatggttggctgggattccgggtgtggtcaagattttagaaagtgttggccgggcgcagtggcccacgcctgtaatcccagcgctttgggaggccgaggtgggtggatcacctgagttcgggagttcaagaccagcctgtccaacatggagaaaccccatctctactaaaaatacaaaattagctgggcgtggtggcacatgcctgtgatccgaggtactcaggaggctgaggcaggagaattgcttgaacccgggaggcggaggttgcagtgggccgagatcacaccactacactccagcctgggcaacaagagtgaaactccatctcaaaaaaaaaaaaaaaagatttagaaagtgttttaagtattcctttccaaatgcagaatatgtgaccttggactttttagcaaggttctgtaagtggaagaaaattgacattaaacaacagccttaggagcctcttctgtgccaggcacttgatagctgtttctcattagagaaaacattataatcaagcaggtactgttttcctaattttacaagtcaggaaactgggattcaggttaagtaacttgtccatagcgacctggcttagaagtgatggggttggaattcaaacccagtgctctggactcgaaagtcctctttattctactgctcaacaactgacataaattcaccacagcttttgtatcaacatcctacgtaacactgacccactctgttttgatatacatagtttttctgtagaagtgctgttttgcatgaatgcattcatgatgtgatcagggcttttggtactggtcctcccactcccaattttttttttaaatgcctgtcgcgttaaaaatttgggagttggggccgggcgcggtggctcacgcctgtaatcccagcacttcgggaggtcgaggcaggcggatcacgtgaaaccccgtctctactaaaaatacaaaaatttgctgggtgtgatggtacgcacctgtaatcccagctactcaggaggctgaagtaggagaattgcttaaactcaggagacagaggttgcagtgagccgagattgcgccactgtactctagcctgggaggcagagcaagactccatcaaaaaaacaaacaaacaaaaaaacacacacacagaaaaacaaacaaaaaagcaattataattaaatttgagtagaggagatagataggaatccaacagttatagaatagtgccaggtgctatggtggaggtatgcacaactcacttaagaaacatgagaagggaccccgggagaggcagggtcttagtgaagactttcaagaaaaagtgatacttaacgctgagtagcagttgccctgggaactggctcgaaattggggagctcaagaaacagcagcaagtagtgtgactggagaggtgggttttacctcgggtgtgtggcaggtacctgatcttggagggctgtcagaaacgtttaggagtttgaactttctttttgttgttgttttttgggacagaatctctctctgttgcccaggctggagtgaagtggcatgatctcggctcactgcagcctctggttcccgggttcaagtgattctcctgcctcagcctcccaagtagctgggattacaggtgcatgccaccatgccctgctgatttttttttttttttgtatttttagtaaagatggggttttaccatgttgactaggctggtttcaaactcctgacctcaagtggcccacctgcctctgcctgccaaagtgctgggattacaggcgtgagccactgcacgtggctgagtttgaactttctctgtaaaatgccttttagggattttaagagattagaaagatgggtggcaagggagtaaagggtagtttgggagaaggtggctgcagactgcaagacatattaggaggctgttgttgctgtataggagcgaggcagtggagtccaagggaactaaggcattgcctgtgggaatggaggggagcagacagacaccaaaaataccaaggactgtgattaacccagttttgatgatcagttagctgtgaaggaggggaggggaggagagatggagaaatgacaccttggtttctagctatggagaaggatagataagggttgaataaggaattccagagaagcagcagattttggagaaagcacatgtttctttttttttttttcgtcttttgagacagggtctccctctgtcgcccaggctggagtgcagtggcgcaacctcagctcactgcaacctctgccccctgggttcaagtgattctcctgcctcagccttccaagtagctgccagccatgcccagctaattttttaatttttagtagagacggtgtttcaccatattggccaggctggtcttgaactccagaccttggtgatccgcctgccatggcctcccaaagtgctgggattacaggtgtcagctaccacgccaggcctccggctaatttttgtatattttgtagagacagggtcttgccatgttgcccaggctggtctcaaactcctgggctcaagtgatctgcccacctcagcctcccagagtgctgagattgcaagtttaattttggaccaccaaaaagatgagtccacatgtagacccccactctggccttggtgctctaacatctccatttctttcttcttttttctttttttttttttgagatggagtttcgctcttgttgcccaggctggagtgcaatggcgcgatctcagctcgctgcaacctctgcctcccaggttcaagcgattctcctgcctcagcctcccgagtagctgggattacaagcatgtaccaccatgcctggctaatttttttgtatttttattagagacgggatttctccatgttggcttggccggtctcaaactcttgaccttaggtgatctgcctgcctcagcctcccaaagtgctgggattaccggcgtgagccaccgcacccagcctaacatccccacctctttgaccatttcttcccttgtaacaggcctgaggacctgaggtcccttttttcctcagaagatagttgctaccattcactttataaccaggactctttcttaagcctgggaggacagtgggatgtatcctgccaggccctttcctctccttttgttcattgtagacaagagacagagaatgataataaggatataaacttgcttcacaaggttggcatccttatcccctgttttacagataagaaaatggaggctaatagaaattaatttattgaaaggcacacaactagtaagtggtagaacctggactctaatccaggttctgactccagagttttctatcgctttactacctctaaaacaagactaacctcagccaactgtaacctttttggcattcttttttttttttttttttgatggagtttcgctctcgtcactcaggcttgagtgcaatggcctgatctcggctcactgcaacctctgcctcctgggttcaagcaattctcctgcctaagcctcccaagtagctttgattacaggctcccgccagcatgcccagctaatttttgtatttttagtagagatggggtttctccaagttggccaggctggtctcgaacttctgacctcaggcgatccccccgcctcggccttccaaagtgctgggattacaagcgtgaacgactgtgcccggccacatttatagcattcttacggtcccttctgagataggaagtggaagccccagtggactttttgtttgtttgtttgttttttaagacagagcctcgctgtgtccccatgctggagtgcagtggcacgatctctgctcactgcaacctccgcctcccgagttcaagtgattctcctgcctcagcctcccgagtagctggggttacaggcacatgccactactgcccggctaatttttgtatttttagtagaggggtttcaccatgttggccaggctggtctcaaactcctgacctcaaatgatccacccacctcagcctcccaaagttgtgggattacaggcatgatgctggagtgcagtggtgctatcttggctcactacaacctctgactcctgaattcaagcgattctcctgggtcagcccctcgagtatctgggattacaggcgcccgccgccaggcccagccctccagtggactttcattcccgtttgttattgctgagagtggagctcatcaagtagccccaagctcttgtagggaaagaaggcagaaagacttctctgtgcaaagtgcattttctcacacggcacttgtagtatctagtggaaatgtcttcctgtaaacggttcattcaacagcgcttacagttgactagctgcatccctgataacagacaaacgttgctgtatggagcttcgtcctagtgggaggagagggataaaaaacaagcatggccgggcgtggtggctcacgcctgtaatcccagcactttgggatgctgaggcgggtggatcacgaggtcaggagttcgagaccagcctgaccaacatggtgaaaccctgtctctactaaaaatacaaaaattagccgggcgtggtggtgcacgcctgtaatcctagcaactcaggaggctgaggcaggagaatagcttgaacccgggaggcaggggttacagtgagctgagattgcaccactgcactctagcctgggcgacagagtgagactgtgtctcaaaagcaaagaaacaaacaaacaaacatgttcacataaggtgtcatttgatgagaagtgctgtgaagagaaatacttagggatggagtattgttacagagtatttctgtggcctacaggtacagagaacaatcagatatgtgtaacgtgtgcactttgaggaggtggtcttgaaaagaatttcagggatggctgggagcttgctcggggaagaatgttcccaggtaaagggaacagcaggttcagaaggccttgaggtaaactcattcttgagctgttccaggaatagcaaggatgccaagcatggttagagccttctgtgcaaggggcacagtggcaggaggtaaagtcattcattctttttttttttttttaattttttgagacagagttttactctgtcactcaggctggactgcagtggctcaatgtcagctcactgcaacctccgcctcgggggttcaagcaattctcctgtctcagcttcccaagtagctgggattacaggcatgcaccaccatgcccggctaattttgtattcttagcacagttggagttttaccatgttgaccaggctggtcttgaactcctgacctcaggtgatctgccggcctcagcctcccaaagtgccgggattacaggtgtgagccaccgcacccggccaactttcagtaaaaacttactgagatctcaactgtttttcaatcatttctgagatgtactctcctcccccttgttttcatcacattttaatatctttgaaattgagatgctgcttttttttttttttttttttttgagatggagtctcactcttgtcacccaggctggagtgcagtggcgcgatctcggctcactgcaagctccgccacctgggttcacaccattttcctgcctcagcctcccaagtagctgggactacaggcgcccaccaccaagcctgactaattttttttgtatttttagtagagacggggtttcaccgtgttagccaggatggtctcgagctcctgacctcgtgatccacccgcctcagcctcccaaagtgctgggattacaggcgtgatccaacgcgctgggccgggatgcttcttataaatagatggtgtaatcaccgttggccaggtggcagttgtgacatagttgtcatttcctgtttaggtgtgaacctggttatacctgttcatgtaatcaccccttcagttgagtgctacagtgttaaaattagttgccattttaaatgccttccaaacaattacacttagattcagcaatgaaagcaagtgttactttgtatacagagaggaatggaaacaggaggtggggtgtccatttgctgtttctaaagaaaatgtttgttgttgggggagtgaccacaattccacgtttcttttcttttcttttttttttggagacagagtcttgctctgttactcacgctggagtgcagtggcaggatctcagctcactgcaacctccacctgccaggtgccaggttcaagcgattctcgtgtctcagcctcccgagtagctgggattataggtgtataggtgcgtgccaccatgcccggctaatttttgtatttttagcggagacggggttttactcttgttgtccaggctgatcttgaactcctgacctcaaatgatcggcttgcctcggcctcccaaagtgctaggattacaggtgggagccaccgcgcctggcccagttccatatttaattgccaaacaccaccaagtgaattagggcagtggtccccaacctttttggcaccagggactggtttcgtagaagacactttttccatgggtggtggtggtgggaggggaagggatggttttgagatgattcaagcatattacatttgttgtgctccttccttccttacccttccttccttactcttccttccttccttccttccctccctctctccttccctccttccaccgcccgcctgtctcgctttgtcacccaggctagagtacagtggcatgatctcagctcactgtaactccaccgcttgggctcaagcgatcctcccacctcagcctcctgagtacttgggaccataggcgcacgccatcatgcccggctaattttttgtatttttgatagagatagagttttactatgttggccaggctgttcttgaactcctgagctcaagcagtccacccacctcagcctctcaaagtgctgggattacaggcatgagccaccgcgcctggcctgtgccctttatttctattattattatattgtaatatagaatgaaataattttacaacccaccataatgtagaatcagtgggagccctgaccttgtttttctgtaagtagacggtccatctaggggtgatgggagaaagtgacagatcatcaggcattggattctcctaaggagggtgcaatgtagatccctcgcgtgcagaactcaatgtagggttcatgctcccattcgaatctaatgccactgctgatcttgcaggaggcggagctcaggtagtaatgcgagtgatggggagtggctgcaaatacagatggagcttcactccctcactcgcgtgcttgcttggtactggtctgtggcccaggggttggggacccccgcattagggagcttcagagaggccgaaatccataagtgtgtgaagccatgtcacattttgtaactgaacatacagttaggaggattgcatttcacactcaggcaatgcaaccttaggtcagagacactccacattcctcagaaagaaatttcagggctatgagagcctggtgtaactgatgacaactctgtccttgtctgttgttcaggcattttgttgtggtttaatgtgccatattttgtttctcttggtggtgaaaaataatggtacagtctacagtctgacatatttgatgaaatatggtctatgtccagcattgttctagaccatgagggtacacctgtggacaaaacagaaatctctgccctcctgggcattctggctgctgtgaagagaatagataaggaggaaagagcaaaagcagagagaaaggcggccatcgaaggagtcccagggagagatgatgtgggggccaccaactggggttagtggttgagagggggagaaagggtcaaacactagatggtcagatacattttgtgggtagagccaataggattgggtagtgagttgcatgtggagtatgaaagagtggagtccaaggtgcagggatgagttaggttatcatcgagttgattgttgtaacagagagacatgaagtggcagctgcttaagccagatagatgtttatttctctctaaatagaagtctgggtaggaggccggggctggtatggcagctctgcgctcattaggagcccaggtgccttctgtcttgtacctactttcctaccatatggcttccatcttttggcccttgtatgtctgcattctggccagagaggggaggggaggtcatgtgcctcttcatggcacagcttgaaagttgcacagatcactcctgtttacctctcactggctggaacccaagtcacatggccacagctacttgctgggaaggctgagaaatagtttttcttgggcagccatgtgttcagctatacgttctctcacatcagaaagggagagcagtctatgcctttctttccaaacccttctcccgagggagacaaccccggatcaacttcagagtccagaatccctgggtgatgtacattccaggaatctttagtttaaaacaaagttatcaggggctctgctgtcccccatacagtggtggagaggttaggataatggaagtagaaagtcctgtttggaaaagggaagaatggggagtaatactctgcgctggtccatagccattgtcagctcctgccaggctgagctgtgagcgcttcctcccctggcagtactgtgaggttctgacctcgcctttctggcaaccttgattctggtctcttgaaggagctcccttgtgcctggccctctgtagcctctgactttattttctggagagtttttctgtgtttcttttcctctggggtcagatctgaagtggacattggaggctatcctttttgtagggctaaacagtttctccagcttgcttcttgtggatattgaaggagtaggctttttcaaccctacttagccccaaattaccagactctgaaaactttgattgtagaccgcggacattcctcaggcagactgtattccctttcatctttgcatgcgaattggcaagctttggcttgagtctgcttcatgtttgcaggacttcttagccagtaagcaccaaattttgtattgttcgaccagttcccctagaattacaggccatgttggcatgcaggctgttttctaagatatcacgggttttgccaaatgttttattgtgatctctgagggttgccattcttccatcctacagtatctgtgcccatgctgacccctaagccaatgctgcatatttgtattgttaaggttgattacttccagcttccagattctgtgtattagttaggatattgatttgactgctgtggcagaggtcggaaataataatggcttgaacaagatgttgatttttttctatttcaagtgaaaatctgggtaggtggctgagagctggcttagtaactccatgcctgctagggggccagactcatgctgttttgtgcactgtcatcctctagcttataggccaggagggctgctccagcttctttgaggaaatctgcatcccagtccttaggaagggactcaagtgggaggagagggcatgttctatcccataagagcatggccagaaagcttcatatatctttttttttttttttttttttttgagatggagtctcactctttgcccaggctggagtgtagtggcgtgatctcggctcaccgcaagctccgcctcccaggttcacgccattctcctgcctcagcctcccgagtagctgggactgcaggtgcccgccaccacacctggctaattttttctatttttagtagagatggggtttcaccacgttagctaggatggtctcgatctcctgacctcatgacccacccgcctcggcctcccagagtgctgggattacaggcttgagccaccgcccttggcccatatgtcattacttacatctccttggctagagcttagtctcctggccacactcaaatgcaaacatggttgaatgcattttatttattttacttttttagagacaaggtattttttgtcacccaggctagagtacagtgcagcctctaactcctgggttcaagtgatccttctgccttagtctcctgagtaactgggaggtgtgtgccactgtgcccagctaatttttaaatttttattagagacgagggtctccctgtgttgcctaggctggtcttgaactcctgacttcaaacaatcctccttccttggcttcccaaggccctgggattataagcatgagccactgcatccgtcctgaatgcgttttgggaggcaactagcttttctaccacagggataccaggaattttggcttaagcagctcaaaaaatggaattgtcatttactgagatggggaaaattgaaagagaagattgggagggagacgttatcatctggtttgaacatattatgaatatgctgcctgttctttgtccatatggagatgtgaaataggttgtataggagtttgcagttcttgggggaggttggggttagggatactaatctggaagttgtcattgtatttaaaatcatgagaatggacagattttacctagagagtgagcataaatgcggaagacaagaggactgagcctccatccattccagcaattaaaggttgggagatcaggaggactcagaaaaggagactgataaggaacagccactgaggttggaggacagtctagagagcatggaatctggtgtccaggggaagaaagtatttcatgatgtgggggaatgctcaactgtgtctaatgttgataaaattagaggaggaccaagacgtgactatgggatttggcgacatggaggcccttggttaccttgacaagactgatttcattgctgactggagcaagttcaagagagaatgggaggagaggggagggagctcaggagtgaggcgtaggctccaggggtgcactgggaagccatctgtagttggcagaagccatgggttttagaggtgacaggaaaatgtggtgagcttatctttttctgttttaacttttcccattctctgctataatcactactttctttattcattcaacactctgtttctctctctttccccaagggaggaagtaaagaggtagagatatatttgtatatcattcctagcatgaggttttgggcctgaagagttccaaataataaattttgagacataatatggggaacattggatcatattatagtttttagagcttaaaaaaatagttgagtggcaaatatttcagagtaggagacttgaatattatttaatttgtttgcttaatttcaacaaatatttttgggctttgtgccaggtactgagggctgactatgtggagatgctgctcgaatatgacgaagacctggtctttaccttcagtgacctcaggctgcagctggggacacaggaacgcaaccagctagacttcaagtgctaaatagacatttcagtaaagggggtacggttgatggggcagttaattctgatggggaatgtagggaggggactgggaagatttgaattagtctttaaagatgactaggattttgacaattagaacactgtagccagacgcaatgatgcatgcctgcaatccctgctacttgggaggccaaggcaggaggatcacttgagcccaggagtttgagggcagcctgggcaatatcataagaccttttctctaaaaaaaaaaaaaatttttttaaattaggaaacaatgttggctgggcatagtgtctcatgcctgtaaccccagcaatttgggaggccaaggtgggcagatcacttgagtccaggagtttgagaccaacttggacaacatagggagaccccatatgtccaaaatggctgggtgtggtggcatgcacctgtggtcccagctactcgggaggctgagatgggagaatcacttgagcccggcaggtccagggtgcagtgagccatgatccatgtcactgccctctagtctgggcgagagagcaaaagaccctgtctcaaaaaaaaaaaaaaaaagttagaaaaataagtctgtggtgaagagaaatgtttcatttacttcttactctgggcaaattctgttacattcattcttttgaaattgatgatagaaatatgagaacattggagaaaaactgaagatggcaaatatgggatattggtagctgcttgctgatctgaaaggctggttttttttgagacagagtcttgctcttgtcacccaggctggagtgcagtggcgctcttggctcactgcaacctccacttctggggttcaagcaattctcctgcctcagcctcccgagtagctgggattacaggcatgcaccaccacacttggctaattttcgtatgtttagtagagaccaggttttgccatgttggtcaggctggtcttgaactcctgacctcaggtgatccgcctgccttggcctcccaaagtgttgggattacaggtgtgagccagtgtgcctggcctgatctgaaaggttttgagatatatcaggcatagccaaatgtgtgaccccaagctctccaaaaccactaagggtctgcagcagctgaaggagtaggtgatagggagaagttggaggaacgggaaaggggtttcattaaaatcacttctctcctaacattaaccacactgcattgaattatttattcacttggtgtagctcctactgggatatgaactcctggctattcttgtttactgctttttatccaagttctggcacagggcttggcacagagtggctcagaacaaatacttgttcaatgcatgaatgaatgcagtgatacaacatgtcttttcaggactcctattctttttttttttttttttatagaggtggagtttcactatgttgccatgttgcccaggctggtttccaactcctggcctcaagccatcttccctcctcggcctcccaaagtgttgagattataggcgtgagccaccacaaccggcctgcctcccaattctagtattgcaatagtttatttgtttgctgcattaagttgtgttaattaggttaaggtaggcacttgatgaaaaaagcctcattatcagagttctaattcagagtcagacatacttgcaggcttttttggttgtttgctttttgttttgagacaggacttgctctatggcccaggctggagtgcagtggcattatcatagctcactgcagcctcaaactcctgggctcagatgattttcccgcctcagcctcctgaatagctgggactacaggcatgccactgttcctggctcttacctggattttatttggagcaacaaattggatgattctggggaaagtacttaatctttctgagcctcagtttcctcacttataaaatgggggtatggaataccatctcgtagcactgttcttcagattaattggagtgatgtgaagtgtgcatggtgtagtgacctggccgagtggattcttgggacaagttagttctcaaagtaagattgaattgtgtataattggagttttagttggtgtccatataacatctaacaaatcttttgcatataataatgccaacagcataaatagtggtatcttactagttaaggtagcaaatagaccgtggcttatgtgaaaggttgggttggaatcctctcccccgacccattagttccaaaaatctcttctcacccaggggccatcttttgtattgagccacactgctaccactttttctaaaacgtggagtgattggtggcctgaatgtactaagagggtgaaggtggagtgtagagctttgaaagggaaagaagagtgtgcagaaaggggactcgaggagtcccaggagaaatgttctgcatatcaggactaaagaatacagcctgaggtgacacactttactcccatcagatgacttatttttgtcttctgaaagaattgtacccctcccagcagggggagaaaatctctgaattggatgtcattgtattaactactcaacagctgctaaatctttggcatcttgtccagttctttggcagcagtgtcaagactgggaaaagaggtatcttttgggtcctagattgagaagtgactttacctttctaattaaacatgacacattcaatgcatattgcttctttgttccctgtcagtgcttggtataaattctagatgtctaatagtgtcatttttttttttttttgagacggggtcttgctctgtcacccaggctggagtgtagtggtgccatcttggctcactgcaacctccgcctcctgggttcaagcaatccttccacctcagcctcccgagtagctgggactataggtgcatgccaccatacctggctgattttttaatttttttttttgtagagacagggtctcactatgttgcccaggctggtcttgaactcctgggctcaaatgatcctccggccttagcctcccaaaatgctgggattataggcatgagccactgggcctggtcagtggtgatttaattagttagattttctgactagatgaggtagcacactgctttaatggacgtttttgggaattgaacttctaagatgtccgggtagatcatattgagcacccatcgtgccaggcactcctcaggaatcatgtctgtgatcatggtcttttgttagacctgtgtctatacttgtcaccagggccagcttcacaggcatgtgactgcaggcagaggtgccccacgcttggtttaatgctctgctgttgctgtcttgaaattcttaatacatttgaacaaggtagcctgcatattcatttgtcatggggccctgaacattctgtagctggtcttggttgtcattgactttttctgtgtgggtggatatatgcctgggtagatgtcgtagttcatttggactattataacaaaatgccataaagtgggtggcttgtacacagcagcaatttgttattcaccgttctgcattctggaggctgagaagttccaagatcaaggtgctaagagatttagtttcttgagagccaacttcttggttcatagatacctgttttctcactgtgtcctcacttggaggaaggagcaaaggagccccctgggctttcttttataagggcattaatccgcaggtcatcaggggttccgccctcaggacctcatcacatcccaaaggccccatctcctaatttcatcagcgaccctcccacctcagcctcccgagtaactgggaccacaggtgtttacaaccgtgcatggcttttatttatttatttatttatttattttgagtcggagtctctctctgttgcccaggctggagtgcagtggcgcgatctcggctcgctgcaagctccacctcccaggttcacgccattctcctgcctcagcctcccaagtagctgggactacaggcatgcaccaccatgcccggctaatttttttgtatttttagtagagacggggtttcactgtggtagccagggtagtctcgatctcctgacctcgtgatccacccgcctcagcctcccaaagtcctgggattacaggcgtgagccactgcgcctggcctatttattttttatttaatttttttgagatggaattttgctcgtcgcccaggctggagtgcagtggcacaatcaagttctggggtatatgggctggatgtgtaagtttgttacataggtaagcgtgtaccgtggtggtttgctgcacctatcaacccatcacttagtaactgagtccagcatgcattagctatttttcttaatgctctccctacccgctgcatggctgattttgaaaactttttttttttgagacaaggtcttgctatgtcacccaggctagagtgcaggagtgcagtggcgtgatcacggctcacttgcagcctcgacctttcgggctcaagtgatcctcccacctcagccttctaagtatctgtgaccacaggtgttgccaccatgcctggctaattcttttattatttgtagacaaggcctcgctatgttgcccaggctggtcttgaattcctgggttcaagtgatcctcctgccttggcctcccaaagtgctgggattacaggtgtgaaccaccatgtccatctgatattgaatctttagataactcattttccttcatcaaatctttttttgttgttggggtagtaattagaaatattagattttttttaaaaaaaaagacaggatttttgacacataaacatttatttccatattctttttttaatttttatttttgtaagctattttatttcttccatgatgatttagagggactatcttcaaaccaatacaaatattttgtaagtaatatctggctgttttctaaccaattgagtaatttgttgcacagtaagccacctcacatctttcagcaagaaatacattaaatttgaatagtaaagacatggcataatgaattaggacacaattaaaatttgctttaaatagttctttgggcgaggggacaccacacttctactcaatgaagagaaacattttgacagttcagaggtcttttatttttttcacacctcttatgccatgaattcataggtaataggttccagcagctcaggcttcttcccattggttctcacacagtgtgcttctctggtacctttctctttggctttcttctttttctgatcattttccttcatgagttttaggaaatgatgctggcctttagagcgcttaatgtgctcaatatgcatattaattctcttggcaagactgttgccattgttcatttactacaatgccagcagcatgctgggtaacattgtagactcttccagtctagccatggtaacacttgcggggcattttttttggaacagtacccattcccttggtgtctgtaatattatctttctcctttttttttttttttttttgagatggagttttgctcttgttgcccaggctggagtgcagtggtgtaatcttggctcactgcaagctccacctcccgggttcaagcgattctcctgcctcagcctcccgagtagctgggattacaggcatgcaccaccatgcccagctaatttttgtatttttaatagagatggggtttctccatgttggtcaggctgggcttgaactccggacctcaggggatccacctgcctcggcctcccaaagtgctgagattacaggtgtgagccaccgcacccggcgtgtttttactttgaacagatgtccttgtgccaaaaggtttggtgatttctagtttagggaaacatgaataaagcatcttttggcttgaaatgttatgattagaatgggttgtgagtgggagaattttaatgaatgccaattggaacaaatgcttgtgaaaatgtctcgtaggccaccttttcatcattttttcttttcttttcttttcttttctttccttctttttcttttctttcctttctttattctgagacaagatctcactgtttcccaggctggagtgcactggcagcatcatagctcactgtagccttgaactcctgggctccggtgatcctcctgtcttagcctcctgagtagctaggactacaggcgtgtgctgccacacccagctaatttaaaaaattttttttgtagcgatggggtctcgttatgttgcccaagctggtttccaactcctggcttcaagccttcctccaccacacccagccaacatggggcaaaagttaccagaatcagttttatggaatagtgttagaagtagtgaatgctggccaggcgcagtggctcatgcctgtaatcccagcactttgggaggccaaggtgggcagatcacttgagatgaggagtttgagaccagcctggtcaacatggtgaaaccctgtctttactaaaaatacaaaaattagctgggtgtggtagcacgtgcccgtagtcccagctacttgggaggctgaggcaggagaatcacttgaagctggggatggaggttgcagtgagctgagattgcatcactgcattccagcctggatgacagagtaagactctgtctcaaaaaaacaaaacaaaacaaaacaaaaccagaagtagaagtagtagatgcttagtcatctacgttaatcttgtctgttgaaccaagtaggatcaaagatgagaatggagaccataccatccacttctatcccctgggatgtttttggttataaagggcataaagtttctgcagcaggaaaccttctttaaataacagaatgcagttaaaattattctacactcagcatgtttctctgccatgtaatgtttggcagttttaggctcttgatctttttggtttctcttgctcctaatttcacaattagatgacacgtgagatgctttttagtgcttttgtacacactcgtattatttagataaagcagaaccctacacaaaggggaaactgagcctaagaggaagattaaaagagcaaagggatggagaaaactgctaggctgaaattatttttttaaaaaagactatttactgtgtgtcaagtaaacacttttcatttgttcagcaaatatttaccgagtgctctctgggagttaggtactgtcatagttgctgggaatacagcggtgaataaactagaccaaatccctgctctcttggagcttgtattgtactgggtggggataaactataagctgataaatacatactaattctagttgtttgttatattacctttatttctgatgactattttataagataagaaatattttgtcactttcttataaatggggaaatcgaggctcagagagataacccagctggaaacaggtgcagctgggatcctggccagcgctagctacgcgattgctcattgtgtagagggcttgagaagatggggcctggggtagcacttcactcacccattgcacatggtctggtctctgtttcactttcaggtggactgcttcattcatttattcatgagacaaggcctcactctgccacccaggctggagtgcagtggcacattcatggctcactgcagcctcagcctccccagcccacctcagcctcctgagtagctgggactacaggcatgtgccaccacacctggctcatttttgtatttttttttttctgtagagatggggttttgccacactgatcttgaattcctgggctctggtgattggcccgcctcagccttccaaaatgctgggattacaggtgtgagccaccacacctggccccttattattctaatttgaagtaataatattaatattttaagtattatgggtgacttaagaaaacactttaattaggcagttttatgcctttggtccttagttctcaccagctggcagaatggggttaggcgtgtttaacgttcttcatgttatcaattagatgcaaaaaacacaattaacaatttttgttacagtttataaaattccttgtattttaaaaaagatataattactgcctggctttggagaattaaagggtcgcaaccttttttttctccctgagaaaataccatttacagtcttttctcttttttttttttttttttgagacagagtgtctgttgcccaggctggagtgcagtggcgtgatcatgactcactgcagccccaaactactgcactcaagcgcttctcctgcctgagcctcctgagtaggcacacaccaccatgccaggctaattttttgatttttttttagagatggagtcttgctgtgttccccaggctggtttctaactgctgagctcaagcagtcctccccagggaggttgaggctgcagtgagttgaaatcgtgttactgtactccaacctggctgacagaacaagaccctgtctcacagaaaaaaaaaaaaaagaaagaaaaaagaaaaatgtattttgctagtaattgctagaagttggcctttgtaagtattttgtgctttatttttgagatatttactcacctgggaaagttctcaaggaggaggaaggtgacttgccttgcctgcattccggtggcagggaagcaagcatgggaggcagtggagggtatgtaggtaaagagaggagaaggaacagctggactgtcggatgtggggtgaccttctcaggtcatgtccacacaaggactcttgtgagagtaaaagggtctctgttacaattaaagtgggagtgccaggagtaccctgggctgaggccaggagccgacatggatgatccccttctagaggtgacgtgtttgagctgtagcggagtgcttgggtaaaagcactagatactttagggttttgatttgggagtaagtcctggacatagtcatgatattctttggagaagaaatgtggttaatcaatcaagctttttgtaactgttgagtaaacattttttgagttggataagtaacctggaaagtgaagcagaaaatgattggaaaaatgagattgcagggtgaccgtgccattctacccccgtctgtttccactctgtcatattcatcctgtaacatttctctattgcttggaagccttggtactttacttgttagtgcagacttagggaagctggcctcactgagctgttaggtttatatgtgttaaaacttgtgctggagaaagtgcacaggagccaggcagtgaggcatggggtgctgggtggtgggccaggggcactagaagctgggcatggggtacagagctgggggagtggtgtgcactgggagccaggcagtggggactctggaatcacagtgaccacagtcagtgctgcatcctgagcccaccagctgccgcctgcaggtgggcaagggtgcctggcacctggagaagcacttcagcggctggtgtgacactgacctgagccttctgggaggcactgagaaatgctggctgtgattttgacatctgtgtcacctcagggcggaagacagcaatgccgaccccctggacagtattggatgccactgaccagatgtggctcccagtagtgatgacttggtgcacctcctggagtggcactataagggtctgactggcctcaacaaagcagaagctgttgtcaagaaccatgagggccagataaagatctgcatgccggctgggcgcggtagcttgtgcctgtaatcccagcactttgggaggccggggcgggcggatcacggatcacctggccaacatggtgaaaccccctctctactaaaatgcaaaaagttagccaggtgtggcggtgggcgcctgtagtcccagctacttgggaggctgaggcaggagaatggcgtgaacatgggaggtggagcttgtggtgagccaagattgcgccattgcattccagccctgggggacagagcgagactccgtcttaaaaacaacagcaacaacaaaaagatcttgatgcctctgatggagctgaacatttattatacagcaacagcagcaaggattgctggtgggcagactacactgtagggcacctgctcttctgtaagagtctgaaggacactattgtcagagctctgcccttttggaatgaagaaataattccccagatccaggaggggaaacaggtgttggttgaggctcctggcagcagcttttctggcacagtcgagccttgggaggctctcccggaaggggccatcatggagctgagcctgcccactggtattcccattgtctatgaattgaacaggaggagcttgaagcccattgagctcatgcagttcccaggagacgaagaggctgtgcataaagccatggaagcgtggctgcttagggcaaggccgaggcgtgaagggcggcagccgatccctatcctgacaacaccctcccagtctgccccattcctctatgcctctcacctccacgtgtcacagtgaccacagctgtaggcatccgaagttgttgagcgtatctggaggctcccattttaattttaggcatttttttttccactcctttcacacaatcagaatggcacctctggggcataggtcttcagcccaagccaagggaaggcttcttctacccaggagagctgaggggtggcaactctggggtctttgctagtgctttgtttacttgtttactaagaccctgcttgagtaggggatgtggaggaaccatgctaaggcatgaccaatgaggagaagcaagagagcctgtttgtattcctgggagccagtcctgttctattcagtcgtcaggtccctgtgtgtgtgtggagggggttgggaaaggttgggggtagatgaatgtaacctacatggtgatttaaaacaagcaactacagtcatgcatcacttaatgacagggatacgttctgagaaacgcatcattatgtgaacactatagggtatagttacacaaacttagatggcatagcctattccacacgtaggctctatagtataactccttggatacttacggtatggcctaggtattgctcctgggctacaaacctgtactgcatgtaactatactgaatcctgtgggcagttgtacaataacagtgagtttttgtgtatctaaacatagaaaaggaacagtaaaaatatggtattataatcttaccggaccaccagtaagatctggtgatctgacattgactgaaatgtcgttatgcagcccatgactgtatttcctctctgacttccccaggagagctggttccagaaggttcggatgagtcctgaatgtttatgtatggcattttcctttaccaaaacaaaacaaaagaaaataaaaacctttctggggttctagtagccattgaagtactcctaagtgtggtcatcagaaaataagccattctttaacaccttgacttctaacggtagaggttcattttgctgtgtattttagaatccctagtgagctagtgagattctggacaatttttttttttttggagccagtctcactctgttgcctaggctagagtgcagtggtgcaattgtagctcactaggctcaagtgatcctcctgcctcagcctcctgagtagttacgactacaggcacgtgccaccatgcccagctaatttttaaaatttttttgtagagaagtcatcttactatgctgctcaggccggtcttgagctcctggcctcaaatgatcctcccaccttggcttcccaaaatgctaggattacaggtgtaagccaccgcaagagtttgtttccaccttctgttttctgtttttttttttatctcaaaagacaacaagatataaatgagatgcattaatgcagcatactgcaaacctacggcatacttacttgtagaatttgtagtactggaatccaccctttaataacgaggtgtaaaagggagctatcagaagagaggaacagacaactggccacatttctgtaattgtgcaaaacaagtttgtttgtttttttgtgagacagagtccctgtcacccaggctggagtgcaagtggcatgattttggcccactacaacctccgtttcctgggtttaagcaattctcctgcctcagcctaccaagtagctgggattacaggcatgcaccaccacgcccagctaatcttttatattttttattagagacggggtttcaccatcttgaccagactagtctggaactcctggcctcaggtaatccgcctgcttcccaaagtgctggtattacaggggtgagccaccgcacttggccctgagcaagtttttatggaggattgagtgaagggcattgcctgggagagtcatcttttaagattttttggggtaagggatctccttgaaaatcttgagggaattgaaggtcctcctggccttcatgggtcccaggatttggacccctgccccaggtattctcaactctacccagaaatcaagccgcaccagcaaagctgatgcttggatctcttcatttgggctactctcaaactttttcctttgaatcttgttttgccattaagcatctgctgatgttgaggagtgttgtcagttacttactgtgttgctatacgtgtgtagtgtgtgctgatctcactcctggctttatcttcttttttcttttttttttttttttgagacgaggtctcgctctgttgccaggctggagtgcagtggcgcgatcttggctcactgcaacctccgcctcctgggttaaagcttttcttctgcctcagcttcctgagtatctgggattacaggcgggcaccaccacacccagctaatttttgtatttttagtagagacggtgtttcaccatgttggccaggatggtctcgatttcttgacctcgtgatccacccacctcggcctcccaaagtgttgggattacaggcctgagccaccacacccggccctattttttctaccatcattttgcttgtgtcctaatttccttatctctttgaattaaacttgttaatttaattaagttaaattaaaaatacattcgatgtgtgtttttttgtttgtttcttttgaggtggagtctcgctctgtcgcccaggctggagtgccatggcacgatcctggctcactgcaaccttcacctcctgggtttaagggatttttcttcctcagcctcccgagtagctgggattataggcatgagccaccatacccagctaatttttgtatttttagtagagacgaggttttgccattttggcgaggctggtctcgaactcctgacctcaggaggtctgcccaccttgggctcccaaagtgttggggctgcaggcgtaagccgctgtaccggccgccttaatgcattttttgttaatcactttaaatctttcctagaacaagaaaataatgatagtgaggccaggtgcggtggctcacgcctgtaatcccagcattttgggtgagtgaggcaagtggatcacctgaggtcaggagttcaagaccagcctgaccaacatggccaaaccccatctttactaaaaatacaaaattagccgggtgtggtggcacatgcctgtaatcccagcgactcgggaggctgaggcaggagaatggcttgtacctgggaggcggaggttgcagtgatccgagattgcaccattgcactccagcctgggaaacaagagtgaaactccgtctcaaaaaaaaaaaaaaagaaaaagaaaatagtgatggcgaataaaacagatgttggggctgggcatactttgggaggccaaggcagggggatcacctgaggtcaggaattcgaaaccagcctggccaacatggtgaaaccccgtctctaataaaaatacaaaaattagctgggtgtggtggcgcatgcctgtagtcccagccactggggaggctgaggcaggaggatcgcttgaacccaggaggcagaggttgcagtgagctgaaaccgtgcctctgcactcccgcctgggtgatagagagtgagaccctatctcaaaaaaacaaaaacaaaacagatgtcggcaacctgtaggacatttttggttgggtattcttccaggtacctcacactcagtaatctaatcataacccatcttcttaaaatctccttctgtattttcaattttagggtattttaccattcatttaggtatccaggcctgaaatctagattattcttcttcctcactttttacttccaaataacagccaagttctgttgggaacacagatcaagtatctccagagctgtccctttcctatgcccattgcgcaggcttgcttgtggcctgcctccattcgttctccacacagtagctagagtgatttgttttaaaaggtacatctgggccgggtgaggtggctaatgcctgtaattccaacactttgggaggccaagtcaggcggatcacttgaggtcgtcaggagtttgagaccagcctggccaacatggtgaaaccccgtctctactaaaaatacaaaaattagctgggtgtggtggcgggtgcctgtaatcccagccactcaggaggctgaggcaggagaatcgcttgaaccagggaggcagaggttgcaatgagccgagaccatgccattgcacttcagcctgggcaacaaaaatgaaactgtctcaatgaaaaaaaaaaaaaagaaaagtacatcttacctggttattcccctgcttaaatccttcaaaagatgtctttcttgccttcacgaacaagttcagtgtcttaggatggtattcacagctcgtcatgagcttgttgcagcttgtctttcttgtctgtgcctcaccatgtccatacacactcattcttaccaactactcagcgttccctaaacagtgtgtgtgctcacaaagcctcccaatctctgccggcgctcctttgttcctcgtctgcctaacccctacctgtcctgaaaaagaaacttaagtcaagtagtaagcacatagcatttgtatgtggttcgattttcaaaattgctctctgggatgattcagttattacatgaatatacagttagtgtaaatgaatttgaatcctgaaaacctaatataagatggtgaaaaaaaggtgatactctatgcacaagcaaactgctgatcgcatctccgaggaattgtagtatttctatgcatacgtgcagtaagtaatagaacatcttattgagcttaagccaaaaatgggatttattttaaggatacaggagtcttctttctgaacctagggatagaaagatagctgggtcacaggaagagactggaatcaagaatccaggtgctgccagggcttcctgtgtctgcatcattatcattacccttcagttccactctctatcacctcgtctctttgtcacttccttttcctctctcaacagccctggctagtccatctctgtgcctactgtgtactgctgtacatggctagagaaaaaaacaaaagccatgctggtgggtctaacttttccctcaactttctattctggacttttttttttttttttagatagagtctcactgtgttgcccaggctggagtgcaatggtgcaatctctgctcactgcagcctccacctcccgggttcaagcaattctcctgcctcagcctcctgagtagctggggttacaggtgcccgctgccatgcccagctaatttttgtatttttgatagaggtgaggtttcaccatgttgaccagactggtcttgaactcctgacctcaagtgatccacccgcctggcctcccaaagtgctgggattaaaggtgtgagccaccgcgcctggccctaaaaatttttaaatctgcagaaaatttgaatgactcacctagattcatcagtttattttttgttacattcactttgtctgtatataaatgtgtgtatatacatctatacacccacacatacttgttggttttggctgaactatttgaaagtatggagaaccactaaagcagatgggaactaggaggaaggaagggaaggcttcattgagaaggtaacatttgagcaaagatccaggtcagggagcaggatatagagcagttatggggcaagtggcgggaggagcatgcgggggaggaaggcacagctccacaataagcaaccaccagtgcccagctgtgtgttgaaggaagaggagaccgctgtacttcactgtattgttgtccacatattcaccacccctgtctggggaaggttctatttccccacgctgcgggggtagtttcggccctgtgactgttttggccagttaaatgtgaacacaattgaatgtgtcaccgctgggccagtgtggagtttgctctgcctcttgccctttgcctgggcgattgctagtgttcccattagaggctgctctttcaccctgggtcttggagtgaagacgttatggagcagggctacactttcatctgaatgttttcccacggtagatgtagtgggaaataataatggttttcattcttttcatcagaaattctgtgaaagaagaaagatgaggaaaaatggaaatttactgtgtcattgccatttgcatttatgtataatttgcactaataataatgttcattataatgtaaatctacatccttttaaaaaataaatggaatcattatgtgtacccttttgcaaccggctttttcaattcaattttttaaaaaatggaaaatacacataacataaaaatatgcctcattttaaaagcagtagatatcgaagtgaatataacatatatcattgttcccctccctccctccccccctccttccctcccccactccttccctctctccctctctaccttcgtacctccctccctttgtacctccctccctctctcccttcctaccttccttcccttttgtttctatttagaggcagggtctcactctgacaccccggctggagtgcagtggtataatcatagctcgcttcagccttgacctcctgcctcagtctccctagtagctggcactacacatcgtgtgtgccaccatgcccagctaattttttattttttgtgggattggggggggagggggtcttgccatgttccccaggctggttttgaacttgtgggctcaagtgatccccctgcctcagcctcccagagtgctgagattacaggtgtgagccaccacatctgaccatgaattttttttttaaggaaactgatgaattttagatcacagagctgtgatgtttggatgtaaatgcattttttggagaaacattgttgggcttagattaggcctactgtgaaattgtcatagcatttaataagtttcaaacatggccagctgtgaaaaaagaaaataaaaccaataataatactaggagttattggccaggcaggtggctcacgcttgtaatcccagcactttgggaggctgaggcaggtagataacctgaggtcaggagtttgagaccagcctgaccaacaaggtgaaacctcgactctactaaaaatacaaaaattagccaggcattttggcaggcgcctgtagtcccagctactcgggaggctgagacaggagaatggcatgaacccgggaggcagaggttgcagtgagccaagatcacgctaccgcactccaacctgggtgacagagcaagactccgtctcaaaaaaaaaccaaaacagaactaggagttattgtcatctttccaaggagactaccccaaagagaaagtatttccaattatttttctttatattggaattcacttttttttaaagtagaaaagtaagacacttttgtagaatgactgtttattaaacttataacagtgttttgtgggtgtttttccccacaaactgctaaaaataagaggaacagtttggcccatcctgtcttagcttctgcctgcaatcacaatggccttcactgttttgaatctatttttagttcatcaggaacgtgagggtgggaagtgctgcgtcatataacagattaggagaaagccctattttaatgtcgtttgtgaaataagaactgaaacagacaagaaaaactctaggaatgagatttcatgattagtatgtgtggctttgagttgtggtttaggacacaaattgaggaattggaagttctttatacttttttttttctctgtgagataggggaaaacaaaattctcttaaaaaaggacttttgtttaacttaaaggagattatgccagtcctttgggttaatgttaaaaaagtcaagtaaacaatgagaaaaatgtttaatcatattttggtgtgttgtgactattttttggtgtgtatctcatatgttctgtttgtgataaaaagtgaggttgcatctcttagtagtcaaattaattagatacacttttttttttttttgagacccggctctcaccgggttgcacagactggattttatggctctctgcagccttgaccttcccagactcaggtgatcctcccatctcagtatttgttgttgttgttgttgagatggagtctcactctatggcccaggctggagtgcaatggcgtgatctcagctcactgcaagctccgcctcctgggttcacgccattctcctgcctcagcttcccgagtagcttggactacaggtggccaccaccatgcctggctaatttttttgtatttttagtagagacagggtttcaccgtgttaaccaggatggtctcgatctcctgaccttgtgatccgcccacctcagcctcccaaagtgctgggattacaggggtgagccatcatgcctggccagtttttttttttttttttaagatggagtcttgctctgttgcccaggttggagtgcagtggcacaatcttggctcactgcaacctccgcctcctgggttcaagtgattctcctgcctcagcctcccaagtacctgggattacaggtgcctaccaccacacctggctaatttttgtatttttagtagagatgaggtttcagtatgctggccaggccggtctcaaactcctgacatgaagtgatcccacctaccttggcctcccaaaatgctgggattacgagcatgagccactgcacctggcacagttttcttttcttttttctttttcttttttttttttgagcaggagtctcgctctgttgcccaggctggagtgcagtggtgcgatctcggctcactgtgacctcctcctcccgggttgaagtgattctcctgccgcggcctcctcagtagctgggattatgggcgcgtgccaccatacctggctaatttttggtatttttagtagagatggggtttccccgtgttagtcgggctggtctcgaactcctgacctcgggccatctgcctgccttggcctcccaaagtgctgggattacaggcatgagccactgtgcccggccagtttttgtatttttagtagagccggtgtttctccatgttgcccaggctggaggtaaacctttatacctgtgattgcacaaagccattctcttgtgagtcccctatccagatattcccagggcctcaggttgctaaaccagttcaaagttaacaccagtgtagaaggcattcagaccacccaagggcattatcctctactgagagccctgctgtgggcagcccagaacgctgccccctgcatggctcttcctaaattttccagcggatctttaagatggggcaaaatgtattctcccaatcttctcctactccttctgtcatgtatggacctgcctctgtctcttaactctttcttcctgcttaatagtctgcaacatgcttcacaaagtcttgattcttcaaccttttttgaaaccttagaatcctttctttcttcaaccgcatattatagtgagtcagaacatttattctctgtttatatcactgagtagaacatctgaatttaacatcttgggctgaacttggcattgaggtttaaggtgacttcatattttttccaacaatagtgggtatgctcttccaatgataatgataacgtcaactaataaattagtcaattttatgttcagtgcatttttctagtatttctcatttattcagcagatatttagagagtacctaccatgtgtcagacactgttctaggcactggtgcaacggaagttcttgcttttaagaaacttcaattagggggatggtaactaagcaatacacaaataaatatatcacacatgtcatagggcagatcagagccacggagaaaaaataagtagggaaagggacagggtggtggttttctcacaaccctgtaaggaagatactggtttttttcttatttttttgagacggagtctcacttcatcgcccaggctggagtgcagcggtgcgatattggctcactgcaacctccgcctcccaggttcaagcgattctcctgcctcagcctcccaagtagctgggattgcaggtgtgtggcaccatgcctggctgatctttgtatttttagtagagacagggttttgccgtgttggccaggctggtctcgaactccagacctcaaatgatccaccgcctcggactcccctcggccgatgatttcatccccattgtacagatgtgcagtgtacggatgtccattgtgcagaaactgaagcagagagctgttaagtgacttatctggataggctccagataagtaaagtagtcagtaataaaggttgaatttgaattagaaatcaagcatgaactcctaaatttagctgtctgtaagataatgaaacttggcccggcatggtggctcacacttgtaatcccagcactttggggggccgaggtggaaggattgtttgagcccaggaatttgagaccagcctgggcaacatggtgagatgccatgtctacaaaaaattaaaaattaggtgggtgtggtggtgcatgcctgtagtcccagctacttgggaggctgagacaggagaatcgcatgaacctgggagggggaggttgcagtgagccgagatggtgccattgtactccagcctgggtgacaagagcgaaactccgtctcagaaaaaaaaaaaaattacatgctacacagaagactatatttaacatataaactatgaagaagaataagatgaatacccatgaactgattactcatagttgtaagtatacaacccagtgagttttcataaagtggacatagctgtgacattagtatccagttaaaattaaaaaaaaaaaaaaaaaccattaccagatccctagaatctcactcctgcctctcccgagctgcttcctgcccctttcccaccaaggataaccattatccaaactaatggtatagtttagtttttcttattttcaaattttatagaaatggaatcatccactctgttttttttacatctggcttcttttgctcaggggacatgggtaaatctgttaggaagcttttggagatgccctgctgttagtaggagttcaacaaacacattttgaatgaatggattaatttttctctttcaataagatgttgctctttaattatatgttaaaaggaagaagtggcagattgtatttttattgaatcaagtaaaaaaagaaaatctgatcattttgctcctacaagtgatggttaaatttgtgtcttagtgtaacttttgtttctcattgttttagtgaattaaattggctatttattcattaatttattttggaggtggagtctccctctgttgcccaggctagagtgcagtggtgccatctcagctcactgcaattgccctccacctcccgagttcaagtgattctcctgcctcagtagctgggattacaggcacgcatcaccacacctggctaatttttgtatttttagtagagacaggatttcaccatgttggtcaggctgttctcgaactcctgacctcgtgatcctcctgcctcagcctcccagagtgctgggattacaggcgtgagccaccacacctggccaattggctatttatttttaaatcttacctatttgaaatgaccaagttaggtcattttattaaaataacaacaagctttagtgtgttacaagcataggctgggcatggtgcttcatgcccataatcctagtactctgggaggccaaggtgggaggatcacttggggccaggaggttgagaccagcctgggcaacatagtgagacctcgtctctgtcaaaaattaaaaaaaattaattagctggacatggtggtttgcacctgtagtgttagatacttaggaggccgaggtgggaagattacttgagcccaggagttcaaggctgcagtgagctatgattgaaatactgcactccagcttgggtgacagagagactctctctaaaatgaagtgtaatatgcttaccgtaaattcgccatgtcagccaaggaggtgtgataaacagagatggtaagggaactaacatacagtatatacgtatttatgtatgtatttatgtatgtatgaattagaggtgggttgtcactgctttgctcaggctggtcttgaactcctaggctcaagcgattacccccacctcaccctcccaagtagctgagactataggcaggcaccgctgaacctggccaaaatacagttgttaaaaactcaagtgatagagcttgtaggaatactggtagagcgagttattctctcagaagagtacttttgctgaaggcatattgagttgttaaactctggtttggttatgaataatgtcattctctggcagaattgtgtttctgctgattagttatagaatgcccttttcccctcatgttgtagattcgacggaggcgccttgcacgacttgctggtggacagacctctcagccaaccaccccactcacctctccccagagggagaaccctccggggcctcccatagcggcatcagccccaggaccctctcagagtcttggtctcaatgtccacaacatgaccccagctacctccccaataggtgcatcaggtaagcccaagcttcatacctgggactcttttgtaattcttcttagctttttgttaagctgatggttgtgatgtttccagaacagattaaaatgaagcagacatcagctctttaaaatcctccaagcagtagtttaaatatcattgcaatgtgttgtgttatcgcttttttttttattgcaatctgttaaaccaattgcttttctttccataacttccatctttttttttttcaaacaggtttaggtattatctctgatgacaagatgattaagactgaatttggttctgctgattttatgaatttggttgatggttttaagataaaataatctgaaaatgcaagattaaaataatggtcaaaatgaacacctctaattgcagatttcctcgtcttcattctgcattggcacagaactttttctttaacttttcagaggataaaactacctgataggatgtttagaactatctcattaaaaagtaaaagtttatttctttataataaatgagctgatgcttgatatccaggactgtctttgttgggaaatgatatttctcatactgtgtatttgaaaatatctctcttttgtctgtgaacttttctatcaaatatagtattattgtcatataataataattactattttataattaggattctagttgcgtaaagggggtgctaagagaactgcattgatcataatatcatctaataatttgatagccttctgaatcatctgtcttcttgatctagaatcgtgtcaattaaaagtatttgcagagtttttgttgctgtacttctcgttaggtatcagtgtagactatagatatatataaatgtttatacctaatgtggttcaaccaaaacatctgttagtaataaagaagatccttgcctataatgtttcctctgtatgtctctgagaagctctgatggtcttctggtaggattgatgggttcaggattccaaatgtgattttccttggacacagtactgacaacagtgctctttgcctcaccctggtcaggccatacctggaatgctggaatctgtcctggagagaacctctctcactttgtcttacttgcttatttaaaccaggatcttggttaaatcccattccccacctacactggaataaggctatagaaaaactcagaaccatttgaactaattgaaaacttttgaaatgtctgtctcatttcgaattcatgattacatggctgggtgtggttgctcatgcctgtaatcccagcactttgggaagccaaggtgggtggatcagttgaggtcaggagtttgagatcagcctagccaacatggtgaaagcccgtctcacaaaaaaaatacaaaaagccgggtgtggtgctacctgcctgtaattccaactacaagagaggctgaggcatgagaattgcttaaacccgggaggtggaggttgcaatgagccaagattgcgctactgcactccaacctggtgatggcgtgagattctgtctcaaaaacaacaacaacaacaacaacaacatcaaattcatgatcacaaactcgggtagacccttgatactggcaggctgttgcaccatgcttcccagttcactcactctgctgatctgtttcataccttctcgagtgtgcagtacctcattctccatgctcactctctcagctagtggcctggcttcccatttctttctttctattttttttttttttttttttttttggagatgaggtctcactgggttgcccaggctggagcatggtggctgttcataggcgtgatcctagtgcactacagcttaaaactcccaggctcagatgatccgtctgcttcagtctctcatgtagctgggactataggcatgtgccaccacacctaactctggcctcatatttcattgagaaaacagatgcaggcagaacctaggcagggaacctccatcagcctcagtcatcacatccatctgcctacctgtatgtgcgcctggttcttgttatgcacaaattgtccctgctgctgttgaagcttggaccctagatcccatctcccttcagttactcagccttcactccagcagttcctttctctctcttgcttcatcagattttccatctcatatggcctttttttttttaacagcctatataatgccattacttttcccatcatgggaatgaacaaaaggaactctcttgatctaattccccctgccagcttctcccccacatctctgcaccaaaacctttgcagcagaacttccggaatgagttgcctgtcctctccatccccttctgcccttgcactctttgctgaatcaactgcagtcaggcgagggttcccgtggttgctctgtggttgctctgagtcactgtctggtctgacccatcagcctcattagacatggctttcacccacttctcctggaaacacgtttttcttttggcttccagaacagcacattctcctggttttcatgcattctctgtatctgttccttcttcactctttgcctggttccttttcatttccctgacttctaaatgttaggattcaagggctcaatatttaacctcttgtcctttccatccagctttattctcttactgttgtcatccagtgtcctggctttaattaccctcatttgatgattcctaagcttttatctccaacgtggacctgctccttgaacctcagattgacacatccagcgctttacctgacatctctgcttggatgtctaacaggcatgtcacagctagcatgccccaaatcaagctttgctgttgcctcacattttatcttctcccaggtttccatctcaataaatgacaattcatgttttctagacctggattggcaaactctttctgttaagggccagatagtaaatatttttggctttggaggctgtgaggttagaactgtttatctctgcttctgtagcacaaaagcagccatagaacatatgtaaatgagcaagtgtaactgtgttccagtaaaacttcacttacaaaaacaggcagtagcccagatttggcctgtggactagagcttgcttggccctgctctagacctgtcagaaaactagaagcagaccagattctcaccacctgtttcttctcatcacctccaccgctattacccaggtccaaggcaccagcatctcttgcctggatttctggaacagcctcctaactggtcatctcatgcccacccttgcttcacttgagtctgttctcagtgtagagccagaggggccccactaaagcataagtgcaacactgtgtaacagcccatatgctgttatcacaaactaacagaaaggcttgggcattccctaaacggttagttcttgcccgggtacctctatgctaagtagtcctgattatgtttctcacatagtcatcattattcataatcacaaacagttggatattattagccatactttggtgggttgaataaacagattttcatgatttcctaaataagtgaaaaaacaaacagaaaatctctcttaagacaggttacatctattctctgttcaggccaggtgcagtggctcatgcctgtaatcataatactttgggaagccaaggtgggaggatcccttgagcctaggagttcgagaccagcctgggcgacatagcaaaaccccgtctctacaaaaaattagcggggcgtgatggtgcacacatgtagtcccagttactcgggaggctgaggtgggacgattgcttgagcccaggaggtggaggttgccgtgagctgtgatcacaccactgcattccagcctgggcaacagagcaagaccctgtctcaaaaaagagaaaaagaaatttcaagaaaatatgatagctgtccgttaaagagtttaaaaagctggcatgaggaaggtgatggcttgtgtttattttctgtggtcctggaagttagacataggtctaatgggtagatttattatccaccgaatgtgattgagagatttttgttccagactcaaaaagtgcttctttctttctttctttttttttttttttttgagacagtctcactctgttgcctaggctggagtgcaatgacgtgatcttggctcactgtaacctttgtctcctggttttaagcaactctcctgcctcagcctcctaagtagctggattacaggtgcccaccaccatgcctagctaatttttgtatttttagtagagatggggtttcgccatgttggccaggctggtctcgaactcctgacctcaggtgatccacctgcctcggcctcccaaaatgctgagattacacacgtgagctaccacgcctggccaagaagtgctaacagagacaaacactgggtggggtgccacccatggtaaaaagtccttcatccaggagtgcttggcagcagtcatttggtggccctcttagttgggctgttttcagttgcaagtaactaaagcaaggattgagaagctgtagggggtccttccacttccagttgcttctcccatctgcagtcccagccttttttttttttttttttttttgagatggagtttcgctcttgtcacccaggctggagtgcaatggcatgatctcgactctctgtaacctccaccttctggtttcaagctattctcctacctcagcctcccgattagctgggattacaggcgcctgccaccacgcctggctaatttttgtatttttagtatagactgggtttcaccacgttggccaggctggtctcgaactcctgacctcatgatcctcccgcctcagcctcccaaagtgttgggattacaggtgtgagctgccacacccagcctagtcccagcttcttgcagtgccatctgcttctgtagtttcctagggctgctgtaacaacctatcaaaaacttttgaaggcttacagcagcagtattattttctcacagttctagaggctagaagtccaaagccaaggtgttggtagggcgatgcctcccaataaggggagaatcctttcttctgccttccgatagttgctggcagtccttggcatttcttggcttgtggcaacataactccagtcttcacgtccgtcttcacatggccatcttcgttctgtgtgtgtctgtgtccaaatttccctcttatgacagccactggattagggaccaccgtaattgagtatgagcttattttaacttgcttacgtctgctaagaccctccttgcaaacaggagtattatttctttgtttttgatctgcatctcctcttccctttgaatgtaaggttaggcaggagccttgccagtgttgctcatccccttacccccagcaccgtgcttagcacatggcaagcagtctggaaatgccaagtgttatgtggctaaatgaatgaaagaaatatttcttgttggaaatgttagaagcgaagtaagatttgagttcttttgaaaaacagctggctgacattgttcctctcaccacaaccagctggattgtctgtttttcctgatgtgctgagtgctgagcagaattttaaaaatcctcagtctattcattttcttctaaaattagaaaaaaagttattatataaaatatttcaaatgtacatgataacataactagtgcctatggaaccaagtccacaggtcattgctgttccagacttgccattccagatatttcttcatgttttactgcattgttatgtggcactgctcttggctctcttagaactttatatatatgggtgatgcttttcctacagatgaatgccacttttttatagttaacactgattatgctagtttttttttttttgagacggagtctctctctgtcacccaatctggaatgcagtggcacgatcttggctcactgcaacctccgtcacccgggttcaagtgattctcccacctcagcctccgagtagctggggttacaggtgcgtgccaccacacctggctaatttttgtatttttagtagagacagggtttcaccatgttggccaggctggtctcaaactcctgacctcaggtgatccacctgtctcagcctcccaaagtgctgggattacagatgtgagccaccgtgcctggctgattatgctacttttatatttaaaatgtagggcttactgcaggtcagacacagtacttggtcatgggaatgcaaagatgagtgagactcagtttctttccttaaagagcttttagcctagttggggaggaaatgttctttcatttcctgtttaatatctgtgtttattaaattctttggaggacagtctagttttcttagtttcttcccctatctttagatgatttgtgattgcttaatcttcagaacttcttaactgtctcgggttattttattttacagccttgttttggaattatgcttgtcttctctttgatgtttgcctatcaaacatcttgagtatatccaacgaaggccttaaccttcctcgctgttgtgacctctgaagaggaggtcatgattgctcaagagtcccccaacagatcctttatcaaccattttcatcttgacaggattattaggtctagtggaataggtcttccagtggaataggtctgcctgtatactctctagagctggcaggtttcatttttgtttttctaagacaaagtcaggctggagtacagtggtgcgaccatagctcattgcggccacaaactcctgagcttaagtggtcctcctgcttcagcctcagaagtagctgagactacaggtgcgcgccaccatgcctggctaattttttaattttttttgtagagatgaagttttactgtgttgcctaggctggttttgaactcctggcctcaagcgatcttcctgcctcaatctctcaaagtattgggattacaggcatggagttctccattgttttcattccatggttccctttggcaaactggggaagcctttgattggcttctcaaaatatacttttattattattttttgagatggagtcccgctctgtcgcccaggctggagggcagtgacgtagtctgcctcccgggctcaagtgattttcctgcctcaacctcctgagtagctgggattacaggcatgcgccaccacgcccggctaattttttgtatttttagtagagacggagtttcaccatgttgaccaggctggtcttgaacttctgacctcaagtgatcctcctccattggcctcccaaagtgctgggattacaggtgtgagccaccgcacccgacctcaaaatttacttttaaatgtgtataataaaataggattacacaattatataggaatataattatcaacatatttttaaagattgtaatacagttatttatatgcttctttattaatgatttaaatgaaagacttagcaactagtcaaactgcttcagccccttgacatctgtttccatctgtggaccacaggtaaagatcctctgctctgggagcagaaatgaacagtggggcctctttggaactagtgagaagccagatgatatatttggcctctgggctagttctggggtctggatcagaaacagaatttgtttcttttctttggctgctagtttttaacctacttaatgattatttaacttaaaattattctttaacatgttgactcaaatggtcttcatcctgcttccattcatgcacttgaatagttaataaatggcttctgtctgttgggcactgtattgagagctagggatgcaggatggataagtctcaggggcctccaggggctcactgtttagcatgagggcatgaacttgtgaagaggtgcagatgctggtgtcctgtacttgacagagaacagccacaaatagtcactttctcaggctcccggctatgcattgtagatttttttggagcattttcacacaggcatttatctgattgaaaattctactggctgggtgtggtggctcacgcctgtaatcccagcactttgggaggccgagatggagggatcatgaggtcaggagattgagaccagcctggccaacatggtgaaaccctgtctctactaaaaatacaaaaattagctgggcatggtggcgggtgcctgtaatcctagctactctggaagctgaggcaggagaatcgcttgaacccaggaggcagaggttgcagtgagccaagatcccaccactgcactccagtgtggtgagagtgagaatccatctcaaaaaaaaaaaaagaaagaaagaaagaaagaaaattctatgttggtgagagtgtaaatttatatagccattttacaaaacaatatggaggtccctcagaaaactaaaaacagagctaccatatgatctggcagtcccactgagtatatatccaaagaaattaagattcatatgctgaagagatacctctactcatgttcattgcagcattattccaaatagccaagatatggaagcaacctaaataatccatcttcagatgaatgggaaaagaaactgtggtatgtatccacaatggaatattattcagccttcaaaaagaaagaaattctgtcatttgtggcaacatggatgaacttggaagacaccatgctaagtgaaataagccaggcacagaaaggcaaatattgcatgttttcactcatacgtgggagcttaaaaagttgaactcatacaaatagacagtagatggtggttaccagaggctggggaatgggggtggatgaagaaggagatgttgatcgaagggtacaaaatttcagttagatcagaggaaaaagctttagtgatctattgtacaggatgttgactgtcataaataataacgttttatatattttttaaaattctactttttaaaaacaacaatattattattattattgagacgaagtttcgctcttgttgcccaggctggcatacaatggcacgatcttggctcaccgcaacctctacctcctgggttcaaacgattctcctgcctcagcctcctgagtagctgggattacaggcctgtgccaccatgcctggctaattttatttttggtagagacaggctttctctatgttggtcaggctggtctccaactcccgatgtcagatgatctgcccacctcggtctcccaaagtgctgggattacaggtgtgagccaccatgcctggcaaaacaacagtattattactttatataatatagggaacaacatccttccatatcctattataattggtttttttatgttttattttgagatggtcccactctgtcacccaggctggagtgcagcaatggaatctcgaatcactgctgcctcaacctcccaggctcaagtgatccttttacctcagcctcccaagtagctgggactcctggcacgtgccaccatgcctggctaattttttttttgtttgagttggagtttcgctcttgtcacctaggctggagtgtaatggcgtaatcttggctcgctgcaacctccgcctcctggattcaagcaattctcctgcctcagcctcccaagtagctgggattacaggcactggccaccacgcccaattaatttttgtatttttagtagagacgaggtttcaccatgttggccaggctggtctcgaactcctgacctcaggtgggctgcccgcttcggcctcccaaagtgctgggattgccaccatgcccatcctaatttttaaattatttgtgcagacaagttctcactatgttacccagtttggttttgaactcctgggctcaagtgatcttcccaccttggcctcccaatgtgttgggactacaggcgtgagccactgttcctggcctattcttatccctccaaatttgcttgatatgttttatctattttatatgtttgtttatgttggttgttacattgatttattgaatgctctaaattcacgtaggcttcacttaatacatatttatttaaatctccctatgcagtaggttctgttgtaggctatgtggcttatattttagtgagagaaaacaatttaaatacccagctgggcatggtggctcatgcccgtcatcctagtgctttgggaggtctaggtgggaggatcgcttgaacccaggggtttaagactagcctggacaacatagcgagacgttacctctacaaaaaaaatacacaaattagccaggcatggtagtgcgcacctgtaggcccagctactggggaggctgaggcatgagaatcacttgaacctgggaagtagaggtagcagtgagccgaaattgtgccatgcactccagcctggacaacagagtgagactctgtctcaaaaaacaaaaacaaacaaaaccacaaaatctttcagatgatggtaattatagaggaaaagagagcagtatgttggcataagtaccactgggggtgtgtacataatcactgtaggtcctattaagaaggcgactttttttttttttttttttttttttactttaagttctgggatacatgtgcagaacgtgcaggtttgttacataggtacacatgtgccatggtggtttgctgcacctatcaactcatcatctagattttaagcctctcatgcattaggtatttgtcctaatgctctccctccccttgaccccaccctccccctattaggccccagtgtgttgctcccctccctgtgtccctgtgttctcattgttcaactcccatttatgagtgagaatgtgcagtgtttggttttctgtttctgtgttagtttactgaggatggtggcttccaccttcatccatgtccctgcaaaggacatgatctcattcttttttacggctgcatagtattgcatggtgtatatgtaccacactttttttaatctatcatcgatgggcatttgggttggttccatgtctttgctattgtaaatagtgctatcgtgtacatgtgtctttatggtagaatgatttatattcctttgggtgtatatacccagtaatgagattgctgggtcaaatggtatttctggttctagaagaatgtgacatttttagcagaggcctgaatgaagtgagtaagcaaaccaagtggatatctgtggggcaatctttgcagacagaaggaaaacagatgcaaaggtcctggggcaagaatggacttgccagtgattgatgcaaggcagggctagagcagtcatcttcaatttcccctcattttccttctccaattttgagtctttaatgaacattatgattgcttattagtacatctgtaggaatgtcaacaagatcaaagccattcttttatggtaagttgtctttggctaagaatgctatccacaatgacaatgaaattctaactttggtcctatcattgattgctatattaaaatccttttttctttttttcctcttctacttggtccagagcttgggagaaagaattcgagggtggttaagcagctggctagaggcagaggctcagacagaagccccaaggcctgagggctgcagcaggaaccctaaaaggctactgagttcaggaggctcctagaagaggttgaaatcctttgctttttgcttattcattttaattatgagttggaacaggtgtgtcctatgctggcatgggtacttcctcgaattggactggccttcgggcccccaaaggggtatgttttattagttctgggctttatcttacagcattattcctagggtcatactaattactttgtgaatctggttaaagtgctcatgatatcttgttcttgagacgtgtgcagtgctgggaatcaatacacttcctgttttgacttggggttgattcttgcacttttccctatccgcagcccccaccccctgccccatttttgctaacctggtcctgcaacctctgctgtgcttgtagttttaccaactgcctgcttctgactccaaactgcccagtagcactctccccacacagtgggatgtgaactgtgccacggtactgcatggcctttgtcatgtgcccaagcctagcaaaggcacaggggcaaatactgtgtgtgagagtgatttctataccatgtgttcctgtcccttaaggatcttatggcttagtaggagagataatacatgtcactcacctgcttgaaagccttcctcgtctccttatttccaattataatctaatccgagggcttgcaaggtgctgtatcatcatgttccaccctcttcatgtaattcactatcttgattttcagagcatgttccctgttgctgtcccagtcaacatattcaccccaaaaggcctataaccagtagagatcgtgccacacaaaccactcttagttttgggtgcatttgtctggtcttccaaactagattgaaagctctgaaaaaaaaaactatcttgtgtttctatctgttgagctcatagtaggtatccaggaagtagtagggttgactgcattgatttgggactacactgggagttttcttcgccatctccctttagttttcctttttttctttctttcttttcttttttttctttttttttttgagatgtcgtcttgctcagtcccccaggctggagtgcagtggtgcgatcttggctcactgtagcctccacctcccaggttcaagcaattctactgccttagcctcccgagtagctgggattacaagcgcccgccaccattcctggctaatttttttttttgtatttttagttgagacagggtttcaccatgttggtgatgctggtctcagactcctggggcctagcgatccccctgcctcagcctcccagagtgttaggattacaggcatgagccactgtacccggcctctctccagtttccagttggaatccaagggaagtaagtttaagataaagttacgattttgaaatctttggattcagaagaatttgtcacctttaacacctagagttgaacgttcatacctggagagccttaacattaagccctagccagcctccagcaagtggacattggtcaggtttggcaggattcgtcccctgaagtggactgagagccacaccctggcctgtcaccatacccatcccctatccttagtgaagcaaaactcctttgttcccttctccttctcctagtgacaggaaatattgtgatcctaaagaatgaaaatagcttgtcacctcgtggcctcaggcctcttgacttcaggcggttctgtttaatcaagtgacatcttcccgaggctccctgaatgtggcagatgaaagagactagttcaaccctgacctgaggggaaagcctttgtgaagggtcaggagatgttcaccagccaaggttgtgtggttcagtttctcttttgttgataagatttgtcactgttttgataggggatgcataatggagtatttggatttgttattgtaaactatgcagcatggttttcaaaaaacaacaacacatctttataactttaatgcaactgtaaagggttataggtttttttttaacatcagttctatcattttacagagaaactgaggtagtaagaacaagtacagagttcactaacagcgtgcatttgatgcagccaccataaattcagaaaatatcctcaaagccctcctgtattcagtgacttttttttttctttgagacagagtctcgccctgttccccaggctggagtacagtggcgcgattttgcctcactgcaacgtctgcctcctggattcaagcaattctcctgcctcagcctcctgagtagctgggattacaggcacccaccaccacgcccagctaattttttttattttttattttttatttcttttttgagacagagtctcgctctgtctcccaggctggagtgcagtggcacaatctccgcttactgcaagctccacctccctggttcacgccattctcctgcttcagcctcccgagtagctgggactacaggcgcccgccaccacgccaggctaattttttgtatttttagtagagatggggtttcaccgtgttagccaggatggtctcgatctcctgacctcgtgatctatctgcctcggcctcccaaagtgctgggattacaggcatgagccactgcgcctggccaattttttgtattttttagcagagacagggtttcgccatgttggtcaggcttgtgttgaactcctgacctcaggtgatccacccgccttggcctcccaaagtgttcagtgactattaaatatgcactgtgaaatgtattcttagttatcagggaggggttgcaggggagaggaagtgaccttggatgtagagataaatgaggtatggggggactcaaaatcccgttatatgcatatatcctttttagctacaagagttaggtggattataatttacatttgtttgttcattgtgagttgtttttaacaagtaatgtcaatatagaagcgtcagtggatccataggaattacacttgtgtgattatttgaaatgataggttgagagagaaaagtcattcaacagtggtgggataaggttccctctctcttttctcttttttttttgagatgtagtctcactgtcacccaggatggagtgcagtggcatgatctcactgcagcctctgcctcccaggttcaagcaattctcgtgcctcagcctcccaagtagctgggactataggcatgtgccaccacgcccggctaatttttgtaattttagtagacacagggtttcaccatgttggccaggctggtgtcaaactcctgatctcggcctcccaaagtgctgggattataggcttgagccaccgcgcctggcctccccgtctcttttttagtacttaggtatgctaaaagtggacaagaccagagcagatgttgtggtaacaaggcaaatctgttctttacagtggagtttgccctgatttctcattctgttctcgtctgacgcatacaggtgtatctatagaacttgtaaacacgttcacattggtttttttcattggctcctcaaagtagaactatgaagtaggctgcacagatgccagtattaccagagcataggtaaaaatattaagtaagaagacttaagatcacaaaactagaaatgatggaactgggttccagtcctagtttctttgtaaaatgaacatttattttggactaactttcaatgtacagaaaagttatgaagatagtatacaggattcctgtgtacccttcatccagtctcccctaatgttaatgtctggttcatttgtcaaaactaagggattagcctggatatgattttgactaaactaaacatgagtctccttagtctccattggtctacaacagtatctcagttctgttttcatgatcttcacagttttgaagaatactagtcattactttgtagaatgtcccttaatttggctttgtctggtgttttgctcatgataagactggggttgtgggttttggggaagattatgtcacacaggtgaagtgcccttcccatcacatcgtatcaggggtatataatatccacatgatgtccctggtgctgttaaacatcatcacatgcttgagttagtgctggccgtgtttctccacttaaacttagtatttttccctttccatattcagttctttggtatcgagttcctaagtccatcccacacttaaggggtgggaattaaacttcacctactggagtggggaagtacatatgtaatctggaattctatgaggaaaacttgtcccttctcccctgctatgtatttaatctcttagatcagtatgaactcacacacatttattttatactttgggttatgatttcagtagcaacattacttattttacaggaattattccagctttgaccatgggagctctttcaagttggatccttggtccatttgacatgcctcttcttttatatttttgagcactgtctttctagcaccgtatgatgctctagacttatcttggatttttcctgccccagccctagaaatcagccagttctccaaggagcagtcctggtctactgactccagatgtatgattctatgcatgattctgccttttgacactaaggagaggaatattctgtcttgtaaatatgaagatcaaagtgattttctaattccggctgttggttttcttatcccagtatttaagataccattgttgttcttcacagacttgaaatgtcattttattttatttgttttttaaatttattttatttttttttgagatggagtctcactctgttgcccaggctggcgtgcagtggcgcaatctcactgcaacttccgcctcccgggttcaagaaattctcctgcctcagcctcctgagtagctgggatcacaggtgcccgccaccatgcccagctaatttttgtatttttagtagagacggggtttcaccatgttggccaggttggtcttgaactcctcagctgatccacctgccttgtcctcccaaagtgttgggattacaggtgtgagccaccacgcctgaccgtattttattattttattattatttttgagacaggttctccctctgtcacccaggctgggggacagtgacgcaatcatggctcactgcaagcttgacctctgggctcaagtgatcctcctacctcagcctcctgagtagctgggactacaggcttgcaccaccatgcccaactaatttttttattatttgtagagatggggtctctctattttgcccaggttggtcttaacctcctgggctcaagcgatcctcccacctcaacctctcaatgtgtcgggattacaggcgtgagccaccacacccagcccactttatttttgtttagtcacaagaacaaaatgttttctttttttgagataaagtctcgctctatggcccaggctggagtgcagtggcgcgatctcagctcactgcaacctctgcctcccaggttccagtgattctgctgcctcagcctccctagtagctgaaactgcaggcatgtgccactgcatccagctaatttttgtatttttagtagagacagggtttcaccatattggccaggatggtttcgatctcttgacctcgtaatctgcccaccttagcctcccaaagtgctgggactacaggcatgagccaccgtgctcagccaagaacaaaatgtttttatcaggaaattagctgctaagaaaatgtcagtctgctctatgaaatagaatatgtttattataatcagcattgaggcagaagtctgaagcaggaggatcatttgagcccaagttccaggctgccttgaactatcatcttgccactgtaccgcagcccaggtatcactgagaacatgtctctgaaaaaaaaaaaaaagttttcaggggtgagacttggtgttaaccaaataaagtgcaagtatactttgtattttccgtgaatattaacgctttagcttaattcattgtcaagagctatataaataagctttaggattttgattaatagaattaatgactccttttataaacctaattatttttaagttttacttttgtaattttttttttttttttgagacggagtctcactctgtcttccatcctggagggcagtggctcaatctcggctcactgcaacctctgcctgcaaggttcaagcaattctcctgcctcagcctcctgagtagctgggattacaggcgtgcaccagcatgtctggctaatttttttttgtatttttagtagagacagggtttcaccatggtggccaggctggtctcgaactccttgatccgcccacctcggcctcccaaagtgctgggattacaggcatgagccaccatgcctggttgcttttgtaatttttgagtgtataaaataggtaactttgttttaaaatatttgatccaaaggactgttcagcagtctggggtaaaggaattacagcattatgttaggaatcaggcagcctgtgtgtgtgtgtgtttttttttttaggcatggtttcactttgttgcccaggccgaagtgcagaggtgccattgtggctcactgcagcctcagcctcctgggctcaggtgacccacccccctcagcttcctgagtaggtgggactacaggcgcataccatcacgcttggctcatttttgtatttttcatagagacggggtctccctgtgtcacgcaggctggtcttgaattcctggactgaagcgatctactccaccttggcctccaaaagttctggaattataggcgtgagccaccatgcctggctgagacctgtgttttactctttgctctgtttctaacaggcgaggaggtcctaagggaagtttttagactctgtagacctagatattcttatctgtaaaagaggagggaagatggttggccattacctttaagaccaatgcccccaacaaaacagatttattgaggcgttttggttttttaaaaaatatgttgtagagatgatgtctcactatgttgtttaagctggtcttgatcaagcgatcctcttgcctcgaccgcccaatctgttggaagaacaggtatgagccaccacacttgaccttttattgaggtttcaaggacgcttttgacaattctgtgctctttttacggtggaatttagaagcctatgcatttgtgtgtgtgtgtgtgtgtgtgtgtgtgtgtgtgtgtgtaatactggaacaggcctaatgttacaagttaaaggtagatatttggtctagtttgtacttgaaagggaacatcattcaggaaatattacaatactaggagaaagtcttacagacatgaaatttttatgtcctttgatgttctgatcttcccacatagaatgcataatttcctttagcaaactcttctcagttatagaagttggatactgccgcctagaaggttgctaattcctgtttcctgaagcagacatagctttctccattctgtgttacacacctcacttgtggaaggtttgttctatagttgatatgtggggagtttattcatcttctaaaagagggttacagcagattatgttcattttttaattctttaatatctggctttgtgaagatgaaggaagaaaaaacctgtattccttgagacttggcttcctgaccatgattcctcaagtttggggtgggagagggcatgaagacaagggagtgtgtgaggtttgaaaacagtgatattttgtactattgatttgatgtgtttttagtcgcaatatttaattcacattgatttctaaataaaatcaaagacaccatcaggtttttgtgtgtgtccttttttttttgacacagggtcttaaaaaagacccatctgttgcccatgctggagtgcagtggtatgattatagcccactgcagcttctaattcctgggctcaagcaatccttccacctcaccctctcaagtagctaagattacaggtgcatgccaccatgcctaatttttattttttttttaagatggagtattgctgtgtcacccaggccgcagtgcagtggtgcgatcttggcccactgcaacttccaccacctgggttcaaacgattcttctgactcagcctccctagtagctgggattacaggctcccgcctctgcgccaggctaatttttgtattttagtagaaacagggtttcactatgttggtcaggctggtctctaactcctgacctcaagtgatccacccgtcttggcctctcaaaagtgctgagattacaggtgtgagccactgcgcccggactacctgactaattttttaagtattttgtagagacagggtctctgtgttgcccaggctggtctcaaactcctggcctcaagtgatcctctctccttgactccccaaaagtgctgggattacagatgtgaggcacgactgaccatcagtattttaaatttaagaaaggagagaaatgggttatggtggcatatgttctttgtttcagctactcagaagctgaggcaggaggatcccttgagcccagaaggttgaggctacagtgccctaggatcacacccctgcactccagccctggccaacatagtgagacccatctcttttgttttgttttgtttttgagacagaatcttgctctgtcacccaggccggagtgccgtggcacgatcttggctcactgcaacctccgcctcccaggttaaagcgattcttctgcctcagattcccgagtagctgggactacaggtgcatgccgccacgcccagctaatgtttgtatttttagtagagacagagtttcaccatattggccaggctggtctcgaactcctgacctcatgatccgcccgcctcagctcccaaagtgctgggattacaggcgtgagccactgtgcctggctgagacccatttcttaaaagaaaataaggaggccaggcaccgtggcttatgcctgtaatcctaacactttgggagactgaggcaggtgaatcacctgaggtcaggagttcaagaccagcctgacaaacatggttaaaccccatctctactaaaagtacaaaaattagctgggcatggtggcgcatgcctgtaatcctagctactcgggaggctgaggcaagagagttgcttgaacctgggagatggaggttgctttgagccgagatcgtgccattgcaccccagcctgggcaataagagtgaaactctatctcaaaaaaaaaaaagaagaaagaaaagaaaagaaggaatggagtcccctggtgtttagagattgaggagcacttgtatacataataaattgttgcagaattgccccacttgatccgaaatgtgaagatcatgtggaagatgcaggaaaaaatgaattcagatgatctctttgatgccttataaaaatattacaaatgcagtatgttacactatgtgatatacactggagctatattgctacagtattattgtacacatactatactatactacagatacagtttttaaaacaatttgtaattatgtgtttaattttataacttgttttgtagggtagaaattttaaagcctgcttatttactaccataatgatcattgaagtttattattgattaattttaactaaaaagttacttggcctttaattgtgataggtaaaataatattctcctaagaaccttgtgatggtgtattatttattccttcaataagtattttttcagggcttactttgggttatatttcctgaaattaatgaatcaaaagttttactgtattctgtgaacttgtttcagaattctcactacggtagatgctttgtgtattttacttgagtcctaggaagagagaaaatttagtttcttatttccttcataaatcctgcagaagttttaataaattagtacatgtgaagaactgctttcaggaatggataaatgttttataatattcttcaatgaagagaaacattaaaaagtggcaagtttactgtcatagaatgctggaagggttaaaattgtatttattcagtgattgttttcactacaacgggtaactcaagtttctctgttttcttttttcatacttttttttttcttttttttttgagacggagtcttgctctgtcacccaggctgcagggcagtggggcgatcttggctcactgcaacctccgcctcccaagttaatgcgattctcctgcctgaacctcccaagtagctgggattataggagtgggccaccacgcccagctaatttttgtattttaactagaaacagggtttcaccacattggccatgctggtctcgaactcctgacctcaaatgatctgccttcctcggcccctcaaagtgctgagattacaggcgtgagccatcgtgcccagccaatggtttttttaaacatgtgtcattttccttttcagcaccataggtatatatattttaaagtatttgcaaatgcctgggtaaacattcttcttttttcataggaagatattcatagagttaaagtaatttttaaaatttcaatgtaaaacatgattttaaagacattgatgggaaattgctgtgagaaatcatctgtccctgtactagtgactacagtttcactgtactgtcagctctgtgagggcaacaaagtgtcaggtttttaatttccactaaggtgttcaatcaataaatggatcgatctatatcaaaggacattgttgagtccacttgaatttttttttcaatattttactataaaaattgtaaacatacagtaaagttgagagaattttgcagggaacacccgtatactcaccatctagattctatcattaactttttttttttttttttagacggagtcttgctctgttgcccaggctggagtgcaatggcgcaatcttggctcactgcaacctccgcctcccgggttcaagcaattctcctgcctcagcctcctgagtagctgggactacaggcgcccgccaccacgcccagctaatttttttgtatttttagtagagacggggtttcaccatgttagccaggatggtctcaatctcctgaccttgtgattcacccgcctcgacctcccaaaatggtgggattacaggtgtgagccaccacacccagcctcattaacattttattatactcgctttatcacatatttttctataggtttattaatatatccttttattgtttttgagatggagtctcgctctgtcacctaggctggagtgcggtggtgtgatcttggctcactgcaacgtcttcctcccagattcaaaggattctcctgcctcagcttcctgagtagctgggattacaggtgcccagctaatttttgtatttttaatagacatgaggtttcaccatgttggccaggctaatcttgaactccaaacctcaggtggtccacctgccttggcctcccaaagtgctgggattccaggcatgagccactgcatcggcctggtttattaatatatcttcttttgggcgcatttcaaggatttttctggactatcatggaagttaatttgtatttctaatttgtatttgtgggccatagtttgaattggtgcaagagaggtgatgaggggtgagttttaggcattaggtgtagctctgttactgacctcatatgaagtatattgataacttatgatttcttagtaatgttcctatgattttattattgtttccagctttttatataatcttctgatagaaattcctcggttgctgcaatgtcatgatgggtgactgcagattgtgcgtgtttactgtcgctattacaaataacttgaacattatttcacatggggcttcatccttcctgtgttttctgtttaggagtagcccatcgaagccagagcagtgaaggagtcagttctctcagcagctcgccctctaatagccttgaaacgcaatctcagtctctctcacgttcccagagcatggatatcgatggtgtctcatgtgagaaaaggtaaaatgaagccagttttctaatatgctcttttatttagggaaagagaaagatccattcactttagcctctagtccatagtcagaaatgccagctagagacccatgccagtccttagcaaattagtgtcaaatgtattaaatttaaagattttgtattattcagaaatattcttcatacttttgttgctgttgagacagagtttcactctgtcgcccaggctggagtgcagtggtgcgatcatggctcactgcaatttccgcctcccaggttcaagtgattctcctgcctcagccacctgagtagctgggattacaggtgtgtgccaccatgcctggctaatttttgtatttttagtagagacagggtttcagctgttggccaggctggtctcaaactcctggcctcaagagatcttcctgccttggcctcccaaaggactgggattacaggtatgagccactgtgcgtggcccactatacttgcatattaaatgtcttttatgaaataatggtgtagtcagttaaaaaaaatctattgttctcattttgtaaatataaagttggcaagcatatgcctctccctaaaacttttactaattagtgaaatttaaaagtttggaatatttcatacaggtaagccaaataaataccctatttgcttcgtacggatcaaggtgtcttgaaagagccctcctgtgttgcatatgtgccaaaaatgggtggtaagagtggctgaggtattgactcctttcatggttgagcaagtcagactccttggacctggctcctctcccctcaagcagtggcctcggtttgtgtcagtgggctaaacagatgaagaggggaattaagtccgggctcgatggctcatgcctgtaatcctagcactttgggaggccgaggcaggtggatcacttgaggtcagaagttcaagaccaacctggaaaccctgttgctactaaaaatacaaaaacttagctgggcctggtggcaggcgcctgtaatctcagctactggggaggctgaggcaggagaatcacttgaacccaggaggtggaggttgcagtgaaccaagattgtgccactgcactccagcctggccgatagagtgagactccatctcaaaaaaagaaaaaggagaattaaaaatatgaataaggggctgggcgtggtggctcacgcctgtaatcccagcactttgggaaacagagacatggatcacttgaggccaggagttcaagaccaacctgtccaacatcgtgaaactccgtctctactaaaaatacaaaaattagctgggtgtggtgttgcatgcctgtagtaccagctacttgggaggctaaggcaggagaatcacttgaacctgggaggtgtaggctacagtgaactgagatcacaccactgccctccagcctgggtgacagagtaagactctgcatcaaaaaaaaaaaaaaaataataataataataataaccaaatagaatatctagaaatgaaaaggtaatttacattgagaacttgctgtaagagttaaataggggttagacatagctgaagaaagaattgacaaactgaaagagctgaggaaattacccagaacgtaccacaaagaacaaagcagatgaaaaatataaaagatatttagagatacagaggacagagtccttggtttctcctgaaatgtatctaggattgaaatttctgggtagaaaattaaaattgtagtgaatgcagatgttcagctttaaaaaagaaaaaaaagacaacaggggtccaggatatatctaaacatcaaaaagggagaatagagagttggagagatttccttctgctcactcttattccacatttttttctctactggtttgaaagatattattttaaaaaatcaggccaggagcatttgaaagatattattttaaaaaatcaggccaggagcagtggcttacgcctgtaatcccatcactttgggaggccgacgcaggtgttcacttgaggtcaggagttcgagaccagcctggccaacatgttgaaaccccgtatctactaaaaatacaaaaattagcggggcatggtggcatgtacctgtagtcccagctactttggaggctgaggcaggagagtcgcttgaacttgggaggtggaggttgctgtgacctgagatcgcaccgctgcactccagcttgggcaacagagtgagactttgtctcaaaaaaagtaataaataaataaacacatcatggaaaattgggtgtccatttcctcaagcatttgtccttattttttttggagacggagtctcactctgtctcccatactggaatgccgtggcacaatctcggctcactgcaacctccgcctcctgggttcaagcaattctcctgcctcagcctcccgagtagctgggattacagacatgggccaccacgcatggctaatttttgaatttttagttgagatggggtttcaccatattggccaggctggcctaaaactcctgacttcaagtgatccacccgcctcagcctcgcaaagtgctgggattacaggcgtcttatatttcaattaagtttgctttaaaataatacaatataatataaatatagtatatcatgatcaatttaggcttactttaggaatgcaaggatgcattgatattagaaaatctataaatatcatctaccatattgcatgttaaaaagaaaatccttataatgttggtagctgcaagagtttgataaaattccacattaattcatggtaataagaaaatgaggaacagaaaggagtatctttaaactcacagtgtggcacagacaaagttcaccaaatattccacaggctccccagaatttcccattctcttttacagttagattggggccaatgactagttctgtcctgtagactatgaactagagtgacgtgtcacttttagatgaaggcagttgagccaatgttcctcctccgtccctctcttctcttgctccagtgaccttggaggctgtgtattgcagatggcatagattaaagatggagtaaggatgcttcactctcatcagactttgtgtaagcaagaactaaatccttacagtgttaagcctcttaagatttcagagtgtatgtgttactacagtatagcctgtcttactctaactaatataaagggcatctaccaaaaaactacagcaactctcctattcagtggtgagaagttagcatcattttctgtaaaatcagcaataagaacaaggatgactgctatttcttcttgtatttagcagtgcagtaaaacaagtaaggattggaatggaagaaacaacagtaataatttgcagataaattatttacatgttggctgggcacagtggctcacacctgtaatcccagcacttttgggaggccgaagcagacagatcacttgaggtcaggagttcgagacaagcctagccaacatggtaaaaccctgtttccactaaaaatacaaaaaaaattagccgggcatggtggtgcgtgcctgtaatcccagttatttgggaggctgaggcaggagaattgcttgaacctgggaggcaggggttgcagtgagccaagattgcaccactgcactacagcctgggtgacagagcaagactctgtctaaaaaagaaaaaattatttacatgtaaactttctatgtataaataaataagttgcttataagaagtgtatatttaaaatcagttgcattcctgtctgccagcaacaaaaagttagaaaacgtaatttttaaaaaggtgccattcacaatttcattaaaaagtattaacatatggtacctaggaataaatttagcaaaagaagtataaaatttttatagagaaaattactaaagcttattgatagaccttaaagaagatcttaatacttggagagtaatgaaaactcagtaatatattacttctccccaagttgatctctaagagtgaaaaaaattttggtcaaaatcccgggagggtttttaaggaattcctcaggctgattcctaagtatgtgtagaagaggaaagagccaaggatagcaaaacctcttaaaggagaagaataaagtggagacattgacctagcagatatcaagatttgtgaagttttagtaattaagacaaagtggtattggccagggacagacaaattgtctaacagaacagtaatgagtctccagaaatagacccactcgttaatgaaaattggacacgtgacataggagctttcatattaatgtaaaaaggatgatctttccagtaaatggtgctagggcaattgttcaatcggggataaatgatatgtacttaaccagtttttataataagacttcagttgagttttttattttcttaattaaattttttatttttattttttatttttttgagatggagtctcgctctgtcgcccaggctggagtgcagtggcgcagtcttggctcactgcgagctctgcctcccgggttcaggccattctcccgcctcggcctcctgagtagctgggcctacaggtgcccaccaccatgcccggctaattttttgtattttttagtagagacgggtttcaccatgttcgccaggatggtctcgatttcctgaccttgtgatccgcccacctcggcctcccaaagtgctgggattacaggtgtgagccatcgtgcctggcctattttctcaattaaatttttaaaaatgtttatttaattttttttagagccagagtcttgctatgctgcccaggctgggatacagtggttattcacaggcacagtaatagtgcatacagcctcaaacttctgggctaaagtgatcctccagcttcagcctcctaggtagctcggaccataggcgcatgccaatatacctggcctggttgaattttatgtcattttaaaatactatatataggtaacctactttaatgatatacttttatttatttatttatttgagacggagtttcgctcttgttgcccaggctggagtgcaatggtgcgatctcggcttaccgcaacctctgtgtcctgagttcaagtgattctgctgcatcagcctgccgagtagctgggattacaggcatgtgccaccacgcctgactaattttatatttttagtagagatggggtttctccatgttggtcaggctgatctcgaactcctgacctcaggtgatccacctgccttggcctcccaaagtgctgggattacaggcgtgagccactgcactcggccaatgatatacttttaaaaagtaagcccaagaaaatgacaacttaggaaaaatatttccaacatgtataagagacaaattgtttagatcctaatttatgaagaactcttaaaaattaataagaaaaaagatggaccattatcattttcctttcctgattaactgatattttaaaacattttctcacccagcagctacagtgacattgtgcggatttataaaaggtaaaaggcttgtttgtcttttgtactttaagcatgtcccaggtggatgtggattcaggaattgaaaacatggaggttgatgaaaatgatcgaagagaaaagcggagcctcagtgataaggttggtaagcgatgaagcccttggtacaggtaatagaaataaacacatttcatgtcttgtatctgtagagtctgttagattggggccacccgaaatcaggaagtcctaggcaggtgattatttttattcttttgaggaaaaatgaataacctagattacccttattcatgaaagtgtaactcagtcctttgatctgataatatccatctgtttttggttcagggccatgattttatcagtaaatttaggttgtaataggaactaatttagagcaaattagaattctttctgttggtcttttgctttttttttttttttttttttttttttgagacagagtctcgctctgtcgcccaggctggagtgcagtggtgcgatctcggctcactgcaagctccgcctcccaggttcacaccattctcctgcctcagcttcccaagtagctgggactacaggcgcccgccaccacgcccagctaattttttgtatttttagtagagatgggttttcaccgtgttagccaggatggtcttgatctattgaccttatgatccacctgccttggcttcccaaagtgtgggattacaggcgtgagccactgcgcctggcctggtcttttgcttttaagcaagtagatcatcacatctttagcagtattctgaggaaaatgactgggaattgaagcaagaatatgtagaatctagtcgcaagtagaaggttttggaaaacatgaagcctttatatttgaatatcacctgagcttagtgctctgcatttagggtgtgtgtgtgtgtgtgtgtgtgtgtattaatatagataattacatcactttctgtttagtaaattattaggaatcctttagcaacacatgttaatgattattggaagttgcactgtaaacaaaaataaagacaaacaaaggaaaaaataagaagttgcactgtagcctcctagtggtgcagtgctttattttgtatagttctttaatgtttacaaaattcttttttatatgctgttttatctgtggtggtatgtaatgagaaatgttacaattttgaaaaattcctggaggaaaattggtcatgcacctggagtgttaacctggtcctatggaattcagaaaagtaaatagataggatatgtacatcctctgtcacatatttttccttggtgacttttgataatgactttgctctttttttttttttttttttttttttttttttttttttgagacagggcctcactctgttgcccaggctggagtgcaatggcgtgatcttggttcaccacaacctccgcctcctgggttcaagcgattctcctgcctcagcctcccaagtagctccgagtagccaggcccgcaaccgcgcctggctaatttttgtatttttagtagagacagggtttcaccatgttggccaggctggtcttgagctcctgacctcaggtgatccactggcctcggccttccagaatgctgggattacaggtgtgagccaccacgcccggccatctttgctcttttatgctccccatagattgtattgtaagctcatgagacttagatgttgtaactttgatgttataggaataggcttacttttcccctaatcagtgggtgaatggtttcatgcatttttaaaatatcatcactaataatgaattaaatcagaataacgtattcctattgaaacacctaactcatacctcttatttgaaattaacctgcaaatcttcttcttcaccaggagccttcctcgggccctgaagtgtctgaagagcaggccttacagctggtctgtaagatcttccgtgtctcttggaaggaccgggacagagatgtcatctttctttcttctctttctgcacagtttaagcagaacccaaaagaaggtaggaatctagctcagcagtcttactgcagagtactcgacaagaaaataagatgtgagatctttgccctctgttatccacattcactccatcttgctcttgggttgtatttttgatgacagggatacttcttgatgaggacacaattgtttagccactttcttccctttccactgatcttatcgataacttatttttcatttccatgatttctataatactatgtaaataggttaatggtctccattttctcagggttgaagtttttctctttgtagtaagaaggtgcttagagcattacctcctctttctttatttatttatttatttatttatttatttatttatttattttgagatggaatctcaccctatcaccaggctggagtgcagtggcatgatctcagctgactgcaacttctgcctcccgagttcaagtgattcttctgcctcggccactggagtagctgggactacaggcgtgcaccaccacgcccagctaatttttgtagttttttttgtttgttttgtttttgtttttttttttttttttgagacagagtcttgctctggcaccaggctggagtgcagtggcgcagtcttggctcactgcaactcccacctcctgggttcaagcaattctccagcctcagcctcccgagttgggattacaggcatgcgccaccacacccagctaattcttgtatttttagtagagacagggtttcaccatgttggccaggacggtctcgatctcctgatctcgtgatccgcccgccttggcctcccaaagtgctgggattacaggcatgagccaccgtgcctggcctcatttttgtagttttagtagagacaggatttcaccatgttggccaggatggtctcgatctcttgacctcgtgatctgcctgcctcggcctcccaaagtgctgggattacaggcttgagccaccgagcctggccttacctcctcttatgaagtatagatatagtgggtggtctccagggatcctgagagaagtgttctgtatgagctatacctgctttaagtgcctatgaagccatgtatagacggtggaattggtctatttggttaaattgcttagcaagatagaacataatgacattttgctgtgtttctgatattccactttaagaggccaagcttgtaacaaaataataaaactcttagcaagatatcagcatcatagggcactatcctttttctttacagtagtcatttggaacgcagaagaggtatgggaggtgtgctggagtggtttttttggcctatcactggaatgtaacttccctcatggtagggatttttgtctgttttactcattgatgtatccctagaaggatatcttgcacaaaatagtccctcaatagatagattttaaatggatgcgtgaatatcaaggagatcacctttctcttttctatgctgcctatcttctgaggagggaaaaaaaaagtcctttgtatttctggaggatagataagactatttctgattttacttattaactctgctaatggagcagaccatgtatttgaaactctgctacttgttattcttattataaatcttaagattctctgtcttacacatgtaagtggcaaatctgtcttacacatgtaagtggcaattttaaataaccaaatcagataaaatttccatgagttaaaacttttgttaaaacaagtgtcttacacatgttaagtggcaactctgtcttacacatgtaagtggcaattttaaataaccaaatcagataaaatttccatgagttaaaacttttgtttagtggtatttaaaatgtatctaaagaccaacagtaaatcaactgggagctgcaaagaataagaaggaagctagaatgtagcatttgctcctgaaagccacatggtgactagatgttggacccttcataaaatcttttgaaccttggacttaatagttttattactatctataaaacatatctagactaagaaatattaacccagttgcatttgtagtataataaagtaacctctatagttgggagtagcttctttttacaattaatatacatcagcggtaactctcaatgactgtaccccaactttctttttaataaacttttaattttggaatagtttcagttagtgcagggagttcctatatatactttacccagtttcccctgacgttaatatcttatataaccatggtacatttgtcaaaactaagaaattactactaactaaacacaaggctttatttaggttttccactaatatccttttaccattccagaatctaatccaggatactgcatcgaaccatttggggtcagctggcttattcaagggctgtgtaacctgtgttcgaactgtgtgtaacctgttctttgttctgcctttccaacagtattctccgattttaaggacttgattggccagattttaatggaagtgctaatgatgtccactcagaccagagatgaaaacccatttgccagtctgacagccacatcacagccaattgctgcagcagcacggtcaccagacagaaatctcttgctaaacactggctccaatccaggaacaagccccatgttctgcagcgtggcttcctttggtgccagctctttgtctaggtcagtgtggttctctttgcacatcttactggtagtaaaataactgtgaactacgtaggagaagggaatgtttgttgacagtgttaatcagtgtcatacagggtatggcatatatcatatttggggaggtggatttagtcattggaagtggaattctcttttctagattattattttttggctctctatggttaagatattgctagatgaaattttagaagcagttggctgtgtatactacatcattcttcgaatggggactttatcgtcttgtaagtatagcctctagatcaatagggcaattagattataattatttagatgtttatctgctagatatacttgaactgaaatgattctcctttaaaagcttgatattttctgttttagttagttatctcaagtttttctttgatttttctcttctttcctccctttctcaactaatttagcctctatgaaagtagtccggctcccactcccagtttctggagctctgttcccgtgatgggcccgtctcttgcctcaccttcccgtgcagccagccagttggctgtgccttccactcccctcagtcctcacagtgcagcctctggaactgctgcgggaagccagccttcatccccgcggtatcgcccctacactgtcactcacccatgggcgtcctcaggcgtctccattctgtcgagctccccaagtccccctgccctcgccagtagcccccaagcagtgcccgccagcagttccagacagaggcccagcagcacgggtccacccctaccacccgcctcacccagtgccacgagcagacgcccctcctccctgaggatctctcctaggtatttatcccacaggagagttgcatgtgtgtttgcggtgcagggaaaggagattaacacggtttggaagaagtgctgtgtgacactgactctgttaaattgttgttttgggttattaacctgtgtggctaactagtttggtaggcacgtactctgagtccatgcttctgccaggctctaatcatgctggaaagtttgggttgctctattctattgtgaatccctttcttccctttgagagttggggcacacaggaaccctttttggccttttgtcctgttgccagtggtagttgaaatgctatcagaccaagcaggtgtgggagcaaatctgggcctggtgttttttacttctggtgagtggggtgggtcggttcatgtcctgacgtgttgagttttagttatatgtaagttcagtctcttagaaggaagcagtatcagaattccactaatccagtggccccttctctcaaatgtacctgtatgtgtttctataatttaggtgaattatgtttctgcatgtcagtggccaaaagttttagtgtatggtttatttaaaaggacagcagttgcaaaagcttctccccgtcttgttttttctttgttctctgatggccttttttgcttttgttgtggtagtatgtacgacaatcctttctccttcctcttcctcgcactttctggggacagtagtgatgaagaagatgaagaagaagatgatgatgatggtgatggtgatgatgaaggtggtggtggtggtgatgatttttcttgtgtccagtttgggtccaggtatcagaggaatggagtcttacccctgcatgtgcgtagatgcttaggaactaacttctataagctctaacaaggggcgtgctttgaatccaggcaggatagggtcaaatgaggtgggctccagagtatattgatgtgttcagaccttctcatgggataaagtagcacataggagaattttctttttttctttctttctttcttttttttttttttttttgaggcagagttctgctcttgttgcccaggccggagtgcaatggcgcaatctcggctcacggcaacttcctcctcctgggttcaagtgattctcctgcctcagactcccaagtagctgggattacaggcacccgccaccatgcccggctaatttttgtatttttagtagagacagggttttgccaggttggccaggctggtctcgaactcctgacctcaagtgatctgcccgtcttggcctcccaaaatgttgggattacaggagtgagtcactgtgtctggccccagaattttcagagttgtcgcctggcaagtttggaggaaaactttatgtataatcatttttcaaaagcatgaaaacagattaaagatcagtcatcaagtttatccacctttagatctaaaatgagggacccttcatttatctattgcgagaatgttattgtgaactaccagatgtgacaacttgtactctctgaggcatgttttcttaagtacagttgcatgaattgctgctatttagtaacgggagaggggctgggatttgggggaggtgtgtgtgtgtgtgtgtgtgcgtgcgtgctcccttcccaccccctcccagcctccaccgcccccctgttcacccccattgagctcagtctgggcaatccatcgaagaacatatgaggtcataccatctgcataactgtgactttgctttcatgtctagccttaaatttctcttagcacctcctggacctcagtgaagccagaccccatttgtttaaagagcctttgaaatgaccgcagaggctgaaacatagttccggatgttgctgaatgtttacccctggaaaccgagtgaaaagcactacttgggttgtgtaggtgactttgagcaagagaatataatagcaccttctttctaatcctctgactcattgtcttacaattttgctcttaaattgaagtttcctgtggactgagttggtgtttgtgcccagcactgttcaaaaataactccaggctataaatagagactgcagtaggagttaggtacacttcattcaattcgatggtgttcagaagaatcattagagaatacgtaaagagacagaggaatgttgatgcaaggttgaatattgattcaggaaggttgatatttgtattacgctgaacattttatcaccatttctcaagtaaatttcccaaaggtgaaagtgtctttttcacgtagataaaatcctattgcatgattatagtaataaagcaggcatccttcctaggaaccagtttccacatggtaaaagtgctgtgttacctgttttactgtaaattttctgtgggagaaattctctctccctggcctatttagttgtgactttctctaacaaccgtatcagattgtgtgctgcttttactaatacctctctttctggacttctaacaccccagccttgcctcagatctaaattctctccctactaggaggaataaaatgtaccaagtgtataaaaatagctgcaaatactcatggagcattgtgcgccagatgtggtgtcagctctgtccatgtatcagcccctttactcctcgctgtagcctgctgtgaggaagtggcagggggaacgggggggccggggggacagacaagagggtcaaaatcatagaaatgcattcagacttgagcatcctgaatccagactcatgttcaccaccgcaccgtgctgccacccacttttccatttctgcccaaataggtcttgtttgttcttgttccttactactgtttttgctgccgagagtctgtgcatctactcggttcctttggcagggaagtgccagcatttcactccttaattacaaaatgccatcccagtcagttgatatgtcccttgttggccgttacagtgaactgtgatcatccagattttggcagcttataggttcttagttgatataaaaaagaatgccaaagcatgggtaaaaatacatgacataactatgtaaacaagtagaagaacttagggttcttctaagtagggtcagagccaagatgagctagcaaaaaaccttgttacttttttttttttgagacggagtcttgctttgtcacccaagctggagtgcagtggagcgatctcggctcactgcaacctccacctcctgggtttaagcaattctcgtgcctcagcctcccaagtagctgggattacaggtgcatgccaccacacctggctaatttttgtatttttagcagagacaggatttcaccatgttggccagagtggtctcaaactccacacctcaggtgatctgcccacctcggcctcccagagtctcaaacttctgacctcaggtggtccgcccacctcggcctcccaaattgctgggattacaggcgtgagccactgcgtccagccaaaaccttgttactttgagcagtcagcaaagaaatagtactttatccttccccctttctcattgatcttcccagaatttttttactctgaagtaagcaattttaacactcacttcttgcctggtaagactaatgtcatagaagaaagaatcatcaggggttggatcgctctctccatctgctggcccagtggattcgatgtcttataaatctttttggaagtagttgggacatacatttatatgttaagtatttataggggtgatgataaggattaattttaaaaaggtaaaacattccttctgtaatgttttgcagacttctgagaaaagaactgtttgagatataaagaactgctttttgcgcgagtggcataaatgagtgaagtgagaattaccgtgtgtgaaaagataactgttgggtggtgggcttaatgcatgggtgatgaaataatctgtacagcaaacctcctgtaacagaccttcatatgtacccccaaacctaaaataaaagttaataaaaatcaataaatcaataaataaaagctggaagttgatctgaaaaaaaaaattaccccatggtaaaggtaccgcagaagttatccggaggaaaatgtttctaattgtttcctaggaagttgatgactagaaagaaatttggtggttttgtgtttgttttttaactgtaaatatttcagtgaaggaggtcaaatcttgaatgtcacaagccttatatgagtagagaaagggaaaattagtgaatagtgaaaaacgttgacattgactctcctgtttttgctgattgtcactgcttggggttgaaacatagaaacagtggaaaagaaatcattctggctgggcacagtggcaagcacaggtaatcctatcactttggaggccgaggtgggaggcttgtctgagcccacgagttagaggctgcagtgagtcgtgatcatgccactgcactccagcctgggtgatagagtgaaaccctgtccctctcttctctctgtctctctctgtctctctctgtctttctctgtctctgacacacacacacacacacacacacacacacacacacacacacacacacagtctttccaccatatctatccctaagatcccccagtgatttcccttctcacacagagtaaaatccaaagcctctgaccatggtctacaaggccctgcatctcacgtacactccacatactacacacacacacaccacgcgctacacacacacccccacaccaagcatacatgcacatacgtgccccattctaacttaatctccctctacttgtctacttcccctaactcatgtactggactcctgttctttgcacgtaatactccctcctgccttaggcctttgtacttgtttctccccttcggaccactctccccactagacagctgtatggccggctccctcactctcctcaggtctatcagagggtggccactgacctcattgtctcaaacattatatagaacacacacgcacccatgcacgcacaccgtcgttcttcatccgcctggttccgtgcactattccaggacctacagcagtgcctagaacacagaacatccattagcaacatttgtttaatgaatttatagtgcctaaacctgcacaactctgactttgccttgctattagaaaatgcaaggccaggcgcggtggctcacacctgtaatcccagcactttgagaggccgaggtgggcggatcacttgaggtcaggagttcaagacaagcctggccaacatggcgaaacctcttctttactaaaaatacaaaaattagctaggcatgatggcatgtgcctataatcccagctactagagaggctgaggcaggagaatcacttgaatccgggaggcagaggttgcagtgagccaagatcacaccactgcactccagcctgggcaacacagcaagactctgtctcaaaaaaaaaaaaagaaagaaaatgcaaattccaaaggctgcatttgagaagtcagtaaatgggagagtaattatagaagaaactgaaacagagtcgctttaagagcaagttttgttagtgcatttaaaatgggattcagtctgcacagatcggatgcacgtgtaatccctaggcacatttacattgtgttttcagaaggatgcagctctgtttctattatgtgaagtaattacttggttacattggactgctaatgtagttatcagaaagtggtttgcatattctcccagagggaggtataattttctagatgctcttaggacttcaatatgacatatttccaagattttaggatgtcacagttgtaaaagcatcatgaattttgtacagctgagggaaaatattaaatactactttaaatatttagaaatatttcttttttgttttgttttgtcttgttttagacggagtctcgctctgtctcccgggctggagtgcagtggcgcgatctcagctcactgtaacctccatctcccaggttcaagtgattcacctgcctcagcctcccaggtagctgggattacaggcacccgccaccatgcctggctaatttttgtatttttagtagagacaggattttatcacattggccaggctggtcttgcacgcctgacctcaagtgatctgcccccctcagcctcccaaagtgtagaaatatttctccatagcataaatttatgcatgtactatattccgctttctccttcagtatcacactcaaaatttgaatctacctctttcagtttgaatctaaaaattcttgtaaatcagtttttgaccattgacacttaacgcttgtattagtgaaactggccacttttcttacttgtgatcatgatttactctggcacctttaggattaatattataattttgaaacacattgacaaatactgaggttgatgctacatttcctgtttggttaaagctttgtttaactccccccatctgccgccttgcaagtcagcttgtttggtgcctggctggtgatcactgtgttagtccatttgcattgccatacagaaagggtaatttataatgaaaagaggtttaattggctcatggtacctcaggctgttcaagaagcatgacaccagcatctgcttcttgtgagggcctcagaaagcttccagtcatggcaggaggtgaaaggggagcaggcaggtcacatggcgagagcaggagcaacagagaggaggaggatgtcccagactcttttaaacaaccagatctcacgtgaactcactgagtgagaactcactcatcaccagggggatgttgctaaggcattggtgagggatctgcccccatgatccagtcacctcccactaggcccgtgctccaacactggggactgcatttcaatgtgagatttggacaaacatcccaaccatatcaatcaccaaaacacactgagctcttttagctttgaacattctctcatagatcctgagtgcctttccttgcattgcctggcacaagaaaagcaatcgtctacatagtcttctacatacattgtcacttttcatgtgtgagtgcacggtttgtgaaaatatttcaagtggcagtgagggtttcaaatttaagttaaaatgaagtcggatgtattgctaggaatgggagtaatttcagtggcagttgcatgagccagcgccatctaagcctgctgagttcacaggcacgctcacatgctggctgggggtgctgcatcagactgaggcctggcagctggcaaggacctattgacatcaaacataagatgcttttcggccggacgcagtggctcacgcctgtaatcctagccctttgggaggccgaaatgggtagatcatgaggtcaggagatcgagatcatcctggccaacatggtgaaaccccgtctctactaaaaatacaaaaattagccaggcatggtggcgtgtgcctgtagtcccagctgctcaggaggctgaggcaggagaatcgcttgaacctgggatgcagaggttgcagtgagccgagattgtgccactgcactccagcctgggtgacagagcgagactccgtctcaaaaaaaaaaaaaagaaaaaaaaaaaaaaagatgcgtttcttcccagaaatgtaaagatgtgagaagaatggggcttattatcaagaaatagagtttcatattttcattttaaacatgaagaagatctattttcattgtcatctgcaagagctgttcataggaaaattaccctcaattgtgtgtaggtacaagcctgttttagcaaagttcatccttgcaaagtgcagtgaatatagtcactgagttatgaatgttagcagcagaggagggatcgcaggtcttgaaactaactaaaattgctacaagcaaagatagatatttattttttcctttcggggggttccctgcacttctctcattggttgatggctttttctgtttgttctagtgtgtgtttttcctgtgctttattacagtactcacttttcagttatcaagccagtcagcagataccagatcctgccattaattaataaagtataccaaaaaattagttgctataaagacacaataattggccaggtgctgtggctcacacctgtaatcccagcactttgtgaggctgaggcagatggatcatttgaggtcaggagtttgagactatcccggccaacatggtaaaacactgtctctactaaaaatacaaaaattagctgtacatggtggcgagcgcctgtagtcccagctacttgggaggctgaggcacaagaattgcttgaacccagaaggcggagtttgcactgagcagagatcacaccactgctctccaacctggatgacagagcgagactccatctcaaaaaaaaagacacaataattaattgcctttgtttgttaagggatcccacacggacctgcccagccttgtcatgactctggcgagggctttgtaggtggcttagttacctactcagtcggcagggagttggctgccttgttcctttgactgcttctcagcctcattgtctccctttgctttcacctgtcaggcctatgttataggttgttggagttcaaatttactagactctgggctgaacgccttgaatttcaaagtagcattgtttctccttcttactgaaatactttaataccatactttttttttttttttttttaatagcaggccaggctggtctcgaactcctgacctcaagtgatctgcccgccttggcctcccaaaagtgctgggattacaggcatgagccaccgtgcccagcaaatatcatagtcgctctcttgcccaggctggagtgcagttgtgtgatctcagctcacagcagcctctgcctcccgggatttaagagattctcctgcctcagcctcccaagtagctgggattacaggcacacgccaccatgcctggctaatttttttgtatttttagttgagatagggtttcaccatgttggtcaggctggtctccaactcctatacctcaagtgatccacctaccttagcctcccaaagtgctgggattacaggcttgagccaccgcgtttggccaatatcatacctgtattccaaggtcaattatgtgtagttttccaaagtctaaggacaatgatgtccatacagacatgtgtcctttaacgagagggatacattctgagaaatggatcgttaggcagattggtcattgtgtgaacatcatagagtatacttacacaacctagatcatacagcctactacacacctaggctatgtgatatatagcctgtttctcttaggctacaaacctgtactgcatgttagtgtactgaacactctaggcaattagatgcttatgccaattatggtgagtatttgtgtatctaaacatgtctaaacatagaaaagatacagtaaaaatatggcattataaccttgtgggaccactagggtatatttggtccatcacagagtgaaatgttgttatgtggcgcatgtgttacaaatgtgttccaaaattagttatgcatatctatctgtctgtaaaacatgtcaattcctcttggtcctgttagtttctagacattaattgtgtgtcctgggttgaagtagggatgtgtctctcacattcctgatgttcccatactttttttcttttattttaggacagcgtctctctttgtcgcccaggcaggagtgcagtggcatgatctcggatcactgcaacaacctcctcccacggtcaagtgattcttgtgcctcagcctcctgagtggctgggattacagacgtgtgccaccacgcccaacaaatttttgtatttttagtagaaacagggtttcgccctgttggtcaggctggtcttgaactcctggcctcaagtgatccacctgccttggtgtacgaaagtgctgggattacaggcatgagctaccatacccggccatattaccatcctttatcatcttctgtatgtaggttttttgccaagtttatgttttctcattttcttcatttcagtactccttactttttcctgtcgtaattaatccgtatgtgtcttttatgtatatcaaatccgtttgtgagttaaacaccagatttgttatgtggcctgtcaatggttgattttaactttgtttaatgtcctcaaatttaacccttgtgcttatgtttggtttttatctcagaggatagttactactaacataacagtgcttcacagtatagactgctgatattttacaaagcacctccacattatttcattaaaaccccactgcaaaagagatggaggttctagcttcaggtaacaagtaagcagtggggttgagactagaacccacgtctggttactcctagtacaatatttttgttttgtcttttactatactactttacctttttcactgatagttttagagtttttatgtcgatagcaaatatgttcatgtctcctcctaactggagagtttcttaacctttggttctattgccaaatgttagatgagggcttttgagatccatggtagaagtcacaaagatgagggctattttgtcagtcccttataacttttcccccaaagagtttgattacagcagtagcatagtctggctttaacctacagccctctgagtgatgccattctttttggttaaagtacctgtgatgtcccttccaatgcttaacacttggtaccagttcttagtgcttctggttttctaagttgccacctgcagtaagaagcagcccttcttaggtccctgaaatgttaccaaaagttactattgttggctttggagcaggtgaaacaagcagtcagggtggatcttggccgcatgggtgtttgtgctttgttatgtgtacagggatcctaacaggctttctgctgcagaaatgcaaactctgccaaaaataatcaagagataagaatcagaatttcttcttgtcttctctgaagtttgggagcctctggtggagcaagtaattgggattcctacagtgaccatttcaccattgaaacctgcaaagagacagatatgctgaactacctcatcgagtgtttcgaccgagttggaatagaggaaaaaaaagcaccaaaggtaatatgaaatggattaacttaaaaaaaaaaaagcctagttatttgtttgattatccccacccctggagcattcattgatttattcaatcagtaaagcaattattgagcatttgccatgtgccaggcacaatactaggaacttaggatgtgtcgatgaacaaaacagagatccctgccctcgtggaactcacattctaatagagacagagccaaggtttgaacctagatggcctggcttcagagtcctctcttgaccacactgtagctcggtaccgccagtgactcatatggccctgataattctactgctttgttataataaccaacattatagagcctctgtagattgccaaggactgtgccaggtcgacattagcttgtatcctcagttgctctgttagtgcagtggaacccggtataacataggcattcttttttcaacgtatgactaagcaaatgactctcagagagattaagtacttgtccagaatcacgtaaataataagttgcaaggctgggcttaaactcagtaagctacccttttcccatcacttctcttgactggcttcattgttttctcattttattcctatttcattttctgattttaattttacgttagaaacgaacctcgttgcccactggttagtttcatatttgtaaagggccttctttgggctttgttgtacttagccttagtggaagcgaaatgagtgggcatgtctccaaggttttttgttttttttgttttttgagatggagtctcgttctctcacccaggctggagtgcagtggcgctatctcagctcactgcaacctccacctcctaggttcaagcaattctcctgcctcagcctcctgagtagctgggattacaggcacctgccaccacacccagctaattttttttttttcttttgagacggagtttcactcttgttgcccaggctggagtacaatggcacaatctcggctcaccgcaacctctgcctcctgggttcaagtgattctcctgcctcagcctcccgagtagctgagattacaggcatgagccaccatgcccggctaattttgtatttttagtagagatggggtttctccatattagtcaggctggtctctaactcccgacctcatgtgatctgcccaccttggcctcccaaagtgctgggattacaagtgtgaaccactgcacccggcacacccagctaatttttatgttttttttagtggagatggggtttcaccatgttggccaggctggtctttttttttttttttttttttttttttttttttgagatggagtctcactctgtcaccaggctggagtgcagtggtgcaatcttggctcactgcaatctctgcctcctgggttcaagtgattcccctgcctcagcctcctgagtagctgggactacaggcgtgcaccaccatgtctggctaattttttgtcttttagtagagatggggtttcaccatgttggccaggatggcgtcgatctcctgaccttgtgatccgcccttcttggcctcccaaagtgctgagattacaggcgtgagccaccgtgcccggcccaggctagtcttaaacttctgacctcaagtgatttgcttgccttggcctcccagagtgctggaattacaggtgtgagccaccgcgcctggcctctaaggttcttaagtataagtttggtcacctcaaacttacgcttctttcttctctgacatcagtttctgcagaggcagtacacttggaaggcacagttactgtagctcgttcactaagaataaaggaagaggaaagcacgctgtttactgatggtccatcccttttaactcttatttttaacagcatggaattgtattgtttgtttcttgtcgtcctcacttccacctttccttttcagatgtgcagccagccagcagtcagccagcttctgagcaacatccgctcacagtgcatatcccatactgctttagtactacaaggctccctaacacagcccaggtatgaagacccgtgacgtgcttgacattagcaggcagagagccctagccgtcagtggacatcaggctctctggccattcttgcaccaccttagataactcccttcctcacctgtaaaatgaaggtccctttccttcgctaaaatactatgaaaataaacactcctttcttcctcatcttctaaagtagtacaaagcatattttaaaaagaaattagttatgttttaagaattctgcctgctttttgaaatagaccattgttgaactatgtggacaagcatggcagaaaattagtaactgactatacagcaactgcctgaagttggtggaggtatttgataaaatgtgtagatcatcaccttccatgtataacacggtcaatttctgttactgagtaataaacaatagtaatggaatggatagtttaggaatcaaccaaagtgctacattatttgcttctgagaatcctataaaggttgcaaatttttgtttttattttgtttttaaaaattttttttctttgcctctcagtcttctaaaggtagcaagtttttaaaaaggatgtgtatttcatttcttttatataaaaaatatctaaagggaaaagcttacatttaaaagtttaggccgagcatggtggctcacacctgtaatcccagcactttgggaggctgaggctggcggatcacctgaggtcaggagtttgagactagcctggccaacatggcaaaattccgtctctactaaaaatacaaaagacttagctgggcattgtggcatgtgcctgtaatcccagccacctgggaggctgaggccagagaatcgtttgaacccaggaggtggaggttgcagccgagatcgtgccactgcactccagcctgagtgacagagcaggactctgtctcaaaaaataaaaattaataaaataataaaaaattaaaagtttacaggccaggctcatgcctgtaatcctatcactttgagaggccaaggcagatggattgcctgagctcaggacttcatgaccagcctgggcaacatggtgaaaccctatctctactaaaaatacaaaaaattagctgggcatggtggcacgcacctgtaatcccaactactggggaggctgaggcacgagaattgcttgaacccgggaggtggaggttgcagtgagctgagatcacgccacttcactccagcctgggcaacagagcaagactgtctcaaaaaataataataatactaaataaataaaaattcacaaacataacattacatttatttattctaggtgttcttatgttattttgtatgccataaccatatgtttttgaaacttttcaaaaagaaggaaaattatatacatgtaccaaaactttaaaaaacgttccttgattaaaattaataagccctcagccactactaatattttttcccccaatttagatgaggcataaagaaacatataatacggccaggcgtggtggcttacatctgtaatcccagcactttgggaggccaaggcaggtggatcacctgaggttaggagtttgggaccaacatggtgaaaccccatctctactaaaaatacaaaaattagccaggcgtggtggcaggcgcctgtagtcccagctacttgggaggctgagcaggagaatcacttgaacccgggaggcggaggttgcagtgagccgaaattgcgccaccatactccagcctgggcaacagagcgagactccatctctaaaaaacaacaaacaacaacaaaaaaaacatataatacttcttttttatttttatttatttatttatttttaagagacagaatctcactctgttgtctaggctggagtgctcactataacctcaaactcctgggctcaggcagtcctcctgcctcagccttccaagtagccaggactccaggcacacaccatcttgcccagttgatattttcatcttttgtagagacagagtcttgctgtgttgcccagactggtcttcaactctgggcctcaagtgatcctcccacctcagcctgccaaagtgctggtattgcaggcgtgagccaccgtgcctggccatgcttccttttttcagtgcttcatttttaaagggctctatgtaggaaaagatgaattctttgaaaattcccatagtgtctcattaaaaagaccaaaaagtgattactattggtaagaagggttagctttcgcctgaaactattttgcagaatatttgggagatgtcaagtttgacttttgactgggcagttgttgctgacatgacatttcacgtgcctctgtagtgagttgacttcatcaccgtccctaatgttcatgggtccacaggtccttgcagcagccgtccttcctagtgccgtatatgctgtgtaggaatctcccatatggcttcattcaggaactggtgagaaccactcaccaggatgaagaagtgttcaagcaggtacggtcgtatgagtttgctcttgcaaattttagcctgagagcctctatgtcgaggctaatttctgaccattgaaaacttttgcctgaattcgaacatccatgtgttattagagagaaggcctacccaatattcttttgaggaaatcagattgacagctgcattgttcaaatcatgtgcccatttcaacgaatcagtcaaacatctatcttctaaacaaggtctgcactaggtgcttcgggcaatatgaaaaaaatatgtaaggccccgttcctgatttcaaggagcttttaaaacaagaatacccagagacggcataaggcatgatatgcatttgccagataagtagtgtcaaaaattcattctctgagtttgtaagattaacttaatgaccatattagctcattggcagcctgcatgccatatagaatctttgtcttcttcccactaggaaagatgtctcatatcttcctaattatttcatttggtatttatacattgttttggtatctcattgtgtaaagccaggtgaaaatgcagatatgtagtgcttaaaaataaagctgtgtacgtagtcttgaaggtttcttccaaggtgaaactttgttgttaacattgctgtttgaaggacctgtttgggaaagtaagcactttgcctttagcaactgtcacacaagttttttccctgatgaaagggcttttatcaaattttcttacagtttgctgtatcatcacttccttttttgtgactacagagaataacagaggcaatagctataattggtatgattcctttcactctgttttatacctaagattatttataactgttaattttaagacctttgaattcttgggaattgtgttttcagcagtcttcaaaatatttgtaaaagaagcagccaggatccaagaataaaaattccagttagtgttgtgtattctgtctggaattcactagctgtttatcttaggtgatgatcttactgactaatggaaatattaatggcaacatagtgagcttttcttctctagaagggtaagtgaactctcaggaaaataaatcactgtcggccgggcgcagtggctcacgcctgtaatctcaacactttgggaggctgaggcggatggatcgcctgaggtcaggagttcgagaccagcctggccagcgtggtgaaacccggtctctactaaaaatgcaaaaattaactgggtgtggtgacgggtgtctgtaatcccagctacttgggaggctgaggtaggagaattgcttgaaccaaggagacgaggttgcagtgagccgagattacaccactgcattccagcctgggtgacagagcaagactgtctcaaaaaaaaaaaaaaaaaaaaaaaaaattactgtcttggaaggtttgagtgatgcactacattaaagaggtaatgggtagtaattagaatacttttcctattcaagaagataccatttgaggaatcgagtagttctctctatataaaatcagcccagtgaccagctgaaaggggtatattgagcctactttattcataaacaaacttacacaagaggttatgaaatgacctctgggtgttttttgtttgtttgtttccccatcaccagctttggacagagaagtcctgcattttttaaattaagatgaaattcatataacatcaaaccaccgttgttgttttgttttgttttgttttgttttttgagatggaattttgctcttgttgcccaggcctaagtgcaatggcatgatctcggctcactgcaacctccgcctcccgggttcaagcgattctcctgccttagcctcccaagtagctgggattacaggcgcctgccaccacacccagctaattttttgtatttttattagagacggggtttcaccatgttggccagactggtgttgaattcctgatgtcaggtgatccacccgcctcagccgcccaaagtgctgggattacaggcatgagccagcacacctggcctcaagccatcattttgaagtgtacaattcagtggcatttactacattcacagtgttatacgaccaccacagacctgtttattctattaattaattaattaattttgagggtgagtctctctctgttacccaggctggagtgcagtggcgccgtctcagctcactgcaacttccaccttctgggttcgagcgattctcctgcctcagcctcccaagtagctgggattataggagcgtaccaccatgcccagctaatttttgtatttttagtagagatgaagttttgtcatgttggccaggctggtcttgaactcttggcctcaaggctggtcttgaactcttggcctcaagtggtccgcccacctcggcctcccaaaatgctgggattacaagtgtgaaccacagcgcctggcccagacctgtttgtttttaatcccagaattctgctgacttttcagccactcagtgttgaatactctttgtcttttcttatgtgctaccatgtgttttatctagagaggaatgataactgggatggagctgttggactgcaaagcagcattttacctttttgtcttgaaagagtggcaaatgtgaattattaaatctttgactgaaatatctacctccttttaatgtttgagaaatgttcacagataaataaatagcagctagaatttaggactggaggtggatacttacagtatttttaatcagtgctaggaggtattcatttgaaaattgaagaattatttaaaatatataggtcaggccaggcatggtggctcacgcctgtaatcctagcactttgggaggccgaggcaggtggatcgcctgagctcaggagttcgagaccaggctgggcaacatggcaaaaccccatctctactcaaaatacaaaaaattagctggcgcagaagtgcatgcctgtagtcccagctacttgggaggctgaggcaggagaatctcttgaacccgagtgatggaggctgcatttagctgagatcgcgccactgcactccagcctgtgcgacagagtgaaattgtgtctggaaaaaagaaaaagaaaaagaaaaagattatgcttagtaatattttacctgtgcaatgcacaaaaggataactatacaagaaagtgtaattatattttacttgtagcctccctaaaaaaatttggagatttttcaggacaaccagttatgaactaatttttggtgattctggaacctctgtttgtcttttcttcctcattacaatgttggcattccccagctccacacctgagtgttacttctccatttttatctggcatatgagagcaagttacatctaccttgattgttggtattgcagaaaccatagaatgatctcttccagagctgtattgatatctcacaacactccacggacactttgtcatccagggcacctgtgttttatactgtgctctttaaattattaaggtgctcatggaatgaaattagtaggaaagggaatttttcaagttttctagtggctacatagtatactcctattacaacttgttggcattcagattgtcagctgttgtttacaacatttctatttaatgttattagccttgaatcccaaccaactccctaaatgtgttgatcagtgcttgcattgtgaaatttgaagatgagctaggctgagtaaatcttacatggtgttacctggtattaatcataaatgtataaaagcagatttgagttcctttaagtgccaatagcaggttaatgtattaattacactatatgtggaggtaaggctttctaactaaagctttctttgtaaatttcaacatttaccaactagctctttgctctaatttaagtttaatgtagtaataatgttgattgttggcctgtttatcttgttttcctcaaaataaatggggaaaagcttttaaaaaatattgatagagggccaagcgcggtagctcatgcctgtgatcccagcactttgggaggctgaggcgggtggatcacgaggtcaggagttcgaaaccagcgtggccaacaaagtgaaaccccgtctctactaaaaatacaaaaattagccaggtgtggtggcacatgcctgtaatcccagctggctcgggaggctgaggcaggagaatcacttgaaccccagaggcacaggttgcagtgagccaagactgtgccattgcactccagtctgggtgacagagcgagactccgtctcaatatagatagatagatagatagatagatagatagatagatagatagatagatagaaaggaggaaatattggaacatttaattgaattttttaacaggttatagatgcttggtaatcaagaacatattagttgctgagatgtgcagaatttaattgagtagagcaacgactcctggagagttcttcaacaggctccaaatgtatgggttttgttgaattactgggttttgttgaattactgggggtcctgtcagagtattagagttcaccaaactcctcttacttctggagaattcagctgtattactttatggttagacttgtcaaagaacaggtcaacactctggctgaattctagacttttatatgcaaaaaagcttttccctggggaaggaatgaaatttggacattcagttctagcaccttatttgacatacttcccactcttagattctcttaaacttatatttctgattttgttttttttcttatagatatttatccccattttacaaggcctggctcttgctgccaaagagtgctccctcgacagtgactactttaaataccccctcatggtaaaactttgttctttttctttaactcattcaatagatgtttttctttcagattattttgacatatacttttctttcaggtccatgagatcaaccttgttttcaaatttaaaacatgaaatcactgtgttggccatgcagagtgtttggtgtgcagtgagatgcatcagtgaagacagttagcagcctggtacatcttccacctatccaagtcctagacaggagttaaatgcacttattacaatgtactttgtatagcttatgaaaaagataacttatctcctagcaatgagcataccatagttgggatgaaattttgttacttaaaaaaaaaaaaacctattaaaaatgcaaataaaaaaggcaaagctgtacatactaagaaaatgaatacaattttatctttatgtgtttactttgtgcagaaaatctcagtgtagctctcttgttcaccctccctgtttcctaaggtcatatttacttgggaagtagaaatctgcttagctctttaacgcacttagagcaggcatacattgtggacagaagcttcagctagattcccatggggaggcttgaatgttgtgaaaatgctgaaactagaatgaaaattagaagctcctttctgttctgaattcgcttatttgaaattttgggagaaaagtattttgaagtgttactgaatattttcgttgcagaagtgtaaaggaaaaaatatcaaaatgaaattagtttattctatgtataaattaagtcttatgtaaattgagaccatggttgtttttcttactgtatttatttcttttacttattccactgattggattccattataccatgaattcattactgacgatctgttctgtgctagacactggtgatacagaagctaggaagacaaggtccctctcctcaaggcactcataatctactgcaaaaataagagctacagcgcaacagttgaacagatactgtgataaatgttaaaacagagctgtacacaaagggtgtatttatctatttaaaaaattcaaacctgtcatggcactaaaaggctacaagaatgctgggaaattagaaggtgaaaccagaattcctactttaaaaaataattttaagtggatttatgccagagctctttccattgtacatgttattggggctcctggtaaaattatttgaatccttatgtattgttctccctgtggcagataaaaggaagtggaataatctgattgtttgagttcagtgatgaaatattttagtgaacactaattatcaccatattatgtagatgttccttcatgggactgttggcttttgggttgtggtgtgaattagcttgatgtttcagtgaggagcttttagcatctgatatcaccaaaatgtccttttgttcaaaagacagaggcctccattgtggtagacagtgatttcattttgtgccattattgatgcttgcataataacgaggacacagtgagtgagagggtacaataatgagaggcaggaagcggaagactgttgaagctaaaatcagaaatcattgtgatcattctctaggtcagtggatcctgctgtgccatacgttggaatcaccttggaatcagctggggatctttaaaggtgtttctgcctggctccccaccccagaccttgtgatttaattcaccaggggtgtggcatggcattggggtttccaaaggcttcccatgtgatcctaatatgcagccacgtttgtgaactcctgcactaggcagtgagaacgcttccttctgagttgaggctgcctgaacctcaaaggcatctcaacgttgtgtcaatgcctaaatgcactcttcggctcatgtagcaacttctagagctgcgtccgaatcacagaggaaattaactgttgaaaataatgtttgattgagttaccatgggcatgctaaattatgtttatgtccctaaaaagtgtttttcatcgttctctaatgttaggatggttggatgtctgaaggaaagtgttggaattcttaaaagtactagaaatcttgaaaccaagttatgtttttaaatatgttttgaatttgatagcttattaaattgtaattatttatagtcatgtttaacactggcaagaggagccatctaaagtttatgaaataaatctttttgacatggaaagatatgaagtggaaaaacttttttgtaaaaaacatatatagatacagtacacaaaaatatatctgaaaactgttgctcaaaatatcaatagaggttatctttgagggtaaagcttgagtaatttttagtttcattttatatttctgttttatttcaagttttcacattgcatgtgttttagtttattaatcagaaaaagtagtgaagctgctgccatttcagagggaatgcatgtgtgccattttagagggaacgaatttatagcagcagttaaaactgtttctttatgctacaaatgacagtcagtttaagatgaaatgcatttaaatgactctgatcttatttctaggcactaggtgagctctgtgaaaccaagtttgggaagacacaccctgtgtgcaatttggtaagcactcacctgatgggcttgcacattttcagtgaatatatcataacccagaaggcattcctctagtgagatggcctggaaaatgtctcttgaaggacatttaggtgtaggcggaggtaacgtgtctgggaggctctcaactgttacatttttgttagacacgttatatcctgcattacagttgttcatttctatgatttttttcccttttttttctaagaatctcactctgtcacccaggctggatggagtgcagtggtgggatcttggcacactgcagcctacgcctcctgggttcaagtgagtctcgtgcctcagcctcccaagtagctgggaatacaggcatgcattaccatgcgaggctaatttttttgtatttttagtagagatggagttttaccatgttggccaggctggtctcgaactactgacctcaggtgatccacccgcctcagcctcccaaagtgttgggttacaggcgtgagccaccgcaccgggcctgttttttttcccttgacaagtattgtacaactaaactaacaagaggtatggaaaagttattcgagtcctttggtggtataagaagagttcatttgaacttcatccaatagtatcctgaaacttaaacattcttttttttgagacagagtctcactctgtcacccaggctggagcgcagtggcgcaatctcagctcactgcaacctctgcctcctgggttcaagcgattctcttggcctcagcctccccagtagctgggattacaggcgcacaccaccacgcccggctaatttttgtatttttagtagagacggggtttctccatgttggccagggttgtctcggactcctgacctcaggtgacccacccccacccacactggcctcccaaagtgctgggattacaggcgtgagccaccatgcctggctgaaacataaaagttttaataatatcttgtgaaaatacagaggagctggagagttttcattacatttttaccccaccggcctgttcagcggcttgactggctcttccatcttctgcctaggttgcttctttgcggttgtggttgccgaaatccttaagtcctggctgtgggcgggagctgcagagactctcttacttaggggctttctttagcttctcagtctttgcagaagatgatgtaagtatagtggctacttgtactttgctgcccttttattcagattctttcccaaatgtgcattatatgttgactgcattttttccttctctttccaggttaaagtggttgaaaaatacttctcagggcctgccattaccctggaaaacactcgtgtggttagccaatcattgcagcattacttagagctcggaagggtaagtgttcagtaaacaaatccagaggaagtatcaaagatgagctccagatacagagcttttattttgtagactggactatgcccagtagacaaacggctaacaaaagccaattcgatcttacataaaaaagataaactataagtaagtagcctgtgtcttgaataacaggttgtaacaacagcagtatgctgcctttgtatgtagcatcactgggaactggtcctaagcttagtggcccggctcctcctccagctggcccttaggcatttacactgtgagggtgagcaaggattgttagtttgcacacaccctcactgacttgcttatcccaaatgcagattaatatgtcttcaattctcaaacttaaaggcagagaagggccgggtgtgatggctcatgcctgtaatcccaacactttgggaggccgagtggggtggatcacctgaggtcaggagtttgagaacagcctggccaacatgacgaaaccccgtctctactaaaaatacaaaaattagccaggcatggcagcgcgtgcctgtaatcccagctacctagctactcgggaggctgaggcacaaggatcacttgaacccaggaggtggaggttgcagtgagccaagatcacgccactgcacatcagcctgggcgacagagcaagactccatctcaaaaaaaagaaacaggcaaagaagttacaggcttgggtaactaaggtaattttgatcatgggaaagaagtaacaaagcctattttattaaaactgtaactgccggctgggcgtgttggctaatgcctgtaatcccaacactttgggaggctgagatgggctgatcacgaggtcaggaagtcatcctggccaacatggtgaaacctcgtcactgctaaaaatacaaaaattggccaaggcaggtggatcacgaggtcagcagtttgagaccagcctgaccaacatggtgaaaccccatctctactaaaatacaaaaaaaattagctgggcatggtggcgggtgcctgtaatcccagcgacttgggaggctgaggcaggagaatcgcttgaaaccgggaggcggaggttgcactgagccgagatgtgccactgcactttagcctgggcaataagagcaaaactccgtctcaaaaaaaaaaacaacaaaaatgcaaaaactagctgggtgtggcggcgtgtgcctgtaatcccaactactcgggaggctgaggcaggagaatggcttgaacctgggaggcgcaggttgcagtgagctgagattgcaccactgcactccagcctggcaacagagctagactctgtctcaaaaaaaaacaaaaaactgtaactgcctacctcccccactccatattctgctttcatgctcattactttgacatagttggatgtggatatttcttatattctttcactcaggctcttctaaaatgagtagaagtgggagaggagagaacgtgggaagtaggctagctgttcgtgaagtcaaaaaggaatcatgtgcaaaatagttttaatttgtttcttctttttaaaaataaatttcagcaagagctttttaagattctgcatagtattttgttaaatggcgaaacccgtgaggctgctctcagttacatggcggctgtcgtcaatgccaatatgaagaaagcacagatgcaggtaggattcctacagactgcttttcgctgtttgtcaaattcattcatctgacccagatttagtcagcacctaccaggcactgttctaggagtgggggtacagtattgaacaaggtagacgagcttcctgcttttgtggagcccatgttccacagaataaacaagtagacatataaatacatgattttagacagttgtataatcagtgaagaaaatagagcaaagtaaatgacatgagaagaactgtaggtaccagaaggaagatctgaaggtgatttttgattgggtggcaggaaaggcctccctgaggaggtgacatttgtttcataggaaggagccagccattgtagtggctgagaaaagagctatccaatgtggaaacgaagcagctttggtacaagcccagcacgcaggcttttgtggctggagaagagtgaacaggagggaatgtcgggtcctggagttagtggataggcagggcgccatcgggttaggtttacgtgatcagaactgtcatgggagggttttcagcagggaaaccacaaaagctgctatgtagacggaccaaaacagaagggggcagccaggaacagacccaagggggcagccaggaacagacccaagaaggcagctgcaagggcgtgagtgcttcggtccgggtgagacaggccagtggctgcagctgctttgccagaggagaaaagggcatccttccttgactagtaataaataatgaatgaatgatgtgatgtgtatactcagaagcaaaaatcatgtagagagaagagcacagatcttgtgatttctgatcgtggttccaccgtttactaactgcgggaccttagacagtgactcctctgtgcctccatttcctcatctgctaagctgcggtactactggtactgggtttattatatataaagctgttagagtggtgcctggtacacagtgatcactcaaccaatattaactatcattcttatcattgttgtattattatttttttcttaacagaggtaatcaagttacattgttatattgctaatgcaggagcatgctgatgctgtcacctagagaaacaatgtcacatgataagaagtggagcaacttgttttgatgctcttgagggaaataaagaggagaaagaggccgggcatggtggctcacgcctgtaatctcagcactttgggaggccgaggtgggaggatcacttgagcccaggcatttgagaccagccctggcgacataatgagaccccatctctacaaaatatacaaaagtcatctgggcatggtggctggtgcatgcctatagtttcagctacttgggaggctgaggcaagaggatcacttgagccagggaggtcgagaccagcctgggcaacatagggagaccctgtctctacaaaaaaaataaaaaattagccagtatagtggcatagacctgtagacccagttattcaggaggctgaagtgggaggatcacttaagcccgggaggttgaggctgcagtgagctatgtttgcaccactgcactacagcctgggcaacagagtaaaaccctgtctcaaaaaaaaaaaagaaagaaagaaagaaacatttattgtgtttctacttactaattttgagcctcaggcaaatcacttcagggtctctgagtctttatttcctcctgcataaaatgttaacagcagtattactgacctgtaagaattatcgtgatggttcagtaaaagaatgtataaaatggccaagcgtggtggctcatgcctgtaatcccagcaatttgggaggccgagacgggcgtatcacctgaggtcaggagttcgagaccagcctggccaatatggtgaaaccccatctctactaaaaatacaaaaaatttgccgggcgtggtggcgggtgcctgtaatcccagctactcgggaggctgaggcaagagaatcacttgaacccgggaggcggaggttgtagtgagcgaggatcgtgccactgcattctagcctgggcaacaagagtggaactccatctcaaaaaaaagaaaagaaaagaaaagaatgtataaaatgcctcttatataaataataattatataataggcggtattcaacaagtagcacctgctaatatagaattaatggaatgacagtggtgatgagatatatgtcttctcattgactttaggatacagttatgtttgaaagttcagtctgctttcttacaaagtttgccaaaatttctattcatgttattttaaatactttttcttggctggtcacagtggctcacacctgtaatcccagcactttgggaagctgaggtgggcggatcactttaggtcccagctacttgggaggctaaggtgggaggattgcttgagcctgggaggtggaggttgcagccaagatcacaccccttcgctccagcctgggcaacagagtgagaccccatctcaaaaaaaattttttttaatgtttaaaaatactttttcttttcaactttcacagacagatgatagattggtgtctacagatggatttatgctgaatttcctttgggtactgcagcagctaagtacaaaaatcaagttagaaacagttgatcccacgtatatttttcacccaagatgtcggattactcttcccaatgatgagacgcgtgtgaatgcaacgatggaagatgtgaatgactggctgactgaactctgtgagtactgtgttcgtgactcggtcattaaaacactgccctcttgtctgtgtgctagtagttcctcacagattgttaccacctcaccataaaatgaacttaagagatagagaaacataataaaaattaatacagtaggcctggcgtggtgactcatacctataatcccagcactttgggaggccgaggcaggtggatcacgaggtcaggagttcaagaccagcctgaccaccgtggtgaaaccccgtctctactaaaaatacaaaaattagctgggcatggtggcacacgcctgtaatcccagcactttgggaggctgaggtgggcagatcaaaaggtccggagttcatgaccagcctgatcaccatggtgaaaccccatctctactaaaaatacaaaaattagcgggtgtggtggcacgcacctgtaatcccagctactcaggaggctgaggcaggagaattgtgtgaacccaggaggctgagcttgcagtgagccatgatcacggcactgcactccagcctgggcaacagagtgagactctgtctcaaaaaaaaaaaaaaaaacagatacaaattgaaaaaaaaaatcaagttatcataatatatctataaaaaagccaaaaccaaagtgataaaatagaatgtaagtttttgaagaagtaggtgatatttaatcaatttatttaacctatctgaagtgaattctggtgattcatagcaaaaaatataatactgttgttctcaataattctacttttcaggttatattcccaaagttggaggaaaaaggaataattttgtttacataaatcctcccagtagtaacattatttataatagaaaaaaattagaaaaaagaaatatgcagggaaacggctctggaatcagtagtttattaacataatttaataccatttcgagatttaaatatttctgtattgtgttgaaaaatggagattttatacaatacatcagtaaggaacatcaccaaagattgttgatgggctgggaatggtggctcacatccataatcccagcacttttggaagctgaggtgggaggagagcttgagcccaggagttcaagaccagcctgggcaaaataaggaaaccccatgtctacaaagaaaaaaattagcccagcatggtggcacatgcctgtgttcccagccacccaggagactgaggcaggaggattgcctgagcccaggaaattgaggctgcagtgatctgtgatcttaccactgcactgcactgcagcctaggtgacactaggtgacagagtaagaccctcttaaaaaaaaaaaaaaaaaaagattgtgatggacatctgtatgcacatttaacgaggtaggacagaatacggtggtccttgaatggagctaacaggaattctcttcttcttgtagtattgtttaagtttataattgcaaaagtatccttaaacttctggccgggcatggtggctcacgcctgtaatcccagcactttgggaggccaaggagggtagattgcctgaggtcaggagttcgagaccagtctgagcaacatggtgaaacctcgtctctcctaaaaatgcaaaagtagccaggtgtggtagcacacgcctgtaatcccagcttactagggaggctgaggcaggagaatcacttgaacctgggaggcggaatttgcagtaagccaagatcgtgccattgcacttctgcctgggtgacgagagcaaaagtccatctcaaataaataaataaataaataaacaaataaaaagtatctttaaacttcataaaaattcaaatgtaattttctcttctgaattcagctttttctctgattgagacatgtaatagattttatttagggaatgatgttatttttcctagatggcgatcagcctccattttctgagccgaaattccctacggagtgcttctttctcaccctgcatgctcaccacctctctattctgcctagttgccgtcgctatatccgcagactccgggctatccgggagctcaataggtatgtgccatgataccgtgtcctgggattgcctgagttaccactttttctcaggggcaggcaattccattgtgaacagtagttttgaatgttgggggaggtatgtacgttatatagtgttctgtctgcctccaccgccacatccatgttgctcagttgtccagagttctttacctggtgaagtgatccaaaccttgatttctgagagttctgaaccctggatatttcactctgtttatggttactacagacttccattaacttttcccactgggcatacattaccaggaggcacttcaaactttaaaagtttaaaggatcccctgggtttcagacataccccttcttccctggactgtgaaaaagtaaccatggtttcccttgataaccaggatcatttactcctgcctacatgtaattctctttttggcttgttctgtggcatgaggggtccaaaatggccagatagcagcctcaaatttccaattcattagcaccatggttgtgtttcttactctaagcattttttcctgtgtactaacaccaacaaacagaagtcacaggaacacagaagcaaatatttttgagcaggttatctggaataataatgatgccacttctgctttttggtctagaacctgcgtagtctgtctatgagagaaactgaatcatatttatatctctgtatctaccttgcttaaatcacttactaattctttttttttttttttttttttttttttttttgagacggagtctcgctctgttgcccaggctggagtgcagtggtacgatctcagctcggtgcaacctctgcctcccaggttcaagcgattctcctgcttcagcctcccgagtagctgggattacagatgtgcaccaccacgcctggccaattttttttttttttttgatggagtctcactctgtagtccaggctggagtccaatggcatgatctcggctcactgtaatctctgccgcctgggttcaagcaattctcctgtctcagtctcctgagtagctgggactacaggcgcccaccaccacacccagctaattttttgtatttttagtagagacggggtttcaccgtgttagccaggatagtcttgatctcctgacctcgtgatccgcccgcctcagcctcccaaagtgctggaattacaggcgtgagcccatgcacctggcccaattttttgtattttttgtagagacggggtttctccatgttggtcaggctggtctcaaattcctgacctcaggcgatccgactgcctccgcctcccaaagtgctgagattacaggtgtgagccaccgtgcctggcctaaaatcacttactaattctaatagttaactctgcaaattctttatgatttactttctacacataatcatgtctataaatgatgacaattttatttcttttactttttttttcatgccttagtgcccaggctgtaatttttagtacaatgttgaatagaaataaccttgaaatttccatcttgtttcagttggtggaggaaagctttctatatatcctcagttaccagattaagaaaatttccttttatttcaatagttagttcccttagcactggttgaattttattaaatacttttgccatatctgttgaggagactagacttttttcttctctattctgttaatgtggttgaattatatcagttggttttctgttattaaaccagtctttctttcctggagtaaacttaacttttatattaatgtttttatatctaattggatatacaatttgctaatattctgtttaggatttttgcatctgttcaaaagaaagcctgacctgtaattttcatttcttgttaagtgcatctcaaattttggtatcaaggttatgctgccttatagaagaaactgggggctgggcacagtggcttacgcctgtaatcccaacactttgggaggccgaggcagacggatcacctgaggtcaggagttggatgctagcctggccaacatagtgaaaacccgtctctactacaaaaattagctgggcatggttggcgcatgcctgtaatcccagctacttgggaggctatagcaggagagtcgcttgaacccgggaggcggaggttgtagtgagccaagaccgagccactgtactccagcctgagcaagagtgagactctgtctcaacaaaagaaaaaaaaaaagaaagaactggagaatattctcctgttttttatgttccctggaagagtttattgtataagaattatgttgtttcttccttaaatgtcagaaaaaattcagtgatgaagttgtcagggcttaagagttttctgtgtggggatgtttttaattatggatttaagacagttaatatatataagactatttagattttcattacatcttgtgtcagtttttctaaagtttgaaaatgttttggcatgaagttgttcataatatccttttatcattttaatgtctgtaggatccttattatttctgcttttatttatttattttagtttttgagaggaggttcactcttgttgcccaggcttgttgcccaggcaggagtgcaatggtgcaatcttggctcacctcaacctctgcctcccaggttcaagtgattctcctgcctcagcctcctgagtagctgggattacaggcatgtgccaccacgcccagctaattttgtatttttagtagagacagggtttctccatgttggtcaggctggtctcgaactcctgacctcaggtgatttgcctgcctaggccttgctgggattacaggtgtgagccactgcacccggcccattttaattggctttctactgcctcttgagatggatatttagatcatcctttccaaccctttcgcttatgtgtatatttaagactattttgtttccctcttagtgtgaccttagctgcatccctcatttttgttatatcatatcttattactcagttcaaaatgttttctaatttttgtttgttcttatgtaacctgtgggttatttcaaaatatattatttaaattctaggttcttagggtatttgtctatgtatcttttgttaattgatttctagataaattccatcatggtaagaaaatatattttatgtgatttgtgtcttttgaagtttattgaaatttactttatagccttttacattagtagacctgaaaagactgctatctgtgttgtttttacagtgttccacatatattatttaggtcaagtttgttaattttctgttcaagttttccttatatctaatgattttatcagcttataatatcaatcactgagagaagcttataaaaaattcaaactatgattgtggatttatctgtttctttatcctccgatggattacctcctgggatacagtcactcccgctggctttagagggtccatttcaatggaaccatctagaacctttgctcctggcttgcagcagatagcctttattgtgctttccagagacatttatgttcacctcatctgtgtatttttcaatgctgtgatttaagaagtatcttctaggacatagttggggtgtgtatatgcgtattggaaagaggattatctgagcaaatcacataaagtaaatccaccttaattttccaagctctttaagttttgaatcatttcctctgaattagatcaaagaatatttggcaactcagcttcattcagtataggtcactgtcaattcaaagtttgggtcaactagttggttgcataatatgaacctctcccaactcagaataatactgaattcagggtctctggtaggtataatcatgtcagtgattttagccctacatagaagtatatcagcattttcttctcttgctgatcaagcatcctcagaatccattcccatacataatcctacataaccgtcatgtttctgcagtacatatgtggttggtagagtaatggcatctcaaaggtgcccacatcctggtctcggaacctgtgaatatgttatctaacttgattaaagggactttgcagctgtgatatcaggttcatgatcttgaggtggggagattatcctggattatgtgggtaggtccagtgtcattgcaaaggtcttcataagagggaatcaggagggtcacagggagagacggaatgtgatggggaagcagaggttggagtggtttggggtcatgagccaatccggtaacctctggaagctggaaaaggcgaggaaacttgttctcccctagagcctccagaaggaaccatccctgctgaccccttttagacttccagaactctaagactataattgtgtggtttggagccactgaggttgtggtaacttgttacagcagcaatagaaaactagcataacacattagcaaatcttgccattttttttcttcaaatatgtgcttctgttgcatccaattttgtaataatgccataaggacagtccttgatctgactctagctgtggttctggaagcgaagagggatgatgggttagaacctaggggaaaatagcattaccctgcaaggtgactatctctgatgaggtcattatagaaactgcttctgctagcaagcaaggctcagggaatttagagatttaggtacttggagtcagctagttctcccaaactcctccatttgaactctttgggtcccagtctttgccttaactttcagataagaggtccagcaaagttattaatttcttctgtactgtaatttgtagaactggagctgctcctttcctttaacaacagtcttagaaactcctgattaattcacatttcctggagataagaatttaaaatctgaagcctgtcatttttttttttctataagctccaccacataattagaggtagccactccacatcctcattccagatcaccagggatcatgtatatagctgtttttctactcagagccttgggctaccagtgttccatcctcaaatactaattgtatcttcaccatgcagcccaatcaaagaactgatcccagagccccatttttttcatgaaggcctgttacctataaactcttgtgatacccgtagccatataggtcattatcttagtttcctatgactgcaacaacaaattaccacaactttagtcacttaaaacaacacatattacagttctgaaggtcaggagtcctaaaatcggcccagcgcagtggctcacgcctgtaatcccaacactgggaggccgaggtgggcagatcacatgaggtcaggagttcgagaccagcctggccaacatggtgaaacctcgtcactactaaaaatacaaaaattagccggtcatggtagtgcatgcatgtagtcccagctactcaagaggttgaggcaggagaatcgcttgaacacgggagacggaggttgcagtgagctgagattgcgccactgcactccagcctgggagacagagcgagactgtctcaaaaaaagaagatgaaggttgcattccctgcagaggctctaggggagaatctcctttgccttttccatcttctgaaagctgcctacgttcctctgctccttatcaccccccaccccaccccaccttactgtattttcaaagccagcaacatagtatctttagatctccttcgcttgcctggtgtatcgcagcactttgggaggctgaggtgggtggatcacttgaagtcaggagtttgagacccgcctggccaacatggtgaaacccttttctaccaaaaaatacaaaaattagccaggcatggtaacgcacccctgtagtcgccactactcaggaggctgaggtacgagaattatttgaacccaggaggtagaggttgcaatgagctgagatcgtgccactgcactccagggcaacagagtgagagaccctgtctcaaaaaagcaaaaaacaaggctgggcacgtgtctgacacctgtaatcccatcactttgggaggccaaggcaggtggatcatttgaggtcagaagttcgagatcagcctggccaacatgttgaaaccccatctctactaaaaatataagttagccaggcctggtggcaggtgtctataattccagctacttgggaggctgtggcaggagaatcgcttcaacccgggagtcagaggttgcagtgagccagatgatgccagtttactccagcctgggcaatagagtgaggctcagtctaaaaaaaaaagacaacaacaagatctccttctctctctgacctttgcttccattgtcccattgtcacatctccttctctgtctctgagtccttttttctcttagaaggacctttgtgattatattgggccctccaaaatcatccaagatactcttcccatctcaaatccatacccttaatcacatctacaacgtccctttcgccatgggagatcacatgttcacaggttccctcgaaggattcggatgcgacaagtttggaggagccattcttttgtctaccatactcatgtttcagttgtagacgaaagaatccaattcttctgggataagcagaaaggggaactagttggtttactgaatcattggaatggctataatagaagattcccagagctatactttgaacaaggaagctgcttcggaggtcagcctgacagcacagcctctgccacagcttcagccaaaacccctctaccactgtacttccagaaggatcatgcaatcacgcagtcacttcacagtactcactctgccttcagtgagggttcatcttggtgaaaactaggtcttacagaaatgctggcaggaggggagtctaggaaatgtagcttttggagatttagcagcctctagtattacacacaacatcatgatagaaaggggttgaaatagtgttaagagagtcggtcttcaaaatatgcagcctattaggtgatggggaagccttttactgcagagacagatggtgtttgagcagacacctgaggggagtgaaggagcaaagccagagataacctcagagaagagcattgcgagcagagggaacagttgtaaaggacgatgccgttagtaaaatagccttttgttttgggtaattgaataggcaaagtaacctcgaattttcatgagagacttctttttttccctcccagaaaaataagggaacaatgtactttcttgcaacaaaaaagatgattatattcaccaaatctgtagtgccatccattcaaagacacatcattgttttaggaaccaataaaaaagaaaaatatggcccgacgcagtggctcatgcctgtaatcccagcactttgggaggctggggcaggcagaccacaaggtcaggagtttgagaccagcctgcccaacatagtgaaacctcatctctactaaaaatagaaaaaattagctgggcatggtggtgagcacctgtaatcccagctacttgggagtttgaggcaggagaatcacttgaacccaggaggcggaggttgcagtgagctgagattgcagcactgcactccagcctggtgacagagcgagactctgtcttaaaaaaaaaaaaaaaagaaagaaagaaagaaaaatgctgccaattaaactatgatttgccgctggttgtaagatatactctgattttaaagatgttacaatgcgaaaacaaacaactgcgtgtgagagtcagtgaaatgagcaagatgaatgggtaagatggatccggctgttttctttcatttgactgttagtctttgatttcagaactgtagaagatttgaaaaataatgaaagccaatggaaagattccccactggcaactagacaccgcgaaatgctgaagcgctgtaaaactcagcttaaggtttgtatagctaagtggaataattatagaccagcctcatagtgataattttcccaacagaatatatgccttgagtgagcagtttagtgtcctcactttttctttgttattcttttcccttccaataaaatagtatattttaaaacttgttgataccttacttatatgtgtatataatgatttcagtctcaggacagaatatggatagatatgcttctgctgtgattatgaattcttaatgggttttatgattctcagtttaacatcacctcccttggccgggcgcagtggctcacacctgtaatcccagcactttgggaggcctaggcgggcggatcacgaggtcaggagatggagaccatcctggctaacacggtgaaaccccgtctctactaaaaatacaaaaaaaaattagccgggcgtgatggcgggcgcctgtagtcccagctactcaggaggctaaggcaggagaatggcatgaacccaggaggcagagcttgcagtgagccaagatggcgccactgcactccagcctgggcgacagagcgagactccgtctcaaaaaaaaaaagacaacaacaacaaaaatcacctctccttccctgccttatgcagggccctcctcacctgctgtctcccacccctcgccccaacactcatccagtatatctagccatgcatttccatgatatttgacaaagagtatctgtggtagtggaaagatctctttcctttgcccctcattctttctttttaattgaaattgattcatcacacaaaacctaactatagatgggaatattcttgctggtgagacatagctaaaaacatatgccagctgacattgtacaaataaagcatagatagcaaatttatgcatttttcttctattcatgttccagttataaacctgagtgttagctggtcatgcattctgttgaacagtaggataatatgtggaaagtttacctgacatagctttctagtaccagttaagatttcagttttatttactaatagactagacttcttcaagatgcacaattaacaaggggcccttatctggggtctgtgcacccccctaagcagtccacagatgtgtttcaaggggatctataaactgcttaaattgccaggcatggtggctcacaccagtaatcccagcactttgagaggccgaggcaggcagatcacctgaggtcaggagttcgagaccagcctggccaacatggtgaaaccccgtctctactaaaaatacaaaaattaactgggtgtggtggcacacgactgaaatctctgccattcgggagactgaggcaggagaattgcttgaacctggtaggcagaggttgcagtgagccaagatcgcgccactgcacttcagcctgggcaacagagcaagactctgtctcaaaataaataaataagaaacataaaaactgcttaaatgtatacatcagtgtgtgcatgcatgtgtgtgtaattctgtcaacaggcctctaggtaggaattccatccttagtggccagcattttgcccgagggcagctcgtaagaggcgacactggaattcagacactgattgtttggctttttcccactaaccaccctgacacccaaagggcctccctgtcgccaccctctcctcatcaggttatttacttgtgactgttggaactcaacattttgagctttaactgtgtgctagacctggtggtactcggtggtttgcttgccacgcctttgtttttctcaggaaaaaggtcttgagacacaaccagcatcttatagctagttaggagatgaagctctagaagctctggaacccaaatttcccatctcctggccccagtccctgcccagtccccctgtagggacttagctactgactgatctttgggtggggacatccctgcttccacagaaactggtacggtgcaaggcctgtgctgatgctggcctacttgacgagagcttcctgagaagatgtctgaatttttatggccttctcattcagctgctgctccgcatcctggaccccgcatatcccgagtgagtgtgcttcttcctgtttcccttgtccctccttggctgggctctgttgtctttattgtccttcaaagttgataactaaaaccaaaaccctttctttatcaagaattcacttctctgcaaggcgcagtggttcacgcctgtaatcccagcactttgggggaggctgaggcagatggataacttgaggtcaggagttcaagaccagcctggccaacatggcgaaaccgtgtctctactaaaaatacaaaaattagccgggcttggtggcagatgcctgcagtcatagctactcaggaggctgaggcatgagaatcgtttgaacccgggaggcggaggttgcattgagccgagatcatgctactgcactccagcctgggcgacagagcgagactctgtccccacccaaaaaaaaagataattcacttctcagtttccagattgcatttatatagattatgtagttatattgataggtgttttccctgtaattagttacaataataggcaaatgtcaacacctgttattttaattttgacaagttttctttaaaatttgctataaagtctttgattgatagaaagagaaatctataaattggaagccaaaagctggagataatattaggccctcctaagcactgggtccaggaatacccacctaattcagagagtgagctaagaacattgttgatcactttgtcatcaactggtcatctcctccaggcaaaccatttttgttttatttattattattattattttactgttatgaagtctctggttcactgatgttggtgagattggcccaagacccgtgaaggcgtggaaaatattatttaaaatatgtgtgtaggccgggtgcggtggctcacgcctataatcccagcactttgggaggccagggcgggtggatcacatggtcaggagatcgagaccatctttgctaacacggtgaaaccccgtctctactaaaaatacaaaaaattagctgggcgctgtggcgggtgcctgtagtcccagctactcgggaggctgaggcaggagaatggcgtgaacctgggaggcggagcttccggtgagcggagatcacgtctctgcactccagcctgggtgacgagcaagactccatctcaaaaaaaaaaaaaaatgtgtgtagctctgttgtttccgtttgagttgcacaaaatgaccaaataggacctttttatttccttcccattttacttattgcattaaccttagcaagaagtcaagaaggctgggcgtggtggctcacgtctgtaatcccagtactttggaaggctgaggcaggcggatcacttgaggtcaggagttcgagaccatcctggccaacgtggtgaaacaccgtctctactaaaaatacaaaaattagccaggtgtggtggtgggcgcctgtaatcccagctactcgggaggctgaggcacaagaattgcttgaacccaggaggcagaggttgcagtgagccgagatcacgccactgtactccagcctgggtgacagggtgagactctgtctcaaaaaaaaaaaaaaaatcaagaaaagggccaggtgtggtggctcacacctgtaatcccagcactttgggaggccaagatgggtggatcacttgaggtcaggagttcgagaccagcctggccaacatggtgaaaccctgtctctattgaaaatacaaaaattagccaggtatggtggcacgtgcctgtaatctcagctattcgggaggctgagacatgataatcgattgaactggggaggtggaggttgcagtgagccaagattgcaccactgcactccagcctgggtgacagagtgagactccatctcaggggagaaaaaaaagaaatcaagaaaaggaaaacatttcacacatacccttgcatatgcactgtcttcattattccctgttcatttctggttgtagtttctttgcctacatatttattacatagtattacagaatgattttcttccccaaatgaaatacttatccgatggtaatgtaatactccttgtagtttgatgtaccataatttcatttaataaattgtcctttttttctctttgacagtataacactgcctttaaattcagatgtccccaaggtatttgcagcgttgcctgagttttatgtagaagatgttgcagaatttttattttttattgtacagtaagtgcctttaatattttacatagttctaatatgtttttatgcataatagtataatattctgagctatgttgcaaacctccatttcatgcctgaaatttgatgtaactgttttaactgaatgctgcctagagactggaaaaaataaatccaactgtggcatcagtccaattccaataatatctcaaagacagaggcaggattaacagtgcagataatgtattccttgaaaattgagttgaatttctaatagttaaatatgtgtttctgagcaacagaaggaggaaacagtttataaatgtctgaatgaacatcccaaaaccagaaatatccacatctatattttgtactaaaatttgtctcaattgtaaaattggagaatgcttaccaagaaatggtttgaatttctaactggtattgtagggttttaatttttttttcaaatccttatttggtttatcaaattaacattttatttctaaaacattacaggttagaagaattacaatttcaatcccttggcaccatgatagcacctatgactagctgagggagtggtatgtgaagtctattgtgaaaagtaaaagtcatgctgggcactgtggctcatgcttgtagtcccagacatgcaggaggattgcttgagcctagttcaagaccagtctgggcaatgcagcaagtctgcatctctttaaaaaataaataaataaatagtataggtccccagtcacagaatacaaattgtgaaagttttgtaacaaacaacaggaaaaaaacaaaattagtataaatgattttaaaataagggccaaaagtaaatggagcaagttaatattgctgtcataaaagctgcctttaaaaaaaagcccaaatcaaggcagaggttgcaatgagcagagatcatgccactacactccaacctgggcaacatacacaaaaaaacccaaatcattggtgacacgtgattttgattggtatgaaattttaaaagtgactcaaaaacgtggtttatttgttgaaaaaccaaccttggaatttaagcaactcaagtcacattttaaaatttgttctatgcacagtgatacaaaagacacctatttgaaaaatttcatttattctcattttcagcagagattaaaaaaaaactatcaaaatttttatgttttggtagtgatgatcttttgtgaagtttatctgatttgatcataggttttgtttatagttaatataacatgctacagccagtaaccatgtttggttttaaatctgtcttgttacagtgtgaatagtcactgtaggctgggtgcaatggctcatgcctgtaatcccagcactttgggaggccaaggtgggcaaatcacgaggtcaaaagatcaagaccatcctggccaacatggtgaaaccccatctctactaaaaatacaaaagttagctgggcatggtggcaggcacctgtagtcccagctactcaggaggctgaggcaggagaatcgcttgaactttggaggcggaggtttcagtgagccgagattgtgccactgcactccagcctgggcaacacagcgaggctccatctcaagaaaaaaaaaaaaaaataggctgggcgcagtggctcatgcctgtaatcccaccattttgggaggtcgaggcgggcggatcacgaggtcaggagatcgagaccatcctggctaacatggtgaaaccccatctctactaaaaatacaaaaaaaattagccgggcatggtggcaggtgcctgtagtcccagctactcgggaggctgaggcaggagaatggcgtgaacctgggaggcggagcttgcagtgagccgagatcgcgccactgcactccagcctgggcgacagagcgagactctgtctcaaaaaaaaaaaaaagtcactgtaaactgaatgagttcaagggcactcccaaacctacttatcctgccttcccctcctcacttactgacaccagccttcacccaagatgagtttctcagcagtttctcagcggtctctttcttgctcttcttgcctctgttcagatactctccccaggcgctttatgagccctgtactcaggatattgtgatgttccttgttgtgatgttgtgcaaccagaactacatccgaaacccatatttggtggccaaactggtagaagtcatgtttatgaccaaccctgctgttcagccacgaacccagaagttttttgaaatgattgagaaccatcctctctccaccaagttgttggtaccttccctgatgaagttttatacaggtaggttgctggaacacagtgtagcacatggcaggccaacttaggtaaggtcatctaaagctagtggacgacgttgctctaagcctgttacctaatatcctgctacctgtgtgtatagcctactaacctgtggcctgcagaggatgtacttttggttcttcttgccctgagtagttaggaataggacaaccattccacctactggtctctgatgattcagcaggaactactgaaagtcagatgattggcaccgagacccagggtatcaagagcacaagttggtagtgttatctgaatggaattatctggttcattttacctttgaacttacagcatttgttttttaacactatcctataacccactttccaaagtgtgggtgaaacagggagcttgttaaaaatgcatattcttggtccgggtgcggtggctcatgcctgtaatcccagcactttgggaggccgaggcgggcggatcacaaggtcaggagttcaagaccagcctggccagtatggtgaaaccccatctctactaaaaatagaaaaaaaaattaaattagccgggcatggttgcaggtgcctgtagtcccagggcggttgagggaggagaattgcttgaacccgggaggcagaagttgcagtgagccgagatcccgccactgtattccagcctgggcaagagaacaagactccgtctcaaataataataataataataataataataataataataataccacttttcacctgtcaaatttatttcttaagttgaaaatacctggtacaaacatggttgtggagaagtaagctaacctgcaaaaaaacctgcttaatctaccctatagccagtgtgcagatttagtgctatgaaactctcatgagaatgcaaatttaaagcctttctgaaaggcagtttagcagcccacaccaagagccttaaaaatgcttttatcggggccaggtgcggtggctcatacctgtaatcccagcactttgggaggccgaggcgggtggatcacctgagatcaggaatttgtgaccagcctggccaacatggagaaaccccgtctctactaaaaatacaaaaattagctgggtgtggcgggcggcgcctgtcatcccagctactcaggaggccgaggcacgagaatcgagtgaacctaggaggcagaggttgcattgaactgagatcacaccagtgtgctccagcctaggagaaagggcaagactccgtctcaaaaaagaaaaaaaaaaagcactgggataacaaatagtaggtgcaggaagtagccatcttctatccctcagtctggggacccaagggaagagcctggggatctcagaacccagctgccctgatgagggcttggacggagctaggacccagtcctctgtggaaggcccttggccagtaggtgctggtgtctctctcgggggttgtgcacggttgctagctctgggggtacgagacaaagctgaaaattggaaccaactgctactgctgacagtaagtgcaaggtcctaagtcccttgtttctccttcagttttccagttctcctgcagcaccccctattggcaaccctagagagggcgggctgccaaaggaaagattctgcagtgccagccccagaatcacaaagccaactacaaagagtgcatgtgggctgggcacggtgactccagctaataatcctagcactttaggaggccaaggtgggaggattgtttgagcctaagagttggagaccagcctgggcaacatggcgagaccccatctctacgaaaaatttaaaaattagatgcctgttgtcccagctactaaggaggcagaggtgggaggaaggcttgagcccaggagttcaaggctgcagtgagctatgatcttgctgctgcgttccagcctgtgaaacaaagcaagaccctgtttctaaaaaaaaaaaaaaaaaaaaaaaaaaaagggtaaaaagactgggtttcggccaggcacagtagcttacacttgtaatcccagcactttgggaggccaaggcagtggatcacctgaggtcaggagttcgagactagcctgaccaaaatggtgaatcctagtctctactaaaagtaaaaggccgggcgtggtggctcacgcctgtaatcccagcattttggaagactgaggtgggtggatcacaaggtcaagagatcgagatgagcctcgccaacatggtgaaaccccgtctctactaaaaatacaaaaattaggcctggcacagtggctcacgctgtaatcccagcactttgggaggctgaggtgggcgaatcacctgaggtcgggagttcaaaaccagcctgaccaacatggtgaaaccctgtctctactaaaaatacaaaattagcctggcatggtggcacatgcctgtaatcccagctacttgggaggctgaggcaggagaatcacttgaacccgcgaggcagaggttacggtgagccaagatcgcgccattgtaatccagcctgggcaacaagagcaaaactccgtctcaaaaacaaaaattagctggacatggtggcatgtgcctgtagtcccagctactcgggaggctgaggcaggagaatctcttgaacccgggaggcagaggttgcaatgagccaagatcgcgctactgcacttcagcctggtgacagagcaagacttcatctcaaaaacaaaacaaaaaacaaaacaaaacaaaattagccgggtgacgcatgcgtgtaatcccagcaacttgagaagctgaggcaggagaatagcttgaacccgggaggtggaggttgtagttagccgagatctaaaaaaattttaaaaaaaaagagtggatttggagctacgagacaacagctgaatagctatactctgacataagaatttaatttcttgaaatttattcaatggaaataattacgaatgtttgtaagtgatgttctccacagcattatttataaagcagtgcagtgaaaataataaaaacaactggccgggctcagtgactcacgcctgtaatcccagcactttgggaggctgaggcaggaggatcacctgaggtcaggagttggaggcttagtctggccaaaatggtgaaaccccgtctctactaaaaatacaaaaaaatttagctgggcgtagtggtgcacacctatagtcccagcttctctggagtctaaggcagatgaatcacttgaatcagggaggcagaggttgcagtgagccaagatcgtgccattgcactccagcctgggctacaagagcaaatctccatctcaaaaaaaaaaaaaaggaatgtagggaaggacatataccaaaatagtaacagcgcattggttatttttgaatggtagcattataaatagtttttatttttattttattatctgaacttcttaatttttctacagtaaacatgtattgttagtagtaaagacaaaacaattttagttaaatttattttgtagtcagtgttctgggcctgtcactgtggcttcaggagagagagagagagagagagtgtgtgtgtgtgtgtgtgtgtgtgtttgtgtatttgtgtttacacaacagaactgggcctgttgcctataagacgagtgctgggcctagtggagtcctgctgggaatgttccagaaggaattgggtgggggttgttctctctttcctctttgccatgtgtgccctctggcctggaccacctcttcagtcatagatggatgacatctgtactaataatagccaccacttattgaatgcttactaatcctttcacttaatccccacggcagtcctaaagatagtactataaatacatccactttacaaatgaggaaactgaagcttaaaagggtcaagaagcttgctgaaggtcagtggctagcaagtggcagcaacctcgcagatgccctttagcacaggtccccctggctactgtgctggtcttcctacagctactaagggaccggtgtgagggtacccctgagggaggcatcacagacatagtccccagtgctcatcacctccatgtgaagacctggctgattaggtcctggtccctgagcagatgggaccctcagatataaattaaaagttgccacacacaagatcagtatgtggaacaagctcctcttaacaccacagagatagtattctagcttagaaaatgctcaagttaggctgggcgtggtggctcacgcctgtaatcctagcactttgggagtccgagacaggtgaatcacttgaggccaggagtttgagaccagcctggccaacatggcgaaaccctgtctctactaaaaatacaaaagattatccgggtgtggtggtgggggcctgtaatgccagctacttgggaggctgaggctggggaattgcttgaaccgggacctgggaggtggaggtcgcagtgagccaagatcttgccactgtactccagcctgggctacagagtgagactccatctcaaaaaaaaaaaaaaagaaagaaggcagcaagaatacctggggggaggagggagaggttcaacacaagtctagtccacctacggccttctagaacaaggacctgggaattagaacttgggctggtatgactttgagggaacagtagaagtgaataagaagaaaaaaaaactgttgggagaaatgtatattgttttgtttcattttcttttcttttttttttttttttttgagctagggtcttgctctgtcacccacgctagagtgtagtggtacaattacagcaccatgcactcttgacctcccgggctcaagtgatcctcctacctcagcctcccctgtagctgggactgcaggcatgtgccaccacacccagctaatttttgtggtttttgtagagacggggtttcacgatgttcaccaggctggtctcaaactcctgagctcaagtgatctgcccacccgggcctcctgaagtgctggaaatacagatgcggggccctgctgagatacatattgctacataataaattaacatttacttagtctctactatattcagaattgggtgcagatattggggcattttagatgatatgaggcgttgggttggtcctcctgtatcttcctcttgtaggctatccttatgtcaacactccacactttagctcatgcttttatacaattaataaatgacatttagtttattttaaggaaaggttacttaatgaatatacataagtactttcggatcttagtatgataggtgttaattatcttattttatttttaaatagctgtttccttttttggtcacacacaaaaaaatgtgttctttggaaaatacagaaaatatcaaagacaaggtatagtggctcacacctgtaatctcagtactttggaaggacgatgtaggaggatcgcttgaggcaggaatttgaaaccagcctaggcaacatagtgagaccccatctgtaaaaaaattaaaagtgaaaaaaaaaatttttgagacagagtcttgctttgtcgcccaggctggagtgcagtggcatgatcttggctcactgcaacctctgtatctggattcaagcaattctcctgcttcagcctcctgagtagctggaattatgggcacacaccaccatgccctgctagtttttgtatttttattaatagtagaggcggggttttgctatgttggccaggctggtctcgaactcctggcctcaagtgatctgcctgcctcggcctcccaaagtgctgggattataggcgagagccaccacgctcagccataaaaaataagccacgcgtggtggatacacctccagtcccagctacttgggatgctgaggtgggaggatcacttgagcccgagaggttgaggctgcagtgagccattattcacaccactgcactttaccctgggtgacagggcaagaccctgtctccaaaaaaataataataaaatagttgggcacggtggctcacacctgtaatcccagcactttgggaggccaaggtgggtggatcatgaggccaagagatcgagacaatcctggccaatatggtgaaaccccatctttactaaaaatacaaaaattagcagggcgtggtggcgcatgtctatagtcccagctactagggaggctgaggcaggagaattgcttgaaccccgaggcagaggttgcagtgagctgagatcgtgctactgcactccagcctggcgacagagcgggactctgtctcaaaaataataataataataataaaatttgtcatgaattctgaaatttctcatgcctaagcttttgccatttggacaaacaagtttgatttttatccctctttaatagatttagggatgatagacacattggtgttttttcaacaccaaaaatggtcaatagatagacacatttagtaaatacatggccctcaataaaattaaacctaactttttatccgctgaagtatgtccatttgaggtgccatagaatttctgtaaattaataacttaaaattaggtggggggagtatgataattcagcttttggtcattggtaagttgatgttgtcctaatgatgggagttttcctagccccgttcctttaggtgttgtgtcattgtcaaatcttcattgtgaaacttttgtctttaaaagcagcttataatttctgtcgtgccctacatgcaaaagaagtgcaaaatttcaccagctctctgattttgcaggtttacattcactcagtatcattgttggggcaataactggatttggaaagcaagaaaatacatatccctcagtacctttgtctttcttctttagatgttgagcataccggagccaccagtgagttttatgacaagttcacaattcgctatcatattagcaccatttttaaaagcctttggcaaaacatagctcaccatggcacctttatggaggagttcaagtgagtatggggcccctcgtgtcacaacttgctttcttgcaaatcgcaggtaggattgcagcttaaaagcatgcacagctgggttcttgttgactgtttgcttggtctcagactcctttgagtttaccacaagatgccactaaatgtgggcaggattttttaaatggctttacttgcaagatattgctgaattttagatttgtcaagatactttgggggtggtacacaagcgaagattgtatagggcagggcgtggtggctcacgcctgtaatcccagcactttgggaggcagaggcgggcggatcacttgaggtcaggagttcaaaaccagcctggccaacatggtgaaaccccatctctattaaaaatacaaaacattaactgggtgtggtggcgcacgtctgttatcctagctacttgggaagctgaggcaggagaatcacttgaacccgggaggcagaatttgcagtgagccgagattgtgccagtgctctccagcctgggtgacagagcgagactccgtctcaaaaaaaaaaaaaaaaaggaaaagaaaagatcctataaatatgctgagatgatgggttaagtgtttttttggtgttttctacgatgacagtgttaaatgaagttgtcagaatgagtgaaatgaaatcttagttcctgaatgttggaaggactttagattttgcaacaattaggtcagagttgtcatttaaagtatcattctttgtggtaaggccctaaaccttaattaaagacttttcatatacctacctgaaatctgagtgactgcttaaacctggacattagtaattccatctaaattatctgtcagtgcctaaaaacaaaagggagatgaagatgctgaactcttgaattattcttcaaaaattttatcccatctaagggccgggcgtggtggctcatgcctgtaatcccagcactttgggaggccgagcagggcggatcaggaggtcaggagatcgagaccatcctggctaacatggtgaaaccccgtctctactaaaaataccaaaaaattagccaggcatggtggtgggcgcggtggcgggcgcctgtagtcccagctactcaggaggctgaggcaggagaatggcgtgaacctgggaggcggagcttgcagtgagccgagatggtgccactgcactccagcctgggcgacagagtgagactccgtctcaaataaataaataaataaataaaaattttatcccacctacttggatcttttgcaacccatgttagatctttgatcaaatctagctatacttgttaaccgaattactagtcaataatatacaaattaccagtggaataactatttgccagatagatttctgtgaagcaaactttttaactttttgtttccataaactgctcttatggtcagaattgtgttccagctaaagcctggcacgaggcaggcccatggcttggtctgaatggtgctgattggagcgcttgtcctgaacttgccatgttcctgagatcgaggcctcctgcacttgttcacaggaacttctcttctccagcatgggcttaccaccccgtagttgcacagttgtagaccctgaagtgtagcttctttttttctctacgaatctggcatctccagagtctaacagaggtaggccaagctatttcagttcaccagcaagttctcattataacacgatctgcagaacagttccttagattggaggcttccagttttaaagtaagttaatatcccactttatcaatattacaggttccaatttttcttccatgcgtcagtctttgtgataaggaataactatatcagttgttttcttatctgttgtatgtggttaattatttgcattttcttggtatattggtgagtatatgcgtttttcctgttctagtctggaagaagtgttttctctccttaaaaacattgagggagtgagctaggggtgtgctggtaagcctgctctgggaagcagggtgggggagtcagcatttgctggttttccatggtgtgactgtttcctctgttgcccaatttaaggtgccaggggaatctggttataaaattctggaatatttagcacttgactgtcatcagccgtgcaaggtggctccaaataccactggaatgagcttatcataaacaatttaaaagaataacaaaatccaggccaggtgtggtggctcatctctgtaatcccaacattttgaggggctgaggtgggaggaacgcttgagcccaggagtttgagaccagccctggcaacataacaagtccctgtctctacaaaaaatacaaaagctgggcgtggtggtgtgtgcctgtagttccagctacttaggaggctgaggcaggaagattgcttgagccctggaggtcgaggatgcagtgagctgtgattgtgccactgcattccaggctgggcgacagagtgagaccctgtctcaaaaagaaacaagattaacataatctaaagagaagcttggtggtccttgaattccatagtgcctgacttgtgccagggtagccaggcttttagggtgagatagttgcagtctgggtggaggtgcttgttccctgggatttgctgtggcattttgcttcagggagatgtatgaccatgtacaatataattgcctttccagctccgggaagcagtttgttcgctatataaacatgttgataaacgacacgacgtttttgctcgatgaaagtctggagtctctgaagcgaatccatgaagtgcaggaagagatgaagaacaaagaacagtgggaccagttgccccgggtgaggacgtggtccagaggcttggacagctttgcaggccatctgcctccacacacgggcagagctgctttggggctgcatttgtgggtctgatgatatgcgatctgacatgctgggattttccttccatgaaatcatattgcaggattggaataggaaaattcttaaataccttatctgaagctaagaaatgggttgagaagtctttgaaaatgtacactgaaaactttctctgcctttttaattttaaagggcttttttggagatgagcttttattgtctgaatatattaatattcatgaacataattaggaaagaaatctctagaattatgtctgctggacaagaatttgatttgttcctatgggcttctctaggcaactgtgtgaatcactcaggatcctggcggggtgttttttccctttcagttgatcttgggttttatattcagttattaatagaaaagaggcctggcttgccaggttccatggaaagcacgtgccgtgccagtaccagtgctctttcctgacgtgcgtagcagccactgagatacttccttggtcgcttatgaggcccttgacagttgctggtgacttcttagattggcttaggtttattgattctgttcttggaattgtcaggctcagaatcagaactgatttccataaggggttctcatgtcaaagtggggactgctttttcttcactttttcttttttttttttttttgagacggagtttcactcttgtcgcccacgcaggagtacagtggtgcgatctcttctcactgcaatccccgcttctccggttgaagcgattttcgtgcctcagccttctgaatagctgggattacaggcgcctgccaccacacctggctagtttttgtattttgtttgtttgtttttgagacggagtcttgctctttcacccatgctggagtgcagtggcacgatctcagctcactgcaatctttgcctcctgggtacaagtgattctcctgcctcagcctcccaagtagttgggactacaggcacctgccactacgcctggcttattttttgtatttttagtagagatggggtttcaccgtgttagccaggatggtctcgatctcctgaccttgtgatccgccttcctcggcctcccaaagtgctgggattacaggcgtgagccattgcacccggacaatttttgtatttttagtagtgacggggtttcaccatgttggccaggcctgtcttggactcctgacctcaggtgatccatccgcctcagcctcccaaagtgctgggactacaggcgtgagtcaccgcgcccagactttttttttttttttttcttttttaatttcaacttttattttagattcaggggatggggtacatgtgcaggtttgttacatgggtataccgtgatgctgaggctttatgattcagcctgtcacccagggagtgagcataatacctaataggtagttttcaaccctcactcctccctcactcccctcccttgtagtccccagtgtctgttattcccgtctccgtccatgtgtaccaatgtttagctcccatttatacctgcttttcttcttatgtattaaagttctacccattctctgagtaaggtcctatccaaatactccctcaggtttgtcttcgccaatcagcatagctgaaaattctcacctttctccttacttctgtaacacccactttataccattcacagtgcttggtatgcccagcttatattttatttacttatttgttttttattattattaataaataaagacagagtgttgatctgtcgccttggctggagtgcactggcaggatcatagcacaccacagcctcaacctcctggactcaagtgatcctcctgcctcagcctttgtagatccaaagagctggatctacaagcatgtaccaccacgcttggctaattaaaaaaattttttttatagagacaaagtctcacatgcttgcttcagcagcacgtatactaacattggaacaatgcagagaagattaccatggcccctgctcgaggatgacatgcaaattcataaagcattccatcctttaaaaataaatattaggccaggggtggtggctcacgcctgtaatcccagcactttggaaggccgaggcgagtggatcacaatgtcaagagatcaagaacatcctggccaacatggtgaaaccccgtctctactaaaaatacaaaaattagctgggtgtggtggcacgccgctgtagtcccagctacttgagaggctgaggcaggataattgcttgaacccgggaggcggaggttgcagtgagccaagatcgcaccactgcactccagcctgggcgacagagtgagactccgtctcaaataaataaataaatattaaagagagagagtcttgctagttttcccaagctggtcttatattttatttacttactatttttattattaaattattttttattttattttattttattttttgagacagagtctcactctgtcacccaggttggagtgcagtggcgcaatcttggctcaatttatgcctgctgggattacaggcgtgcaccaccacgtccggctaatttttgtatttttagtagagatggggttttgccacattggccaggctggtcttgaactcctggcctcaagcaatccacccacctcagcctcccaaagtgcgggggttacagacatgagccaccatgcccagccttattattattttttaatagaaacagagtcttgaccgggcacagtggctcatgcctgtaatatcagcactttgggaggccgaggccggcagatcacctgaggccaggagtttgagccagcctggccaacatggtgaaacccagtgtctactaaaaatacaaaatttagccaggcatggtgacaggtgcctgtaatcccagctatttggaaggctgaggtgggagaatcacttgaacccaggaggcagaggttgcagtgagctgataccatgccactacatttcacatttcagcctgggcaacagagcgagactccgtctcaaaaaagaaaaaaaaaaagaaagaaagagtcttgctctgtcacccaggctggagtgcaatgacagatcttagctcactacagcctacaacctcctggcctcaagcagtcctcccacctcagcctcccaaaatgctgggattatagttgtgagccaccatggctggccagcgtatattttagatgttggaatgcaggtctatagcacattctcgtattcatagtcagtacttaatagcatttgtttatgagccaactgaacaaataatattgatttttcctgtgttaatggatgaaaaaggcccaaataattcccacaattgctatttcagaaataatttttatttggctttgaagtcactttctacctcccactgccctggctgttcctgctcatctccctgacgtctgagcttggtgagctccagcactcagcccttaggcttcaatttctttcccactcatgctctctaggttagtgtttctcaacgagggcactagttggaattttgagcctagtggaatttggtataataataactcatgatgagaaaccatcccatatattgcaggacatttaggatctctgtttcctgccatttaatgtcagggatgtaccctcctacccccagccttcaggcaacgagaaacactgccacacataacctgatgtcccccggtgaacatcactgcttggtgagctcaggtataccaaggcattaaatacctgtgttctaaagactccagaatatatctccctggctcagatctgactgcagacttgcagaccaagtatttgtctaatcagtgtctcaaactcactgtgtccaaaacggaacccttgatgttgtccacatctcctgcctgagtctgcccaatctcagtaaatggcgccttcattctaccagctgctcaggctcgatgctttggagttgctcttgatttctctgcgtctctcagcaaatgcctctaagctctgtcttaaaatatatccattatctgacctcttctcagcacctccagaccgttggcatctcttacctgggttattgcagtagcccactgcttggtcttcaacctccactcttgagcatgtccatatcagggatggtgttaaacatctcagtctgatcaacatcaccactcagctcagccattttgggcttcccttatcactcagagccaaatcctgtggtgagagcagcctacagcacgcaggaggacctggccccacaatgtgtttctgctctcagctttggacagtctcttctccactcactctaccccagccagactcacctcctggcccttccactgacacgtgagggcctttacacctgctcttccccctacctggaatgctcttccctcagattttccgactccttcagatataccctccctcagggataccttccctgaccaccctttccagaatagcattccctgactcctgaccctgcttcatttttcctcatcactgtcagacttactgtgtgtctgtctgggtatttgtttctatgaagcagatcctccctaacggaatctaagctgcatgagagctgggagcctttttattctatctccagtgcccaaaggctgtagaagggcctgttgagacacccaggtacacatttaggtagttcacgcctggctgttcttgtgtctttcctggctctgcctttctttcagtaggctcattcttgaccagggaacggcaggccccccagtatccctgcagaatctccatcaagcacagactggagcactttcccagagggcactcaccggccagcttcagctctgccagctgtgttcctttcccaacaagaaaaggcctctgaacagatgtaagaattgaggcttttcctgatgggtctgtgtttgacccatttcagagcctgcagtgcagtacctgattgtatccatgagtcaaacagctcttattatctcctccccagcccatggcagagttgaaggaggaaagtgcgccagaggtaagcgtgctgacagttctgtggtgtgacagcctcacagtttggaaagacaaaattttaaaagcttagtagtccacaggcacttgtagaggcagagaggcagacccgataggcctcaatacggtggcacactgcatctcatagttttaaaataatgaagactggctgagcacggtggcttacacttgtaatcccagcactttgggaggcctaggtgggcagatcagttgaggtcaggagtttgagaccagcctgatcaacatagtgaaaccccatctctactaaaaatacaaaaattaggccaggcgcattggctcacgcctgtaatcccagctctttgggaggttgaagtggatggatcacctgaggtcaggagttcaagaccagcctggccaacatggcgaaaccccaatctttaccaaaaatacaaaaattagtcaagcatggtggcacgcacgtgtaatcccagctactcaggaggctgaggcaggagaatggctcgaacccgggaggcagagattgcagtgagccaagatcgcgccactgcactccagcctgggcaacagagtgagaccctgtctcaaaaaaaataaataaatcacacacacacacacacacacacacacacaaaaaaaaaaaattagctgggcatggtggtccactcctgtaatcccagctacttgggaggctgagacatgagaatcacttgaacctgggaggcggaggttacagtgagccgagattgtgccactgcactctagcctgggtgacagaggaagactccatctcaaaaaaaaataacaataataatagagggccgggcacggtggcttacgcctgtaatcccaacacttcgggaggccaaggcaggctgatcacctgacgtcaggagttcgagaccagcctgaccaacatggagaaaccccgtctctactaaaaatacagaattagccgggcatggtgacacatgcctgtagtcccagctactcgggatgctgaggcagaagaatcacttgaacctgggaggcggaggttccggtgagccgagatcgcgccattgcactccagcctgggcaacaagcgaaactccgtctcaaaaaataataataataataataataataataataatgactaagtaaaagttattattaagggaaataaactaccctttcttagtgccatgatgtgtgtcagatactatgttccattatcttatttcatcctgaatagaagttgatggtgacttttttttttttttttttttttgagacggagtctcactctgtcactaggctggagtacagtggcgcgatctcagctcactgcagcctcagccttctgggttcaagcagttctcctgcctcagcctcccaagtagctgggactacagccacgcaccaccacccccagctaatttttgtatttttagtagcgacggggtttcaccatgttggccagggtggtctcgatctcgacctcgtgattcgcccaccttggcttcgcaaagtgctgggattacacgcgtgagccaccacgcccggcagatggtgacttcttttatcattgaggaagcagagttaaataaggcaccaacatcacctggctggaagtctcaaagagctccgatgctgaaaggatgaaacttcagttatctgggacatgtggcaggcggttctgtcattccctaagcatgttgggtttatcacgcactttccagttatgtgcttggcgctttgctgagctgatgaccaggaccgagccttactcagcgtctgttcgatgtgtcctaggatcagcagcaggctcgtcagtctcagcttgctcaggatgagcgtgtgtcccgctcttacctcgccctggccaccgaaaccgtggacatgttccacatcctcacgaagcaggtccagaagcccttcctcagaccggtgagtagaaacccggggctctgtttggtggtttggactccacattcagactctctcacttataactttagcagttgttgaagttctggaaattttaggatcacagtcatcaataagtgaaattctgtgactgattttgttcccagttatgctaattgataccagactctgttgatggactgaagagcagatgtctgatgtcaccacatagtctacagccacttccaaatgccttactgcactttgtgcttagacagtacattggattattcatgttgatgtcatgacatatttttaccattattgattcctatattttacttatagaaaaagcataaggtgccgggtgcggtggctcacgcctgtaatcccagcactttgggagcccaaggcgggcagatcacgaggtcaggagatggagaccatcctggctaacacagtgaaaccccatctctactaaaagtacaaaaaattagctgggcgtggtggtgggcacctgtagtcccagctactcaggaggctgaggcaggagaatggcgtgaacccgggaggcagagctggcagtgagccgagatggtgccactgcactccagcctgggcgacagagtgagactccatctcaaaaaaaaaaaaaaaagaagaagaaaaagcataaggtaacagctgttgacaatggaaggatattaagtagaataattgagaccgtgtaaaatctttggctctcttagctgtacctttgttacactcaggaagccaaaggttaatgggagccggccatcactagggtttatggtggattgcaaatagtcagaatgtttgttctcaactagtaagacctggttcctatttctaaaattgaaactgagcagcatcactgaagatttctgccctgcttcagccacccccaccacaaagttgaaaagttttatggtgtggccaggacaagggtagtgaggaaggcaagacggggacctaagattcggtagccatttgcctatgtggagacatgtttactttacaatggaatatgacgttactgcatatttcccctgattttctgtatttgctcttaccttcgttatgtgactctctgttatgtgactcctgtcatcagcagaggcactattgccactccctggcctggggacaactcttttccactcttttaactttccacctcatgtctcttcataaacagatttcagtgcaagagccatggaacacgaaacaaaacagctcagacactggcctcccttaaaagtttgcaaagtgcaaggccatggagcatgaaacaaaacagctcactggccagacactggcctcccttcaaggtttgcagaattctgtgaaggccagatagtaaatagttgattaattcctttgtaacaaggtcaacacccacctattttgtacacttgttgggaagactaagcgaaaacacacatagaagtacctggcataaggccaagcacggtggctcatgcctgtaatcccagcactttgagaggccaagaagggtggatcacctgaggtcaggagttccagaccagcctggccaacatggcgaaaccccgtctctactaaaaatacaaaaattagccaggcgtggtagtgcatgcctgtaatcccagctacttgggaagctgtggcaggagaatcacttgaacccaaaaggcagaggtcgcagtgagccgagatcacgccactccaacctgggtaacagagcaagactcttctcaaaaataaataaataaatttattttaaggcctgctcatagacctgagccatctgtacactgtagccctgttcttttggccccagcctgtgcctgtgcctgctgtgatgttttcatttcctttgctacactatttactatctggcctttgcagacaaagtgtaaaggcatttcattttgcaaacctttaaggtttgcattttcaccttctttactgactagctcagatctctcctacttcaaacagaatgaccaactctgtcctgttatgactcttttatttcacagcttctcaacagtgaaatacaggagtactctgtgcaaaagcaaattcttgaaaagctaagtatatgttgaatttgtataaatccagttattacatttcatgaaaaccttgtgacttaaaggaatgctttcgtgactcccttttatggccagtgtttaatgctctctaagccacatcttcctgtttcaggtttgcttaaaaccatgtatgcccaaccgtagtgggtactgagtcaccttgtgagattacagcatagattattactattttccaggtgtttcatttaagtttactctgtctcattgactagatttaaaactattcaaggcataacttttatcttctttccttgcattactttgttatttgtatctgataagtacataagaatgacacagactgaactgccaggggcttttaacatttatggggaaaaaagtttatgaaatactggctggaagagctgactcaaaactttttttgctcagataatggtaagatttgtataattttctctcttttacttgtttctcaatgaatttggagtgatactttttttaattaaaagcataaatgtaaagaaaagtttggcttcttttggtatttataaataaatatttcatcagcctgcaacattccattaagtattagaattatcagatcagaaatggggagtaaagttgaaatataatgttgtctttcttcagcttatgatacacagcacctgtaaggattctttgaagattaatccaaccaattcctgttcctccactgaaatgggagtttttggtccttttcacttgtctcaacagcatgaattgtcctattatcctgtgatttcctaggagcttggaccccgattggctgcaatgctgaactttaatcttcagcaactttgtggccccaagtgccgtgacctgaaagttgaaaaccctgagaaatacggctttgaaccaaagaagctgttggaccaactgacggatatttacttacagctggactgtgctcggttcgcgaaagccattgctgacgaccaggtcagtgagttgagttggtctctctgtgagtttactggcagatttggagataataaccacagtggccagggaactcgtctggtgtaaatgaagatgagtgggttgttttcctttgagtgtgaagagcagatttgggctgggcgcggtggctcaggcctgtaatcccaacattctgggaggccaaggcagggggattgcttgaggccagactgcagtgagccgtgattgcaccaccacactccagaatgggtgagagagtgagatcctgtctcaaaaacacggtggctcacgcctgtaatcccaacactttgggaggtcgaggcgggcagatcaagaggtcaggagtttgagaccagcctggctaacatggtgaaaccccatctctactaaagatacaaaaaattacctcagtgtggtggtgcatgcctgtaatcacagctactcgggaggctgaggcaggagaatcgcttgaacccaggaggcagaggtttcagtgagctgagattgtgccactgcactccagcctgggcaacagggtgagactctgtctcaaaataaataaataagtaagtaagtaagtaaaaaacaaaagtaaagagcaggtttggcgctctgagccctctccagttgagttcttaccccatctttttaagggccttcttgacaaatccattacatttctgaaaagagcccggtttctcaagggatcagaatcttctttcctagtctcctgctagagtgctgttatttttggggttgtccagattaaaaatcttgtgtggttttctttacattcttccctctcctttattccgtgggtctcctgtgagcagatctgtctgtgtgtgcttcatttccacagccaccgatttaggctaagctgtccctgcgtgatcttctagtcatcccataaagggctggccccctccatggtccgttctgcctcattttcaacgtcctcacagctaatgtttattaactgtacacctcatttcacccacttttcgtatctccacccatttagtcctcacaaaatcctttgaggtaggttctgtaaagtctttgttttaaagtgaggaaagaggcacagagaggttaaatagcttgctcgaggtcacagagttagtgtgggacagaggcatgatccatgtccaggcagcctggccttgaacccatatcctcagtctctctgctgtccacttaaaatgcccacaaagaaccatgcttgtctctgtgtctctgtctttgttcacactacttatccaaatactattcatggctcaagttaatcatcagtaggcattctagaaggttctttacccatatctcatccaaaggagtaatattacaatagaagcattgtaggtacttttttttaatgacagctttattgagctataactcacatatgtaggtgctttctgatgtagcaggggaagtggtcttaacaaaggatttgcagtgaaaaaatacatagtcatgtgctgtttctgtcgatgctggaccacaaagaccatgtggccccatcatattataataccgtattttcactgtaccttttctgtgtttagaatactcaccattgtgttacaactgccgacaggattcagtacagtcccacactgtacagttttgtagcctaggagcaataggctataccatagagcctcgacgtggtgtaggccacgccatctaggtttgtgtaagtaaattctatgatgtttacacagcaacgaaattgcctaacaagacatttctcagagcgacacatgactgtgtgtctaaagcagttttatcatacaaagtagtggctcgtaagagggttaggaaattttagttacttgtagatgttaaaatatatactgctggccgagcgcggtggctcatgcctgtaatcccagcactttgggaggccgaggcgggtggatcacaaggtcaggagatcacgaccatcctggctaacacggtgaaaccccgtctctactaaaaaaaatacaaaaaaattagccgggcgtggtggcgggcgcctgtagtcccagctactcgggaggctgaggcaggagaatggcgtgaacccaggaggcagagcttgcagtgagcggagatcgagccactgcactccagcctgggcgacagagcaagactgtctcaaaaaaaaaaaaaaattatatatatatatacacacacacacacaaacactgctttactagcccccgactatataatactgcactgatttagaaacagaaagcaagtcatagcctgcagtgagggaaagaaaagggaagcacttacccattgaggtggggtccacacctgactgtagctggcgtctccagcccagccagaggtcggtgtggaaagccccagggctcttccatcgttgccgtagagagacttggaagagctgtttagtgtgcgccctctccagggtggttgtgctgtggctgccacatcacaggcgcttaacgtaacacacagaaggtttcggtgtgggtgggcacagcacgcccagtgaggtgatgcaaagcaactgggtgacaaaggaatgctttgagcggcctttgtttggtgaccaaccacacattgcattgcctggtcatgccttagattatggtggtggcctctggtggcacctggcttgggttgtagacagcagtttctggcacagtgacacacggggctccttgaatgtctaaatagtcctgttcttccagagtggtgaaacaaacacacatgtgccagtgacacatggagagaaaagcatattttaagaagtgttggggctgggcgcagtggctgacacctgtaatcccagcactttgggaggccaaggtgggtggatcatgaggtcaggagttcgagaccagcctggccaagatgatgaaaccccatctctactaaaaatacaaaaattagccgggcacagtggaaggcggctgtaattccagctactcggaggctgaggcaggagaatagcttgaacccgggaggcagaggttgcagtgagctgagatcgcaccgctgcattccagcctgggtgacagagcaagactccatatcaaaaaaaaaaaaaagaagaagtattgggctgggtgcggtggctcacacctgtaatcccagcactttggggagccgaggcgggcagatcacctgaggtcaggagtttgagaccagcctggctaacatggtgaaaccctgtttctactaaaaatacaaaaaattagccgggcatggtggtgtgcgcctgtaatcccagctactcgggaggctgaggcaggagaatcgcttgaacctgggaggtggaggttgcagtgagccgagatcgtgccattgcactccagcttgggcaacaagagcgaaactccgtctcaaaaaaaaaaaaaaaaaaaagtgtttttgcttcctttcacagtgtggtgtgtgtgctgattgttgggtattttctatttatattggccataagctgattaggggcctgcttacttgattgttttagaagagagctttggtggggcagggggcggtaagtgcagaaggatggatggttggcaagcactggggaagaggttgtaaaattgcattttcttctttggaagcagcagtatcttagtttgctttggtatgtcttagtttggtttggtatgtcttgttttccgggaaagacaaaggaagaggaaaatgacagctttgcaggtaaagaaactgagaggcttctctccctctataccaagagtaggctgaagacccatgtccagaaggctgacagaaaggtgcctgggtgaagagccactgagcttgatgctcaggaatctgagggcagagctccatgccagagaagtgggataccacattggtcctgggagccaagaggaccaggatagggagatgttaaagtggcctagactgtgtctttatgggcagacgccagttccatggacagactgcatatctgtcgtccatgaagcattgtctgttaacaccattttccattaaaaaagaaaaaaaattcagcacctacttagaaaataaaaaaaaatagccgggtgcagtggctcacgcctgtaatcccagcactttgggaggccaaggcgggcggatcacaaggtcaggagatcgagaccgtcctggctaacacggtgaaaccccatctctactaaaaatacaaaaaattagccaggcgtggtggcgggcgcccgtagacccagctactcgggaggctgaggcaggagaatggcgtgaacctgggaggtggagcttgcagtgagccgagatcgcgccactgcactccagcctgggcgacagagcgagactccgtctcaaataaataaataaataaataaataaaaaagaaaataaaaaaaataaaaatcccatcagtcacacttcccccatgcagtcagtctttcctaagtaattgctccctcctctaacctaccagaatatgagtctgcgtctcacaaatgtaatgcttcattttcttgttatttttttcttctttaatgaggtaagattaatatataacgtagaagtaaccatttaaaagtgtaccattttgtggcatgtagtacagtcacagcgttgcacagccaccacctctacctagttccactacatgtatcaccccaaaaggaaaacccttaaagcagtcgctgtctagacccccttgccccagcccctggcaaccacaaatctgctgtctctcttttcctatttttggatttacctattcacctctccgggatatttcatataaacggacttatacagtgtgtaaccttctatgtctggcttccttcacttagcatcatgtttcaaggttcatttgtgttgtagaatgtatcagtatttcattcctttttaaggctgaataatatttcattgtatggatataccaccatttgtttatcctcatccattgatagacatttgggttgtctccagcctttggctcttgcaaatagtgctgctatgaacatttgtgtaaaagtatttaaacacctgttttcagttactttgggtctacacttgggagtgggattgttggtcatgtggtaattccatgtttaactttttgagggatgccagaatgttttctacagctgccgcccatttgacattcccactggcaatgtataaggtttaagtttccattctttttcattttttttctttggtttagtttatattctttccatcatgaagtttaaaaattaaacatgttaatttgtttttgtttcttaaatactcatcctagtgggagtgacgtggtatttcattgcggttttgatttgtatttccctaatgtcaaataccattggacaccttttcatgtgcttgctggccatttttatattttcttgggagcaatgtctattcatgttctttgcccattttttaattgggttgtttgtgtttttgttgttgagttggaagagttctttttttctttttctttttttttttttttttttgagatggagtctccctctgttgcccaggctggagtgcagtggtgcgatctcagcctactgcaacctccacctcccagattcaagcaattctcttgcctcagcctcccaaatagctgggactacaggcgtgcaccatcacgcctggctaattttttttgtatttttagtagagacggggtttcaccatgttagccaggatggtctcgatctcctgacctcatgatctgcctgccttggcctcccaaagtgctgggattacaggcgtgagccaccgcgcccaaccagaagagttctttatgtattctggatgctaggtcatatcagatgatacatgtatcattggatatatgatttgcagatattcttgtgttagtccattgcatcactatacagaaatacccaaggctaggtactttatgaagaaaagaggtttaggccgagcacagtggctcacgcctgtaatcccaccactttgggaggccaaggtgggcagatcacttgaggtcaggagatcgagaccagcctggccaacatggcaaaaccctgtctctactaaaaatacaaaaaaattagccagccgtggtggcgcacacctgaaatcccagctactcaggaggtggaggcttcagtgagccgagagcgtgcctctgcactccagcctgggtgacaaagcgagactccgtctcaaaaattaaaattaaaattaactgggcatagtggcatgcacctgtagtcccagctacttgggtggctaaggtgagaggattgcttgagcccaggagtttgaggctgcagtgagccatgattgcaccactgcactccagcctgagtgacagaatgagactctgtctcaaaatatatatatatatttatagtaaaacatatatggcaaaaacactggccacttgttttgcgatggtgatacaaatacaaatatatatcatcactaagcaagtggccagtgtttttgccatatatgttttactataaatacaaactacagcatactttactgtttggcatggcagtgatttttatgaattaggcacctgtgaggtagatgttactctgcccattttacactcaaagaacctgggcttaggagggttcagatttgcctacgactgcacagctggtaggtggtagagccagaattcaagttcagatttgtctgggtccacggtgggcgcctgacctccactccacaacttcccttcctggggacataaatcgtgtctgttcccaggcctattcatcagttcaccagggtggtctaacgtccatggagcccctgacatgtgctagtgctgaactaaatgagcttgaagaagcttgaaagtgaacaggagaaggctcctctagagtatgaacaatagtggattgtttttaccatgcttacctttgtggaagagagctgaaattttcacctcttctttcttataggctgccagggcacagtgccccccaaggactgaaatagactagatttccttctctttttaatgtttaaactttaaaagaaatgcgtgctagctgtaaaaattcaaaaaaaaagcccgtctgcctcagtcctgcagccctctccagagggagtgacctcgtacagtttggcacatattattccagtctttatccatttgtaagcataaaaagtgcatacttttatgaggctataaatgcataaagacggatatataaaatatataagtgtatatataattttagggcttttttagtgggggaaaatccacaaatggataatactttggatattttctgcagctcgcttttttccacctgacgtacatttacgtctcacattgccattcctcctttgcagagatcctacagtaaggaattgtttgaagaagttatttcaaagatgcggaaggcagggatcaaatccacaatagcaatagaaaaatttaagctgctcgccgagaaagtggaggagatagtggccaagaacgcacgcgcagaaatcgactacagcgacgctcctgatgagttcagaggcaagtggactcgtcgttttcatgctgatttcttttgagttaactggaaatcgataacattacaagaggacgtcctgtgcaattaattttttaatggtgtgctagagctgctttttgagacaatctgtcttaaattacatttgcctatttttagctcatattgtaaattgagaggaagaaacatccttagcttagcctgacttaaagccagataacaaccctgaagattctaagggcagggctgcctttgcaagtggggattcacattttcaaagaattcccagaagtcctaagacaaagaattccagcctgccgtcctcgccacggagcctgtggggcctgctgctgggtctgtcccaggctttcttctctgttccctccccccagcagtagctgacaaagaagcgccttccccttacaaaaggcaatgtatatgcctttattgaaggctgatttccttctaaacctgggggcctcacaggggccctttgattgctgttcctttggatagatttttcgctggtagaacgggctttgttttctttttcagtcgtgggctctcagtagattagagtttgctttgctttgtccccgcagaccctctgatggacaccctcatgacagaccccgtgcggctgccctctggcaccatcatggaccgctccatcatcctgcggcacctgctcaactcccccacggaccccttcaaccggcagacgctgacagagagcatgctggaaccaggtagaggagggtgcagtttgaggtgcagcgctggcgtcagtaccaagagataaagcccaagtcacatattggagatgaagcagaagggaaatttatcaaatgcagaaactacctactttatgacactctgtagcaaagacccaaaacactcttggccctttttccctgcagacatccagtccctccctctcatgtcccagtccttctggagtcttcggctcaatgagggaaagaatggccttttcttcccatttatacagagcgacaagcatcctctctcaggaagagccctcccatctggggcattaatcctcctttttttcttttctcagtgccagaactgaaagagcagattcaggcgtggatgagagagaaacagaacagcgatcactaaaccgttccgccgcccaccctctgctagacacagccaaggccaacgaggcaagcagaagcagcggccgcagcgaagctgccgttcatgtgttggaggccaaatgtggcaaaccaaccccaggcccacccagagcgagcaaacgctgagacctgaaaggacatggatgagaagaggagcccgcttcctgtacatatatttaagtgacaaacacggtcaaaagcttaagggacaggttttatggttgcttgtgtaataaagcatgtccttcgtatgtcacagtttggggcaacggaagtcttttagtgatggctaatgggtctgggcagcatcccttcatgaatttttttttaatccaatatccgttgatttgattgtgattagagaaccttggacattttgctgctaaagaatcttttttcccctctcccccttcctgaccctacttgcactgctgtggatttttttaagagaagcaaaaacaaaagtaaactcctttccctggccctccaaacatatattctgtgagataactgtgcctgctaccaagtgttaatcctgggatcgtatttttatatcatattcacatatttgtttttttaattggtgttagatgacatgattaataaaaaaggcaagatattttcagaatttgaatttcagttttttttttcttttgaaatgtccctttaagatttttttattctaaacaaaataaagaaaatcctgctgctctggtccttgtgataagcctctcttcggcatctgaggagcagctgcagcaaaatctaggggtgtaagtgtatcaggacttatgtgacttatattttggggagatgagggttgggttttttttttaatgctacgtgacagtttgaaaccttcacagttatcctctgggggtaaatcaattcttcaacccttgggtgtgtgagtttgaggcagggtcatttgtgtgatgtgtttggccttaccaaagcaaaagagggtgcaagaatgtgggagtatgtctgccggtttcaacacacacagacaaacacagccacacgcgcacacaagtataagactttttgtattactgctccctacttaacatacttgaattctcaaatttcctttggggtaaaaaaaaaaaaaggatttgaaaccataaagtgttctgaagaaattaagtctataaaaagcatactttcttttttcttttccttttttccctccacagacaatgtcctctgttcaattcctaacgcaaactacaataaatggtgacacacgttcagaagaaatcttctttgagtctcttctcttttgtggaaaaaaaaaaagggcagggcgggtgggtaaacaagagccaagtgagtttgcatgtggtgaatgatctttcctggatccaattaggagctgctatttttaaaagaaaactttcttattcatgtcagtctcgacatttggttctcatttcactgtttgctgatttgagggggtaagctttgtcatattcagtcttctgcctttcttgagtttcttctgctttatctcaagtatcttccctgaccttcaagattcttcctcaggccgggcccggtggctcacgcctgtaatcccagcactttgggaggctgaggcggatggatcacctgacgtcaggaattcgagaccagcctggccagcatggtgaaaccccatctctactaaaaatacaaaaaattagccgggcgtagtggcagcgcctgtagtcccagctactcgggaggctgagacaggagaattgcttgaacctgggaggtggaggttgcagtgagccgagatgacgtcatcacactccagcctgggtgacagcgagactccgtctcaaaaaagaaaaaatatatatttatatatatttacatatatatttatttatatatatttatatatatatatataacatggccaggtgcggtggctcacgcctgtaatcccagcactttgggaggccaaggcaggtgtatcgtctgaggtcaggagttctagaccagcctggccaacatggtgaaaccccatctcaactgaaaatacaaaaattagctgggcgtggtggtgggtgcctataatcccagctactcggggggccgaggcaggagaattgcttgaacccaggaggtggaggttgcagtgagctgagatcgcgccatcgcactccagcctaggggacaagagtgagacttcgtctcaaaaaatagatagatagatagacacaataaataaggaaaaagttcatgatagcaaaaattttaggcaatataagcaaaaagaaaaaaaatccatattctcaccatgcagaagattctgtttaattgggtttactttttactaaacttacatatctaagcttagtgcctgtagaattaggatactgactggcatcttgcctaattttgtttgtgtggttatctgaccagtgtgtactgcttgtctcctctccatcccagattccaaactcttattttaatcctccagttgtccccgtgaatgtaataaaatgctgctttataccgccatatgcacttgtcgttttgaataattcagaggtttcaaggacctgccggataggacagagacacagtcagtctcctgcctgtactatctatagggggaagatgatttgggtttccatttttagagtctcaagagttgctgttttgtgtttgtctgcagtctcttaattgtggatattgaaataaatcccaaaatatattaaaagtaggtcttggctaaaaggaagattgtcaaataagagaatcagattggcagaagagaaatgatccttgagagaaagatgattaaaatctgccttgtgttgtgactcagtgttgtgtagattttaaaaagatattgattgaatatcttttgaaaaaaaagctgagcacaccgttcactttttgtaacctctgggtttggtacatcgagtagtgaatttcacagcaatttgattggagtgctaaagtgacatgaataggcctcatttgagtaggtacttttttttgttttttggtttttttcagacggagtctcgctccgtcacccaggctggagtgcagtggcgcaattttggctcattgcaacctccaccttccaggttcaagtgattctcctgccttagcctcccgagtagctgggactagagcacatgccaccatgtccagctaatttttttttttttttttttttttttttagtagagatggggtttcaccatgttggccaggctggtcttgaactccagacctcaagtgatccacctgcctcagcctcccgaagtgctgggattacaggcatgagccaccacaccaggcctcaaggtacgtttttgattgaaggagacacagtagcctatgagcttgatgctggtgtcagatagtgttggtgaagaaagtcattctgaattggtgatgatcatttgcatttcatgagcatattctatgtgcaagccactcttacatgtattaattttttttttttttttgagacagagtctcgctctgtcgcccaggctggagtgcagtggcgcgatctcggctcactgcaagctccgcctcccaagttcacgccattctcctgcctcagcctcccgagtagctgggactacaggtgtccgccaccatgcccagctaattttttgtatttttagtagagacagggtttcaccgtgttagccagggtggtctcgatctcctgacctcgtgatccacctgccttggcctcccaaagtgctgggattacagacaagagccaccgcacccggccacatatattaattaatttaaccctccacaaccataatgtagtggaactggcacatgaatctaggccatctggcctttccagcctcatctcttcccgactcctgctgtatggcagagttccagaatgctagaagttcagaatagctcagaatgcccaaggagaagcagcatagcattttggaagggactttggccttgagatcagctctagacctaacccccattttaaacaattagataacttcaatatcacagctttcattcgttactagccactcacgttgaccccagatgtatatctcaaacctccacttctctcctgtactgtacacactggccatctcagatgactaaaaggtcctcagacttaacatatcccaacctgaactctgtacatttcaccccacgcccgctcctcttagtctcctcatcacagtaaatgacaactccatccttccaagtcgctcaggccacaaaccttcgagtcatccttgactccgctgttgtgctctcctcctatgtccaatctgtccacaaatctctctgctcagctgggtgcagtggctcacgcctgcaatcctagcactttgggagaccaaggtgggtggatcacctgagggcaggagttcgagaccagcctggccaacatggtgaaaccccgtctctactaaaaatacaaaaattagctgggcatggtggcgggcttctgtaatcccagctgcttgggaggctgaggcacaagaatcacttgaacccgggaggcggaggttgcagtgagctgagatcgggccactgtactccagcctgggctacaaagtgagactctgtctaaacaaacaaaaaaatccctctgttctacctacaaaatgtatcccagaactcgacgactactccccaggtcccctcctgtcactttggtttgagttgctgctgctggctctctcctggattattccaacagcatcactggtcctcctgcctctccccttaacctcctttctcagaaaagcaggtaggatgatcttgttaaaactttggctgggcgtggtggctcacacctgtaatcccagcactttgggaggctgaggtgggcggatcacctgaggtcaagagtttgagaccagcctggccaacatggtgaaaccccgtctctattaaaaatacaaaaatcagctggatgtggtggtgtacgcctataatcccagctactcagaaggctgaggcaagagaatcgcttgaacccaggaggcggagattgcagtgagccaagattgtgccactgtactccagcctgggtgacagagtgacactctgtctcaaaaaaaaaaaaaaaaaaaaccaaaaaaaaaacaactatagctaggcgtggtggcatgcacctgtggacccagctactcaggggctttggcaggaggattgcttgagtccaggaagttgaggctgcagtgagccgagattacaccactgtactccaacctgggtgacaaagtggggaccctatctcaagaaaaagatgctgggtgcggtgactcacgcctgtaatcccaacactttgggaggccgagatgggcagatcacgtgaggtcaggagttcgagaccagcctggtcaacatggtgaaacccagtctctactaaaaatacaaaattagccaagcatggtgatgcgtgcctgtacaagtcccagctacttgggaggctgaggcagaattgcttgaacctgggaggcagaggttgcagtgacccgagattgtgtgccattgaacttcagcgtgggcaaaaaaagagcaaaaattgcgtctcaaaaaaaaaaaaaagaaaaaagaaagaaaggggctggaaaaaaaaccctaaagccaggtgtggtgttgcacgcctgtagtcccagcacttccagagatcgaggtgggaggatcgcctgagcccagaaattcaaggctgctggagcagaagctccagcaaatgcaaggggctatgatctagccaccacactccagcctgggtgacagactgagactccatctcaaaaaaaaaaaaaaaagaaagaaagaaatccttacaataacctggaaggcaaaacgctcacctcgcattctctctgatctcatctcctacaacactccccttactccaaaaactcagccattctggcctcattgctctccacccctgctagggcactagactacttcctctatgaagaatcctcttcccacagatatacatatgggtcagtcactcccttatttgctttagatctttactcaaatatcaccttggtgagtccttccctgtccaccctatttaaaaatgtaatttattcacctaaccttggtatcccttgctattccctttctttgcattttctccttggcatttatcactatctaacatgctatatctattatgtactttacagtccacttccccccactagaatgtaagcccggggtgggggggggcagagatttttttctgtatccttggcacctataagtgtgcctggcaaatatatgtgttgaatgaattaatctcttcatatatttgttactctagttgtatcagttatttattgctgcataacaaaatcaccccaaaatggagtggcttggttcaataacagtgattttatcccccacagttctggaagatccaagagcaagcttccaagaggaccagacagaagctgtgtattgcccttttacagcctaggcttggaagtcacatagtgtcacttcagcagcagtcacaagcctgcctggattgaaggggaagaaatgcagaacccgcctcatgctgggagggaggtcaacgtcactctgtgagaagagcttctgggatgggagacgtcgttctgaccatcttgcaaataacatttgccacgttcctcctctggcaacaatttacattcttcatatctgcaaaatgatgccttatttccttcccgtgagattcccaaaccgcatcccatcagggcatccgcttcaagtccagcatctcatcattgaaatcaagtccagctgcagatgaggcttctcagatgggattctttgaacgtagttccttgagtgttaatcttacggatttaaagatctgttaatgaaagatacaagttacctacacacacatgcacacacacacacaccacgtgcacacatacaccacacaccacatagacacacacgtgcacacacacaccacatgcacacacaacatgtgcacacacaccatgcatgcaatgatgggacaggcatgggaaaaccattctggatgatcctgttcaaaaaggtggaaaatggtaccccacaggagtcactggtccatagtattaataattctgagatccaaccaggcatatgtcaccagttccttgttcagggctcagtcctacagcccaggaattgttcaccaagcctctcagctccaccctcttggctctttttgtcctctgaatcttttcttccttttccataaaacaaaaaacaaaaactgagcttgcaattaagccttctcagtacatttcctgcttattaaaaaaatatatacatatgttgcagtaacgccgggtgcggtggctcacgcctataatcccagcactttgggaggccgaggtgggtggatcacaaagtcaggagttcaagagcagcctagccaagatggtaaaacccccgtttctactaaaaatataaaaaattagccaggtgtggtggtaggcacctgtaatcccagctactcaggagggtgaggcagagaattgcttgaacctgggaggcggaggttgcagtgagctgagatggagccactgcactccagactgggtgacagagcaagactccatctcaaaaaaaatatatatataatataatattatataatattatatattataataatatatataatatatattatataataatatataatatatattatattataatatataatatattatataataatatatattatataatatataataatatatataatacatattatttaataatatataatatatattatataataatatataatatatattatataataatatacattatattatataatatataatatatataatatatattatataataatatataatatatattatagaatgatatattagatattatataattatatatataatattatatattatataataatatataatatatattatataattatatatataatattatatattatataattatatataatatattatataattatatatataatattatatattatataattatatataatatatattatataattatatatataatactatatattatataattatatataatactatatattatataatttatataattatatatattatatattatataattatatataatatataatttatataattatatatatattatataatatataataacatatatattatatattatataatacatatatattatatattatataatacattattatataatatataatatatattatataatgcattattatataataaatattataatattatatatatataggggtttaaaagtctcttttgatgttgtactttctctgtcctgtcccttttcatttaagctggaggcagtttgaccagaccaattaccttaaaatgttgtgggttttctatgaatcttgctggagtttgctctgttaggcaaaagccgcagctacaagtctcttctggataaacttttctctattttggattacttgtgtaactcttaaatctttctgaggtcttaataaaggattctgaagtcaggctttttttttttttttttttgagactgagtctcactctgtcaccaggctggagtgcagtggcgtgatctcagctcactgcaacctccgcctcccaggttcaagtgattctcttgcctcagcctcccgagaagctgggactacaggtatgagccaccactcccagctaatttttgtatttttagtagagacggggtttcaccatgtaggccagactggtctcgaactgctgacctcaggtgatccccctgcctcaggctcccaaagtcctgagattacaggcgtgagccaccgcacccggcctgcggtcacattttttaccccatctttagatatcgtcccgaaagtgcactgtttttgatttctgaccagaagccatttcttaattttttaatttttttttttttttgccagttcatctcacatttttctacaggcaatgaaagaagccaaatggtatttcattattctgccttcacatctcctgacatagatcattgagttcacttggcagattttctcctttccaagtcaccgcagacaacggtgttgacaaaatctccacctctaagtaacagaggtcccctttcctgcagtttccaacagtatttactcactttcctataagcctcactaacggtgttctcaatacatttttatcctctgcctactaactccatcccaaagccaatgccacatgcattatactttgtttcaacagcacccacttccaaagacctaaatcttaatcgcccaaatctagtggcttaaaacagaatctattaatatctatcatgggctgggtgcagtggctcacccctataatcccagcactttgctttgggaggccgaggcgggcagatcacctgaggtcaggtgttcaagaccagcctggccaacatggtaaaaccccgtttctacaaaaagtacaaaaattagccaggcatgatggtgggtgcctgtaaccccagctacttgggaggctgaggcgggagaatcgcttaaacccaggaggcagaggttgcagtgagccgagatcacaccactgcactccagcctgggcgacagactccgtctcaaaaaaaaaaagaaattgttaatgtctatcatggttttggggttgactgagctcactgggctgttctcactcagggatcttacactgttaccgtcagatggtggctgaggctagagtcacccttagggcttcctcactcacatctggctgttggctggcacacccaggtgtgccctctctggagctaggttccgagagctagcaccctgagaagaccaggcagaagctgggtttctatggcccagcagcccagaggtcttatggtatcacttctgctgtggccacaggcatgctcggtttccaggagaggaaacacagaccccacctctcagtagggaggagtctcaatgccatgtttcaagaatagcacggaggactggaggtcttgttgcagctgtcttagaaactagaactagccacacaggtttctccctttgtaaactatctatccttctgtatgtgcttttctgccctttctctcgtgttttttaggtttttgtttgtattattctagaacttacttcctagtcagttttattttaattattttatttatttatttatttatttatttatttagagacagggtctcactctgttgcccaggctggagtgcagtggcatgatcacagatcactgcagcctcaacttcccaggctccagcgatcctcccacctcagcctcctgagtagctggcactacaggtgtgcaccaccacgcctggctaattttttgtattttttgtggagatggagtttcactatgttgcccactctggtctcaaactcctgggctcaagcaatcctcctgcctcggcctcccaaagtgctaggattataggtgtgagcccttgtgcctggcccaccttttctttgttttgttgttgttgttgtttgtttgtttgttttgttgttgtttatctttgggccccatctttttattataaagtgtaacacctggctgggagcagtggctcacacctgtaatcctagcactttcagaggccgaagcaggcagatcacgaggtcaagtgatcgagaccatcctggccaacatggtgaaaccccatctctactaaaaatacaaaaattagctgggcatggtggcgtgcgcctgtagtcccagctactcaggaggctgaggcaggagaatcgcttgaacccaggaggcggaggttgcagtgagctgagatcgcgccattgcactccagcctggtgatagagcaagactccatctcaaataataataattataataataataataataaataaagtataacacctatgttaggccattctcgcattgctataaagcaagcttgtccaacctggggcccgtgggctgcaggcagcccaggacagctctgaatgtggcccaacgtaaattcatgaacttccttaaaacattatgagattttttttgcgatttttttttttttttttagctcatcagctatcgttagtgttagtgtattttatgtgtggcccaagacaattcttcttcttccaatgtggtccaggaaagccaaaagattggacacctctgcagtgtaaaggaatatatgaggctgggtgatttataaagaaaagagattgaattggctcatggttctgcaggctg

SEQ ID NO: 91 - DNA, 5918 bp, Homo sapiens
ccgccctgttgttttgatgaataatacttggtggggcgagggggaaagagtaggggtggaggggtaggaggatttactcttccagcgagagctacgcgcatcccatcctccccctcccccctacccgggctccggcgtggaggcggggcgtggccggcctgctttgggaggggaggggcttcccttacagtgctgggctctgccaggacggctgtggggtcgccttacctcggggtatccactctgcagtcgaccagttcccgccaggagcaaagggtaggaaggagagcaggatctgctgtaggaacgcagctaccgcgccactatcacgaagaaacagcaggctcggggcacgagacgaactggagaccgcgctgcctagctgggtaacctgggaagcagagggtaataagtggcgccttaagacaaccctgtagcagcagcagtggcggccaaaggaggctgctcagggaacaagcggctgtagtagtctgtggggcgactggagtgaccgaagccaaggcagtttagtgcctctcgtgttcttattttttaacctctgactatgcaattctgaaacctcccccattcgggggaccagacagcctgatagacaccttccactctccttcctcccgccgtggtctcgagaacagaaggatctctccttaacgcctttcaccattaagaggaaagcgatggaggagctgagcgctgatgagattcgacggaggcgccttgcacgacttgctggtggacagacctctcagccaaccaccccactcacctctccccagagggagaaccctccggggcctcccatagcggcatcagccccaggaccctctcagagtcttggtctcaatgtccacaacatgaccccagctacctccccaataggtgcatcaggagtagcccatcgaagccagagcagtgaaggagtcagttctctcagcagctcgccctctaatagccttgaaacgcaatctcagtctctctcacgttcccagagcatggatatcgatggtgtctcatgtgagaaaagcatgtcccaggtggatgtggattcaggaattgaaaacatggaggttgatgaaaatgatcgaagagaaaagcggagcctcagtgataaggagccttcctcgggccctgaagtgtctgaagagcaggccttacagctggtctgtaagatcttccgtgtctcttggaaggaccgggacagagatgtcatctttctttcttctctttctgcacagtttaagcagaacccaaaagaagtattctccgattttaaggacttgattggccagattttaatggaagtgctaatgatgtccactcagaccagagatgaaaacccatttgccagtctgacagccacatcacagccaattgctgcagcagcacggtcaccagacagaaatctcttgctaaacactggctccaatccaggaacaagccccatgttctgcagcgtggcttcctttggtgccagctctttgtctagcctctatgaaagtagtccggctcccactcccagtttctggagctctgttcccgtgatgggcccgtctcttgcctcaccttcccgtgcagccagccagttggctgtgccttccactcccctcagtcctcacagtgcagcctctggaactgctgcgggaagccagccttcatccccgcggtatcgcccctacactgtcactcacccatgggcgtcctcaggcgtctccattctgtcgagctccccaagtccccctgccctcgccagtagcccccaagcagtgcccgccagcagttccagacagaggcccagcagcacgggtccacccctaccacccgcctcacccagtgccacgagcagacgcccctcctccctgaggatctctcctagtttgggagcctctggtggagcaagtaattgggattcctacagtgaccatttcaccattgaaacctgcaaagagacagatatgctgaactacctcatcgagtgtttcgaccgagttggaatagaggaaaaaaaagcaccaaagatgtgcagccagccagcagtcagccagcttctgagcaacatccgctcacagtgcatatcccatactgctttagtactacaaggctccctaacacagcccaggtccttgcagcagccgtccttcctagtgccgtatatgctgtgtaggaatctcccatatggcttcattcaggaactggtgagaaccactcaccaggatgaagaagtgttcaagcagatatttatccccattttacaaggcctggctcttgctgccaaagagtgctccctcgacagtgactactttaaataccccctcatggcactaggtgagctctgtgaaaccaagtttgggaagacacaccctgtgtgcaatttggttgcttctttgcggttgtggttgccgaaatccttaagtcctggctgtgggcgggagctgcagagactctcttacttaggggctttctttagcttctcagtctttgcagaagatgatgttaaagtggttgaaaaatacttctcagggcctgccattaccctggaaaacactcgtgtggttagccaatcattgcagcattacttagagctcggaaggcaagagctttttaagattctgcatagtattttgttaaatggcgaaacccgtgaggctgctctcagttacatggcggctgtcgtcaatgccaatatgaagaaagcacagatgcagacagatgatagattggtgtctacagatggatttatgctgaatttcctttgggtactgcagcagctaagtacaaaaatcaagttagaaacagttgatcccacgtatatttttcacccaagatgtcggattactcttcccaatgatgagacgcgtgtgaatgcaacgatggaagatgtgaatgactggctgactgaactctatggcgatcagcctccattttctgagccgaaattccctacggagtgcttctttctcaccctgcatgctcaccacctctctattctgcctagttgccgtcgctatatccgcagactccgggctatccgggagctcaatagaactgtagaagatttgaaaaataatgaaagccaatggaaagattccccactggcaactagacaccgcgaaatgctgaagcgctgtaaaactcagcttaagaaactggtacggtgcaaggcctgtgctgatgctggcctacttgacgagagcttcctgagaagatgtctgaatttttatggccttctcattcagctgctgctccgcatcctggaccccgcatatcccgatataacactgcctttaaattcagatgtccccaaggtatttgcagcgttgcctgagttttatgtagaagatgttgcagaatttttattttttattgtacaatactctccccaggcgctttatgagccctgtactcaggatattgtgatgttccttgttgtgatgttgtgcaaccagaactacatccgaaacccatatttggtggccaaactggtagaagtcatgtttatgaccaaccctgctgttcagccacgaacccagaagttttttgaaatgattgagaaccatcctctctccaccaagttgttggtaccttccctgatgaagttttatacagatgttgagcataccggagccaccagtgagttttatgacaagttcacaattcgctatcatattagcaccatttttaaaagcctttggcaaaacatagctcaccatggcacctttatggaggagttcaactccgggaagcagtttgttcgctatataaacatgttgataaacgacacgacgtttttgctcgatgaaagtctggagtctctgaagcgaatccatgaagtgcaggaagagatgaagaacaaagaacagtgggaccagttgccccgggatcagcagcaggctcgtcagtctcagcttgctcaggatgagcgtgtgtcccgctcttacctcgccctggccaccgaaaccgtggacatgttccacatcctcacgaagcaggtccagaagcccttcctcagaccggagcttggaccccgattggctgcaatgctgaactttaatcttcagcaactttgtggccccaagtgccgtgacctgaaagttgaaaaccctgagaaatacggctttgaaccaaagaagctgttggaccaactgacggatatttacttacagctggactgtgctcggttcgcgaaagccattgctgacgaccagagatcctacagtaaggaattgtttgaagaagttatttcaaagatgcggaaggcagggatcaaatccacaatagcaatagaaaaatttaagctgctcgccgagaaagtggaggagatagtggccaagaacgcacgcgcagaaatcgactacagcgacgctcctgatgagttcagagaccctctgatggacaccctcatgacagaccccgtgcggctgccctctggcaccatcatggaccgctccatcatcctgcggcacctgctcaactcccccacggaccccttcaaccggcagacgctgacagagagcatgctggaaccagtgccagaactgaaagagcagattcaggcgtggatgagagagaaacagaacagcgatcactaaaccgttccgccgcccaccctctgctagacacagccaaggccaacgaggcaagcagaagcagcggccgcagcgaagctgccgttcatgtgttggaggccaaatgtggcaaaccaaccccaggcccacccagagcgagcaaacgctgagacctgaaaggacatggatgagaagaggagcccgcttcctgtacatatatttaagtgacaaacacggtcaaaagcttaagggacaggttttatggttgcttgtgtaataaagcatgtccttcgtatgtcacagtttggggcaacggaagtcttttagtgatggctaatgggtctgggcagcatcccttcatgaatttttttttaatccaatatccgttgatttgattgtgattagagaaccttggacattttgctgctaaagaatcttttttcccctctcccccttcctgaccctacttgcactgctgtggatttttttaagagaagcaaaaacaaaagtaaactcctttccctggccctccaaacatatattctgtgagataactgtgcctgctaccaagtgttaatcctgggatcgtatttttatatcatattcacatatttgtttttttaattggtgttagatgacatgattaataaaaaaggcaagatattttcagaatttgaatttcagttttttttttcttttgaaatgtccctttaagatttttttattctaaacaaaataaagaaaatcctgctgctctggtccttgtgataagcctctcttcggcatctgaggagcagctgcagcaaaatctaggggtgtaagtgtatcaggacttatgtgacttatattttggggagatgagggttgggttttttttttaatgctacgtgacagtttgaaaccttcacagttatcctctgggggtaaatcaattcttcaacccttgggtgtgtgagtttgaggcagggtcatttgtgtgatgtgtttggccttaccaaagcaaaagagggtgcaagaatgtgggagtatgtctgccggtttcaacacacacagacaaacacagccacacgcgcacacaagtataagactttttgtattactgctccctacttaacatacttgaattctcaaatttcctttggggtaaaaaaaaaaaaaggatttgaaaccataaagtgttctgaagaaattaagtctataaaaagcatactttcttttttcttttccttttttccctccacagacaatgtcctctgttcaattcctaacgcaaactacaataaatggtgacacacgttcagaagaaatcttctttgagtctcttctcttttgtgg

SEQ ID NO: 92 - protein, 1286 aa, Homo sapiens
MEELSADEIRRRRLARLAGGQTSQPTTPLTSPQRENPPGPPIAASAPGPSQSLQVHNMTPATSPIGASGVAHRSQSSEGVSSLSSSPSNSLETQSQSLSRSQSMDIDGVSCEKSMSQVDVDSGIENMEVDENDRREKRSLSDKEPSSGPEVSEEQALQLVCKIFRVSWKDRDRDVIFLSSLSAQFKQNPKEVFSDFKDLIGQILMEVLMMSTQTRDENPFASLTATSQPIAAAARSPDRNLLLNTGSNPGTSPMFCSVASFGASSLSSLYESSPAPTPSFWSSVPVMGPSLDSRAASQLAVPSTPLSPHSAASGTAAGSQPSSPRYRPYTVTHPWASSGVSILSSSPSPPASSPQAVPASSSRQRPSSTGPPLPPDSATSRRPSSLRISPSLGASGGNWDSYSDHFTIETCKETDMLNYLIECFDRVGIEEKKAPKMCSQPAVSQLLSNIRSQCISHTALVLQGSLTQPRSLQQPSFLVPYMLCRNLPYGFIQELVRTTHQDEEVFKQIFIPILQGLAAKECSLDSDYFKYPLMALGELCETKFGKTHPVCNLVASLRLWLPKSLSPGCGRELQRLSYLGAFFSFSVFAEDDVKVVEKYFSGPAITLENTRVVSQSLQHYLELGRQELFKILHSILLNGETREAALSYMAAVVNANMKKAQMQTDDRLVSTDGFMLNFLWVLQQLSTKIKLETVDPTYIFHPRCRITLPNDETRVNATMEDVNDWLTELYGDQPPFSEPKFPTECFFLTLHAHHLSILPSCRRYIRRLRAIRELNRTVEDLKNNESQWKDSPLATRHREMLKRCKTQLKKLVRCKACADAGLLDESFLRRCLNFYGLLIQLLLRILDPAYPDITLPLNSDVPKVFAALPEFYVEDVAEFLFFIVQYSPQALYEPCTQDIVMFLVVMLCNQNYIRNPYLVAKLVEVMFMTNPAVQPRTQKFFEMIENHPLSTKLLVPSLMKFYTDVEHTGATSEFYDKFTIRYHTIFKSLWQNIAHHGTFMEEFNSGKQFVRYINMLINDTTFLLDESLESLKRIHEVQEEMKNKEQWDQLPRDQQQARQSQLAQDERVSRSYLATETVDMFHILTKQVQKPFLRPELGPRLAAMLNFNLQQLCGPKCRDLKVENPEKYGFEPKKLLDQLTDIYLQLDCARFAKAIADDQRSYSKELFEEVISKMRKAGIKSTIAIEKFKLLAEKVEEIVAKNARAEIDYSDAPDEFRDPLMDTLMTDPVRLPSGTIMDRSIILRHLLNSPTDPFNRQTLTESMLEPVPELKEQIQAWMREKQNSDH

SEQ ID NO: 93 - DNA, 14801 bp, Mus musculus
  misc_feature (1)...(14801): n = A,T,C or G
tagagccatgctcccaagcttctctcttcacccccctttccgccattgggtgccagaggtcagctggaaaggagccgccttaaaaaaggaggaggtgagtaccggcagctggatgggtgcttggctatatagccctgcgcctgcctgaggtagctgacggtcagtgtgtagccattggcagtcgcccaggagctgtacggcttcccggcctccaagctggactcctttgtggctcagtggctgcagccaaccagagagtggaaagaagaggtcctggagaccgtgcagacagtggagcagttcctgaggcaggagaatttccgtgaagatcgtggcccggctcgggatgtgcgcgtgctcaaggtactcaaggtaagactggacttcaccattcccagccaggacagggcaaaccccagtgccagggagtcccctcgcctcgtgatccctagttcacgcttctgacatctcgagacagccccgcgagccttgagcagaatgaactactaaagaagataataaaagaccacctctggagaaaatggtagggaaagcctgcatattctatcattaaaacttatactctgagagatagataccattcttgtcccattttacagatgagcctaacaaaggctccacaatgtcagagctacagtgaccacatccaatgcaaggcctctagttggatcctgacatgtaatttgtaaataacaatttttgagagcctgacttgggggcccattcttgcaaccccagcatgtgggaggtagagaagcaagaggatggttggttcacagcctaggttacatatcacagaacaacacacacacacacatacacacacacacacacacacacacaccacagacagacagagacacagagagagtgtgagtttggggatgagtggtaaatgtttaatatgacctgcattttggtaagaaaactgccgtttgtcaagttaaatcgcacctactggggtggggaactctctttagggggacacatgctatgctgtattggggcaaagctccttgctgtccgctactcactttaaagtgattgagatgacacaaatgcgggatctgtggatgtggctcaaggctagagtgaaagcctagcatgtacaaaagaaagacagtcaccgatgtggcaagtttagatgtgctggctgcctggatggtatcttcttcctaattttttccacgttttaatattttgataactgaaagactcttaaaatggaggctgagagtagccattgggcttgttcagagatgtaactgctgacgtcagagctgggatttgaacccggctactcaaacggtgacccaagtttctcactaatatttttttttcctccttaaatccttcttccaactgccacccctaccccctagctgagctaaggatcacaggttcaacagaccctggaagggggtggggcaagggctgagtgtagctgctcaaacttattatcccagccctgcagaggcagagacaagagaaccactaggcctaccaaccagtctccttggcctatcagtctagccaaatctgcaagccctagggcacagtagaataccctgtgtcaaaaaaaccaaatgagcagcctaaagaacaatacccaaggttgccctctgatctccacacacaagtgtgcactagtgcaggatgcacacatgcgcacacacacagctttggagaagaactaacctcagccaattgttcatttaaatgttaaggagattgacacctgaagaggttgacacatcttaatgccatagcccaagtggttgcagcatctagactagaattaggactggattcccagcctgagattttaaacttgcgctattgggttgaattttgaagtcttgagcttcaggtcacatgatttagaagtgacagccatagttttgtcaccacacagagaggatttgagtctgggctcttcctctcaccagctgtgtgactctgatcatcctgtctcatgtctcaagtccttggtctgctcctctatgatggcagcatcccaaacatcgtgttccatttcccaacactgaggccatgcagcctaaaggttagctcagggtaaagtcttagaaacaagggtttcattatgatacttgcctggggctttttcctggctgctgggagtctctgggggcaaggctgtactctagatcactccctccctgatatacctaaggaaaaaaatatgtagaacaagtatctagatagaagaaagactcaccaaatagattaagttttggcagctgcagatgctaactgctaagcctcatttctcctccccttaacccactaaatgatagtcatgcctacaaagcaagaacagtaagagtgtatcttgcactggatgtatcctatactggatgtatcctgcagtggatgtatcctacactggatgtgtcctacacaggatgtatcctacactggatatatgttacactggctatactctcattgaatgtatcctacactggatgtatcctacactggatgtatcctaaactggctgtatcctcattggatgtatcctacactctacactctatgtatcctatacttcatccctccatccttgaagctccagagggctgagttatccacgtgactgaatccgagatgacaaccaaagcaaatcacgaagtctatcctaagctgtgctttcttcactggggaagggagagggcagtgtagacataacctgacctgcagagggatcgccctttgcccacatccacaatcaatctccggtcctttctctcaggataggaacaccaagtctgaatactagtggaatcagaattaaaatggagaatcaagaaggcagacacctgctgtctgggaacagagcatagtgtgtggacaccatcatagggtggagagaaagacccattggtggtgtctgctgagctgccatttaactccctggctggctgggagaccttgcaagtggattgtgctccactgcctctgtattcagtgttgtaccctggggagccaggtcacaggaccagtctccatggcgattaaaaaggagatgtgcattaaatggcctttggtagtgccagatacagggactgctcagcctgtgataacagtattttaatttctgcagtgactcactaaccaggaaaagtagccacccagagactgacccaaccccagtagtctcatgtggggtgagccagaggtgagccagagagatgtagggctttgtatgccaaggaggcagagccaggagagtaagcctggactctctcttcaaaatcatctgattcaagagccagcaggatggctcagcatgtaaaggagccaagactgacaccctgagtataatcccaggggcccacatgatgaaatgagggaaccaacttccaccagttatcccctggcccccacatgtgtgccatagggtatgtgggacacacacatacacccagaggaataaataaaatggaaaaaaattaaacaatccagtttcttctcttgtcattaagagatatagaaactggggggtctggagagatggctcagtgattaaaagtactgactgctcttccgggggggaggggagcgaggaaactaatgtgactaatatggaaggagctggggatcaactcgatgaaaagggaagagatacgcaccgctgactgctgacttctgggacacgccttgctgacttcaggacacggcccacacacacatcctgggcgtacagtgctgtgtctgatcttcctaataaccctatcactggtttggtttctcacttgccagactttggcctccttaatgatcacgtagccggtgagtcaggccagggctaggcttagagctctaatgccaaagaccttgtcacccatgatggaggctccctgagccatccacaatgcaattaaaccaaggaagcagagagaatggaggggagaaaggaaaaatggatagatggatggatggatgaatggatggatgggaccgactccctgtttcacagatggtgcagtgggtatttctacaggtcaggagtcctttaccagatacttaggccctgaaatgtttcaggtttagaaacagccccactccccagctcttcggcctatctacataaacataatgagataccttagggtaggacccagatctattcttgaagttcatgtgtcttcacatacccaaaggcaactttatacgctacttttagtcacatggggtcaggtgtgggattttccacttgtggtggcatatcagcaggtttcaaaaaaggctcttggattttgatcattttggagtgtttttattggggatactcagtcctgattctcttagagcagacatttccctgggttggagaagactgactctctaaaggtgtacagtgcagggaaatagcaagggctgctcggtgggccagtcctggaacccgtgcctgggaggctgaatcaggggggccatgagttcaaggacagcctgagctaaacagcaaggtccaggtcagctgcaggctgtgtattagaacagagaccctgtgtcaggaggcctgggggccagagtccagctgccagagatgctgagcacaagattcaccctccatgtgtctgcacccgtgacgtgggaagcaacacttttcagctagcctgtgtggaagggttctcaattaaagggctgtatcgtatgaagagccccaggttgctgggcctgtggctgagagccttggggtgacagggtcctgtctttcacaggtaggctgctttgggaatggcaccgtgctcaggagcactacagacgtggagctggtcgtgttcctgagctgtttccacagcttccaggaagaagccaagcaccatcaggctgtcctgagactgatacagaaaaggatgtactactgccaggagctgatggaccttgggctcagtaacctgagtgtgactaacagagtacccagtagtctcatcttcacgatccagaccagggagacctgggagaccatcactgtcaccgttgtgcccgcctacagagccctgggtaaggggaacagaagcacacgcctcgcctggcctcccctggagactgtgacctctttcctctggtggccgcatgctttcctctttcctacccgtgtcctgggctggggtgagctgccatgccgacttggggaaacagaaactcatcacagaggcccacaagacaaacagtagccagtgatcggaagaaagaatggagttcccccaggaagtaccaaataaggttccagaaaggattttctgtaggaagaatatttttgaaagatccaaggcccaaccaggggaaggagtcaaatcagaagcaaggtggcatctactgggtctgggtgacctttcccagaagcagagctcagagatccaaaccataatgatttttgtatgctaccccccaattgataaggctatgcagtgttatcccatggttgctagcaatagtatccagcctcaggaagaaagtccttcgtggagtggtgcaatcccagttctcccctatgaatattgaccaatacggttccatcatccagaaagagatctattgataaaacaaacactaaggaaagctggggaatattgggaacatcagggaggacccgagacatggaaaggccagtggttgttcttctgagcaagactcaccaggttgcgtgtgttggaagttgcctttaatcccagcactcaggacacagcatcaggtctctaagagtttgagaccaggccagtctatgtaacaagcagccaggtatacaccgtgagactctgtcaccaaagtaaaatttaaagtatgaagcttttaaagaatgtctgggggtgagggtggggatgcctttaatcccagaactcaggaagcagaagcaggcagatctctgtgagttcaaggccagcctgatctacaggtctacagactgagttccaggacagccagggctacagagaaatcctgtcttgagacacacacacacacacacacacacacacacacacacacacacacataggagagaaagaaaggaagaaaaaaggaaggaaggaaggaaggatagattaccagaaagacaactatacaaggtctcaggtgttgtgttttataaagcagagatatgtttgatggaggggtggcatggtgttcagggaagggggtgcctctgcaggcccatgctgaggcatcccttctccctctgtggtaccagtcacatgatacagtactcagggcatgggggggcggggagaggcggaggcagaggcagggagagagagaagaggaaaaaaggctggccatgagcatgtgggggtgaggtgaggagagaggggggagaggctaagggagcaagggcaggagagcaagagagagaagaggggcaagcagccccttttaaagtactattgccaggtagctgtgggacggggcctagacaaaatgccaacatctggtctctctggagatgaaccataatctaacgagtgaccaggccctcccaaaatgcctacttagtccacgctggattccagaatcttccttcacttggtctttgcttccactctcctcaggcccttcctgtcccagctccgaggtctacgcaaatctgatcaaggctaatgggtacccaggaaatttctctccatccttcagcgagctgcagcgaaacttcgtgaagcatcggccgacgaagctgaagagcctccttcggttggtcaaacactggtaccagcaggtgagggggctgccagggtgaggctgggggaaaggcatcaacgggagacagggtttcgggaggatgggcagatgctaggacatccgcaacccgcagatactgttcctgggctgatgtccactcctgtggtttgtgaacgttaggctcaacaagttcaagactaaggaggaggtggattccttaaaatccatgcatacaactctgcctctcagtggtgacagcttctgcgtccccgtcatcactgaatgaacgggtccttggtgactacttttcaagtgtcacatgtggtatctgaagcgaacccagtatatttcgatgcagtgggtgtgtagagttatctaaactgaaaaaaggaggcatcaaaaatagcccctttgcgggggctggtgagatggctcagcaggtaagagcacctgactgctcttctgaaggtcctgagttcaaatcccagcaaccacatggtggctcacaaccatccgtaatgacatctgatgctcccttctggtgtgtctgaagacagctacagtgtacttacatataataaataaataaatctttaaaaaaaaaatagcccctttgcatgcacgcacgcatgcatgctcaacgcacttacgatgggagggcggtcttcttgtaaaataacagatacactaagagtcagatgagttgtgatggggcacacacctgtaaccccagccctcaggaaactgaagcaaggggatcagccggccttcatagtgagccccaggctaacctaggctacacaaactcaaagacaaactcgagctcattcagcagttaagagcttgcagagaacccgagttcagttcccagtacccacatcaggcagcttgaaacaacctataactcccagctccagagaatcctgcgcctctggcttccgtgagcacccatacactcacatgctcatatgcatacatgcatgcacacatacatgattaaaaataaagtaaatccgggctggagagatggctcagtggttaagagcactgactgctcttccagaggtcctgagttcaattcccagcaaccacatggtgcctcacaaccatctgtaatgggatctgatacttcttctaatgtgtctgaagacagctacagtgtactcatatacataatataaataaatcttcaaaaaaataaagtaaaaaaaatgtaagggcacacacatacatgattaaaaataagtaaaaaaaaaaatgtaaggagtctggtagaactctacctctgtccccttggatggcactgtccacctttacctgtgaatattcatctccagttgtacttcataaattcgctaatgccggagtgaagaaatagagagatcgcccgtgcgtggattatattataatcaatcccctcttttataaatattagctgtcaggtgcaatactcatctgtaagccctcttcgggcccaccccctccactacacacacttgagcctgggcttcatatcaagccttgggaaaattaaaaagagctatgtcttagtttgggttacaattgccataatgaaacaccatgaccaaaaagcaagttggggaggaaagggttaattcagcttacacttccacatcatagttcatcactgaaggaagtcagggcaggaagtcaagcagggcaggaacctagaggcaggagctgatgcagaagccgtggaggggtgctgcatactggcttgctccccaaggcttgctcagcctgctttcttatagaacccaagcccgctagcctaggaatggctccacccacagtgggctggccccacccacgatgggggcggggccctccctcatcaatcattaagaaaattccctaccatcttgctcacagcctggtctaacagaggcattttcttaattgaggttccctactctcaaatgactttagcttgtaaaactacccagcacaagcttagtaccagtggttttagatttttaaataaacagcgggggctgggcaagtagttcagttagtaacaggcttgagacacaaacatgaccacctgagcccagagtcccaacatccacgtaaaaagctgagcacagtggcacacctcccattccagcacagggaaggcagagacaggagaaaccctggggctttctggtcagcttggtctagccagtgagagcgagagcaatccagttaaataagagggcggctcttaaaatgtgaacagcgattaaggaaaatagctcacaccgccctctagcctccacccccatgcatacatacatagtgttatacacttatacgcacgtacaaaaaataaaaatcaaaaaattaattagatctatccgataagatgtctcagcaacttaaaggtgcttgccagactagcttagcgacagtagttcagtctgatcccaggaacccttgtaaaggcttaagttgaactctgacctccacacacgcacctgaagaggagggaggagggaggagggaggagggaggggattcaaaaaaataaattctattcccctaaatttgaattcagacacaatttgatgtcttctgggcaaacctagacccttaatcctaaaacagggaaaccaaggcccaggaagggaaagtcactttgtcaaggtcacacagctcatgggttagagtttgaatgttctgcccctggacctgggtgtcattgtcacacgtaatcttggcatccctctctgtctcttccccactctcttcagtatgtgagagacaagtgcccccgggccaacctgccccctctctatgccctggagctgctcactgtctatgcctgggaagcgggcacccgggaggatgccaacttcaggctggatgaaggcctcgccacggtgatggagctgctccaggatcatgagctcctctgtatctactggaccaagcactacacgctgcagcacccggtcatcgaggcctgtgtcaggagacagctcaggggacaaaggtactgggtctgtgctccccgcagagtctcagagagagagagacagagacaaggagagacagacagggagagagagacaaacagacagagaggaggggaagagacagacagacagagacagggagagagacagagacagagagagacagacaggagagagagacaaacagagagagggggagaaagacagagagagacagacagagagagagaggcagacagacgggggaagtgtggaatcttaggactttattgaatatgcaccaagaactacctcagaccctgacactgaaatctcgagtggacagacatcaggtttcccgagggttgtaggggatacgactctcttccctgtttctcaatactacactttgccctaaaccactccagtgcttttccttaaaaagccagggcaaagcacaaaggccgagttcagagcacctgcggagcatacacagggactagggctgctgccagcttgggcacaggcagagatgggtaggagcctgtcatcattgtcatcactgtcatgcaagggacagttggggtgtgcccagcacccccgtgcaggatgctgaagcttggagaagcacacagcctggatagcataccggaaggcagtctctcgaaaggaccaaagggacagagcagaggaccaaaggaccaaaggggcaaaggaccaaaggggcagagcaggggatgttttatcgggaaactgcttgctctgtgatttgttttctgatgccctgcaaccatctacacacgcgcgcgctcgcacgtgtgcacacacacacacacatgtgtacacacacacacacacacacacacacacacgtgtacacacgcatgcgcatacacattaaatgtaatttttagatgtatttattttatttttttaatatttatttatttattatatgtgagtacactgtagctgtcttcagacactccagaagagggcgtcagattttgttacggatggttgtgagccaccatgtggttgctgggatttgaactctgcaccttttgaagagcagtcggcgctcttaaccactgagccatctcgccagccccgatgtatttattttatgtatatgagtacactgtagctgtcctcagacacaccagaagagggtgtcagatcccattgtagatggttgtgagccaccatgtggttgctgggaattgaactcaggacctctggaagaacagtcagtgctcttaaccactgatccatctctccagcccacttctctccagcccatattagatgtaatttttaaatcaacaaacctagaataaactaactggtatctacaatgtagactgctgaaggtcaaaaaaaaaaattgtgttgtcttagtcagggtttctattgctttgacaaaacaaaaagcaagccgggagaaaagggattttttgtttttgttttttgtttttcaccttacacttccacatcactgttcatcagtgtaggaagtcaggacaggaactcaagcagggcaggaacctggaggcaggagctgatgcagaggccatggaggggtactgcttactggcttgcttcctgtggcttcctcagcttgctttcctacagaacccagggctaccagcccagggatggctccacccacaatggctgggccctgcccccttgatcactaattgagaaaatgcttttacaactggatctcatggagatatttcctcacctgaggctcctctctgagggagaacttcttcttagaaactcccttctggatcttgggcagacctaaaatcttagcttccctcttgctcctgttctctggccatctcccttcttttctcccctcccccttcctctgttccccatttcttcctagttagttacaagtctctatcatccctgggagaaaaccgccatatccctcacacggccagtacacccaggggagtgggaggggcagcactgcctgttccctgatcaccttcatcagacagctgggggtgcatggagctcaagggatccagctcaccccggtagcctgctttcaccctctatcacaaagacaaagccccaaactcaaggaacacacagtgcagttcttactgacaggctccggggtccactgcagtcaatctcccaaggggcccacgcagactccacacaagccagtaatgaacagtctttcagtgtttgcagaccagagagactattagaggcagccagagctctgccctgttgagcagtagaatcagaacagctgagaaccttcactaccaactgtgagagtttgaggtcagcagagagattgttttaatttaatcctttaatttaatttaatcctacaagcctttaattccaacactctgaaggcagaggcagacagatctctgagttccaggccagccagacctacacaaagaaaccctggagagagggagggagggggaaggagagcgagagagagagagagagagagagagagagagagagagagagagagagagagagagcttaaggtctatgtctctgttccctgacctctacaacagggataaccatactaatccttatagaattgttgggagaatcaaagctcacacaggttatgttctggcccagggcttcaaaagcaatcagtggatgttggtggtgccactgttatcaaaggccactcagccaatttgccctcaacgcctgccatggccttgcggtgcctctcctgctaagtggacatctgagactgagactgttccaggacccagtttacagcctcgtcctacccacccctctgattctctgcacttcccggaatgttctcctcaaggagatgagaaatctcatcatctctgaggacacacagatgctcagttgctagagagaatggaggctgggaaccacctccctaggttatggctccctagggtatggctcccaagccagcaagaacctgggtattgtctctctgttgcaggcctatcatcctggacccagcagaccccaccaacaatgtggcagaaggctacagatgggacatagtggctcagcgggccaaccagtgtctgaaacaggactgttgctatgacaacagggacagccccgtccccagctggagggtgaaggtaatgaatggttcctcctaacctgacagtctgaacactacactgcctcacccaacaaagtggggaacagcttttcagaggcaagacgtctggacaccacttgtttccagccaaataaagccaagagataggcaggaaagtatagaccttggggcttgtttatgaaacaggaactatgtagtcctgactgtcctggagcttgcctatatagactaggctagccttgaactcacagagatccacctacctgtgcctcaggagtactggaattaaagatgtgtgttgccacacccagcctgtgactcagtgaagcaaggcctctttgtgtagcccatatactctcaaattcacaacccctctgttatacacaaaaatggctcatacatctcaaacccccactccacccctcctctccctgctggactggaggatattttttccttgaaacctttacaaccctagctttagagttcttccaaacccagctgtgtcctacattccttttgccatgcagtgaacactaagtgtggcagaggcaggtaccatcactttgtctaccaaaggggaggagagcctacctcaatgggctgaaaatgtattggggtggggggggggaggcgcccagcatagagcttacaaagtgctaggnnnnnnnnnnnnnnnnnnnnnnnnnnnnnnnnnnnnnnnnnnnnnnnnnnnnnnnnnnnnnnnnnnnnnnnnnnnnnnnnnnnnnnnnnnnnnnnnnnnnnnnnnnnnnnnnnnnnnnnnnnnnnnnnnnnnnnnnnnnnnnnnnnnnnnnnnnnnnnnnnnnnnnnnnnnnnnnnnnnnnnnnnnnnnnnnnnnnnnnnnnnnnnnnnnnnnnnnnnnnggaggggcggggaagccatttttgctattacaaagatgaatctgggaagggaatttgtgggtcacgagacagaaatgcgagcctaaccccgcctctgtcttttgcagagagcacccgatatccaggtgaccgtgcaggagtgggggcactcggatttaaccttctgggtgaacccttatgaacccataaagaaactgaaagagaaaatccaactgagccagggctacttgggcctgcagcgtctgtcctttcaggagcccggcggagaacgtcagctcatcagaagccattgcacgctcgcctactacggaatcttctgcgacacccacatctgcctgctggacaccatctcccctgagatccaggtctttgtgaaaaacccggatggcaggagccacgcctatgcgatccacccgcttgattacgtcctgaacctgaagcagcagatagaagacaggcagggccttcgatgccaggagcagcgcctggagttccagggccacatcctggaggactggtttgactttaaatcctatggcatccaagacagtgtcacagtcatcctgtccaagacgacggagggggcagctccatttgtgcccagctagcttcctctgtcggtggctctgcctgttttattgtctcatcctagactcagcctagttgcctctccttcccgtcctctgcccggatggtccacgtcttcagtaccttgccagcagggagtcagagggggtgtgagaagtcgtgtacagccagacactcttgtgtgacaatggaattctgcagtcccctgggaagtcatgccaggacctctgccttcctcgtggcctcactgtcaagactgtgtcagtgaatagctggcctcacagactattctcacatgttcagagaaagccaaaccatcttcctaaccaatcacagggaccctgcttgaggttgtcccacctccaaattcttcccagtgacctccatcagggcggctctgaagccttcccctgtgcccccaaccacttctgcctgccttcgactatccaaggcaaggtaggaggggatcaagttcctttcaaatggagaataaaaaagccattgtttcttcccaga

SEQ ID NO: 94 - DNA, 2129 bp, Mus musculus
tagagccatgctcccaagcttctctcttcacccccctttccgccattgggtgccagaggtcagctggaaaggagccgccttaaaaaaggaggagccattggcagtcgcccaggagctgtacggcttcccggcctccaagctggactcctttgtggctcagtggctgcagccaaccagagagtggaaagaagaggtcctggagaccgtgcagacagtggagcagttcctgaggcaggagaatttccgtgaagatcgtggcccggctcgggatgtgcgcgtgctcaaggtactcaaggtaggctgctttgggaatggcaccgtgctcaggagcactacagacgtggagctggtcgtgttcctgagctgtttccacagcttccaggaagaagccaagcaccatcaggctgtcctgagactgatacagaaaaggatgtactactgccaggagctgatggaccttgggctcagtaacctgagtgtgactaacagagtacccagtagtctcatcttcacgatccagaccagggagacctgggagaccatcactgtcaccgttgtgcccgcctacagagccctgggcccttcctgtcccagctccgaggtctacgcaaatctgatcaaggctaatgggtacccaggaaatttctctccatccttcagcgagctgcagcgaaacttcgtgaagcatcggccgacgaagctgaagagcctccttcggttggtcaaacactggtaccagcagtatgtgagagacaagtgcccccgggccaacctgccccctctctatgccctggagctgctcactgtctatgcctgggaagcgggcacccgggaggatgccaacttcaggctggatgaaggcctcgccacggtgatggagctgctccaggatcatgagctcctctgtatctactggaccaagcactacacgctgcagcacccggtcatcgaggcctgtgtcaggagacagctcaggggacaaaggcctatcatcctggacccagcagaccccaccaacaatgtggcagaaggctacagatgggacatagtggctcagcgggccaaccagtgtctgaaacaggactgttgctatgacaacagggacagccccgtccccagctggagggtgaagagagcacccgatatccaggtgaccgtgcaggagtgggggcactcggatttaaccttctgggtgaacccttatgaacccataaagaaactgaaagagaaaatccaactgagccagggctacttgggcctgcagcgtctgtcctttcaggagcccggcggagaacgtcagctcatcagaagccattgcacgctcgcctactacggaatcttctgcgacacccacatctgcctgctggacaccatctcccctgagatccaggtctttgtgaaaaacccggatggcaggagccacgcctatgcgatccacccgcttgattacgtcctgaacctgaagcagcagatagaagacaggcagggccttcgatgccaggagcagcgcctggagttccagggccacatcctggaggactggtttgactttaaatcctatggcatccaagacagtgtcacagtcatcctgtccaagacgacggagggggcagctccatttgtgcccagctagcttcctctgtcggtggctctgcctgttttattgtctcatcctagactcagcctagttgcctctccttcccgtcctctgcccggatggtccacgtcttcagtaccttgccagcagggagtcagagggggtgtgagaagtcgtgtacagccagacactcttgtgtgacaatggaattctgcagtcccctgggaagtcatgccaggacctctgccttcctcgtggcctcactgtcaagactgtgtcagtgaatagctggcctcacagactattctcacatgttcagagaaagccaaaccatcttcctaaccaatcacagggaccctgcttgaggttgtcccacctccaaattcttcccagtgacctccatcagggcggctctgaagccttcccctgtgcccccaaccacttctgcctgccttcgactatccaaggcaaggtaggaggggatcaagttcctttcaaatggagaataaaaaagccattgtttcttcccaga

SEQ ID NO: 95 - protein, 539 aa, Mus musculus
MLPSFSLHPPFRHWVPEVSWKGAALKKEEPLAVAQELYGFPASKLDSFVAQWLQPTREWKEEVLETVQTVEQFLRQENFREDRGPARDVRVLKVLKVGCFGNGTVLRSTTDVELVVFLSCFHSFQEEAKHHQAVLRLIQKRMYYCQELMDLGLSNLSVTNRVPSSLIFTIQTRETWETITVTVVPAYRALGPSCPSSEVYANLIKANGYPGNFSPSFSELQRNFVKHRPTKLKSLLRLVKHWYQQYVRDKCPRANLPPLYALELLTVYAWEAGTREDANFRLDEGLATVMELLQDHELLCIYWTKHYTLQHPVIEACVRRQLRGQRPIILDPADPTNNVAEGYRWDIVAQRANQCLKQDCCYDNRDSPVPSWRVKRAPDIQVTVQEWGHSDLTFWVNPYEPIKKLKEKIQLSQGYLGLQRLSFQEPGGERQLIRSHCTLAYYGIFCDTHICLLDTISPEIQVFVKNPDGRSHAYAIHPLDYVLNLKQQIEDRQGLRCQEQRLEFQGHIDWFDFKSYGIQDSVTVILSKTTEGAAPFVPS

SEQ ID NO: 96 - DNA, 16400 bp, Mus musculus
  misc_feature (1)...(16400): n = A,T,C or G
ctcactgaagataactagacagaaaacttcgtgagactacctcacgctgtccattgaccaggagcaatcctttgtgcctcacatctttgggactgcggtaggcatcagagaaatgtcacctcgatgggccctgcagctggagagtctgaccctggatatggccttcagctaagacacctgcacagatgatgagcagcctcggggagactagctgaggtcggtagttaggaatgtggagtgtggatgttgtgaccctcagcataagcaggaataacctagcctaaccctatcgctcgagacgccactagtaacggagacactatgcgtgattaagaatgaaataaatgcatttgccactgccagatcaccaggcagatgagattatgtggccaaatcgctgccactgaaactgctgaatcttactctgttgtggtaaacaacatcctgtgctcacaacagagccggtggggagactgcatccttaactcctgttcccttctgccttgaagaaggtaaactggatctccctgcagtttcactttcaattcttgtcaaagcttggtttctgtttccagtttctccaaggagggaggggcagagcgcttttcttctttccatgcaactctccatcccattgtctcctccagagaacgctgcaggaagcttctcccatcagagctgagcagaagctcagaggatttatctagaggacaggctggcccagctgaaatggacccgttccccgacctgtatgcgacccctggggacagtctagaccacttcctggaacacagccttcagccccagagggactggaaagaggaagggcaggatgcctgggagagaatcgagaggttctttcgggaacagtgcttccgtgatgagctgctcctggaccaagaagtcagggtgattaaggtggtgaaggtaagcacacagggttctgagtttaaagctcacctctgccctgtggggcttgtgaacttgagaggtgggccatttcaccccctctgagtctgtgtcctcttcttaagatgggtttagtagaagcagtaaatgggataaagcatagaaaatttctgtgcatttaaaattagccttgcaatgctgaaggacagaggtggtaatgataatttgggattctggttcctgaatggaccatagtcaccggtttccataaaatgtgtgcctttgcttcctgtctaagaaataatacttggccaggcgtgtgtggtcctgcatgcttttaatcccatcactcaagaggtagaggcaggcagatttctgagttcgaggccagcctgatatagagtgagttccagggcagccagggctgcatagagaaaccctgtctggagaaagggaagggaagggaaaaagggaaaggaggaaaagggaaagggggaaaggataggaaagaaaaaaaaaaagactactactttacttctgagtgaaggaaacctattgttctctaagttagtagtattggtcatgttagaaattacctagcaagactacttggtaaaccattgggattctaagggctgcctgtgtaagtaattctacggctagctgtttctcccagaaaaacacaaacttacagcccaccccctccaatcaagaccatttggatcagagctctgggtgttgtttattctgctaaaatgaatgacaacttaagtggtttttttttttttgttttttttgtttttgtttttcgagacagggtttctctgtatagtcttggctgtcctggaactcactttgtagaccaggctggcctcgaactcagaaatccgcctgtctctgcctcccaagtgctgggattaaaggcatgcgccaccaccacccggcatgacaacttaagttaacttgagtaagtcaactttacctgggaactctgagccatggtagcagaggttaagacgggagagaaagagcttttgatgaagaaaaatctcaacaaaccttcaaaaccagagatcagggagggttcttagccaaaaagctttgaagacagaaatggaaactcccacagctgctgcaaaaggatacatcgtatcccatttgtgttctggttcctgcaaatttctgcctgacctaggtcgattgcttgtagcagcctcttggcttctgggacttgaaagaaacaaacaacaaaaaaaggaagtccagagctgggtgtggtagcgttcacctgtaaccccagcagtcgggaggttgaggcaggaggattaccagtttaagactgttaaacctgttcttatagcaagttccaggccagccgtgactgcatcagtgaggcactgtcgaggggtcaagaggaggagctgaggtttagactctctcatcttctttggttttacctttttttttttttaaactagcagaaaaaggattttgtttcattatagcatttttcaagtagcaatttgttttgggctagggatgtagttctgaggttggtatgttttgtgcctagaatggtggctacctgtaacttaactccagaggcgctcccttccacctctcttctggcttctgaggatagacaccaggcacacctatggtgtatgtgtacatgccgacaaagcagccatacacataaagtgttgcccttgttgagatttcagaacatttgggtctctcagttttggatcagggatgctcagcccataacgcccacagcacaggtctctcttaaaggactgtacagagaacttaccatgaatgggtctggcttaactctcaacttcaaagcatcaaatctcaggagaggtaaatctgccattgtcaccttccacagggaggctcctcgggaaaggggacaacgctgaaccacagatctgaccaagacatgattctgttcttaagctgcttttccagtttcgaagagcaggcgagaaaccgggaggtcgtcatcagcttcattaagaagaggctgattcattgtagcagaagcctggcctacaacatcattgtccttacccacagagagggcaaaagggcccctcgctccctcaccctaaaggttcagtcccggaagactgatgacattatttggatggatatcctcccagcttacgatgctttgggtaaatccagtggaagtttcagtttaaagaaagaattctggggtcttcctctagcaagattcctctggaagattgctttgtagatagataggtgggactgaaatcatactgtgaagatggatagacttccataataaataaatatccttgcatgggttcccatgtcccagtgttacatggggaggaaggatttatcataaagaatgaattcctacccaccctctggaaaacaccaggttaggcaaacattccaaggtctttagggtccaacagaactgtattagaccctttaaaacaaggctctcaagctgggtggtgatggagcaagcctttattcccagcacttggaaagcagaggcaggtggatctttgtgagtttgagaccagcctggtctacagagcaagttccaggacagtcagggctacacagagaaaccctgtctcaaaaagtaagtaagtaaatgaaataaataagcaaacaaataaataacaagactctcgtattttacaacttgtattcctcttgggcccacaccttagcatgctcaaaatcgagcatactaacttactacatgggataatgttgagtcatcagaactgatatttgctcacatttgagataccagacggcgattgcctgtgcttgcctttaagtttacctccttaatggagccgatctgaggatttcatgagcctgaaggtctacctgaccatcccggcctctattaatttagctttgaggtgggggagggggcgaggtaaggaaggcatagaaaacaatgactgtgatcccagctctcaggaagccaaggcaggcagaccacaagcctaatgacagcccaggatccatcacagagagaccctgtcaacgaagaagaggggctgatgagatggctcagcggttaagagcactgactgctcttccaaaggtcctaagttcaattcctagcaaccacatggtggctcacaaccatctgtaatgagatctgacgccctcttctggtgtgtctgaagacaactacagtgtactcacacannnnnnnnnnnnnnnnnnnntcttttctatgatttaagcctgggaccctaatcgcctttcttcaaggatatgcaccaactgtacctggttatctaggagagtgctagccttggcaccactgaagctgagcgttctgaggggcaatgtagaggcaagccccagacacaagccttgcagcgcttgctgtgggagaagcctagggaaagggggtgggggggacttctgcaggagagtgcagaagcaagccgcctgtgcacctcagggccatgtatttaggtatcaaagcccagtttctatctataaacacccaggcctcagttcattcatcggtaagatgggcagacaatctgccctgttctatagtcacctcagagacagagtctaagaatttacctctagcctggatctagagtaatattttctcatttggtggatcatcgtcactgttttagtcagggtctctattcctgcacaaatatcatgaccaagaagcaagttggggaggaaagggtttattcggcttacacttccatactgctgtttatcaccaaggaagtcaggactggaactcaagcaggtcaggaagcaggagctgatgcagacgccatggagggatgttttttactggcttgcttcccctggctttctcagcctgctctcttatggaaccaagactaccagcccagagatggtcccacccacaaggggcctttcccccttgatcactaattgagaaaatgccttacagttggacctcatggaggcatttcctcaactgaagctcctttctctgtgataaccccagctgtgtcaagttgacacaaaactagccagtacaatcgcttactatttaaatagtaagtgtaatatgttttttaaaaattaagtgagtcttctacaactcactgcagacagtaagtccactgcacagccttgccccataggccaccaccatcttggatctgaatgcaaatccaatgtttggattcaagaattggactgagaggtttcccgaggaagctgtttccctaacttgctaaacccacagaaatcctgtcccttggacatggcccatttcttattttcttcgggaaaagttgtgatttgtcctcaaaagtggccccacagcaaatgaaacaaggtagacagatagagtctgaaagggacctgccatctggccatcaagtgccaatagctgagaatgccccccccgccccccccaaaaaaaaaaaacaaaaaacaaaaaacaaagggctcttgggaagcaaggaaaaatgaaataaaaaaaaaaaaaactacttatgtactcttgtctcagttagggtttctactgnnnnnnnnnnnnnnnnnnnnacctatttccagagactcaaaaccagcaccggcaatctacgagactctgataagaagtaagggctaccctggtgacttctcaccaagcttcacagagttacagagacattttgtgaaaactcgcccagttaaactgaagaaccttcctccggttggtgaagttctggtacctgcaggtaagagctgggaggaggcggagcagagggtacgcacgcatctgtagcccaagcttctcttagaaattggggctggaggtgtggcttgttggcaaggtacttgcttgggatgcgtaaggtcctgggttcaatcctccgcaacagcaagagagatcgagtggggatacaagaagtgggtgagaggcaggataaacagtgagtgacctgcagggccctggaccatctaagaacccagcatccctgtcggtgagagcgtctgcatcttgtgacacctgcttgcagtgaaaccttcccccaagtgcgattaagtgctcactcagatgaggacaggctgccttcaacaagcctcagatgtgtggcattttgataacaataataaagccaccattgtgtcagactaattgggtcccatgatctaggctatacatgccaagggaccccgttttgccttccttcctgtttctttactttttttaattggttattttatttacatttcaaatgttatccccctttcccagtttcccctctggaaaccccctatcccaccccctccctccttctgctgtttctaatggcatgtatccccgccctcaccctggaggtgagaaaactgagctgagatttgaacacgagtccctgactctagaatctgtgctcgtaagcagtcccaggaaatgttcttcagtttagcatttctttcttgctatctgactaattgcaaagaactcattaaaaaaaaaaaaagtcgaaaaatgcttaaggaagaaggagagatttgcacacggtccccagataaacctgcgacagtactttggcttttctttcatgttttaccgtcatctgtattcccgcagcccatacctggatgttagataactggagttaccatgccaactcaccgcagttttggtccaccctttaaacacacacacgagctgttgtccttgagtcgatggtgagagctccgtccattcatgttgtccacacactttactttgtgtcttccagtgaactgtaagacctcccaggctacaggtatttacctcccttcccatcagggctacaaacattttcatccagccaccagccacgtactggctttaaccaggccagctctgaaaacagtaggctggagagaaggctcaacagttaagagcacccacccttgcaccagacccactttgggcagctcatagccactgtcactccagctccaagggatccagcaccctcttctggcctctacttgcattgcatgcacatagacacagacacataatttaagaacagtgatttctttctttttttctttttttgcaaattatgtgtatagtgtgtatgtatatgtatgtatctgtgtgtatctgtgtctgtgtgtaggtctcaggatggttgtctttctcaatctcctccatatatactaggacaaagtctttcagttgaccttagaccctagacttgtctgcatggctgtctaactagctagctttctctggagagcccctgattctgcctccaaagtactagaattataggcaggcatgatacccatatcattatgagacttctaaggctctttttcccacctccctggctcatatttctgtacatgaatatttctgtcattctctaatagattttacttatctggaccccccctctctcccatagaaaaatatatgtggttatttaaatattgcaatggacccataataaaaacttcaaatagcataaaaatgtataaaaatgaaggtaaacatctttgtgtgtatgcatgtgtgcatatcagtgtgaaaatagtgcatatcagtgtgaaaatagtgcatatcagtgtgaaaagctgcatccacactcataaggggaactccgattggactcagtgtgtgtgtacatgttcacatgtgtgtgcatgtgcatgcgtttatgcaggcgtgtgcttgtgtgtgtgcatgtgtgtgaggggtaaatttgcagccacctaatttttcttatatgtttaatatatacttaattccatttttaacttcttgtatatgacgtgactttggcaacacctttatttcctttcaaataactaacaagttgtccatcacatcttgaactatgcatcctttctcgctgaactaaaatattacatttgctaaaactattaaagccacaaatctaatgagaactaattctaaacagtctacgctgttatacttggcttcctttgtaagtcctgagggattgaacccaggaccttatgcaagctcgataagtaccaggctgttaagccacatccccaactcgtgactcttgtttattcttatgccagaaactgcttcttccaagtagaaggtgaggattcacttccaaagttggcctgtgacatccacatgtgcacaccctcctctctctctctctctctttctctctctctctctctctctctctctctctcacacacacacacacacacacacacacacacatcactgggagccatgtatggttgacatacctgtattcccaacacctggagggctgaggctgaaaaactgcaagtttcagcctagcctgggctacacaacaagattccatctaaaaaataaaactcatcaggattttaactagcatctactactgctgtttcgcccagtggacacggtgtcaaactgtcatctagattctcacattcaactcacaggttagtgtgtacctctgttcttggcagagaagcactccttccccctgcccccctccccagtgcacaggatgtcacagacagcagagtactgggcaaacattgtgggaaaggaggtaagaggagcctaagaaccagcaatgggaaggatggctacaaaatagcatcttatgggcatgtcggtctcactgccaaggtgcccacagcagcatctggctgcaggagacctgtgcaagattaagctagttagtgttctagcatccatagggaaagcagagagctactggccatcagtggctgctgggagagggattttcctcagagatgtggttcccgacctgtgcctactctggaggatggccctacacccatgcacacaaggagagctccaactgaactccaagggacataaagagaaggaaaagaggactggagaaagatgggggcatgaggaggaagggtggagggacgtggctatgatcaaaatacactctatactagtatagaatttcaaatataccgcattgcctcctccattctaactggaaactgtagattgattgatactcggacggtccgcaaggaaacccccgtgccatcagcccatgtagacctaccatgtcctggctgtgtcacataaagtaacaagggaacctgaaaattcctagagcatcaatcacatgaaattcttattcactctctccctctccctctctctctctctacccccccccccccagtgcctgagacgtaaatatggaagaggtgcagtgttgccctcaaaatatgctctggagctgctgaccatctacgcctgggagatgggtacagagagcagtgatagcttcaatctggatgaagggttcgtagccgtgatggagctcctcgtaaactaccgcgacatctgcatctactggaccaagtactacaatttccaaaacgaggtcgtcaggaactttctgaagaaacagctgaagggagaccggtgagtctatcaaccacgtgacttacggctctgaggcctagaaaccctgactggagtggcttggggaaaataaagggtttcacgtactcgaaaacattcaggggtcaccaagtcaccaagtatggcctccacatcaccaaggtcttgtaagaccccaactcaatgtgtttcttagacccctagaaacgaaacccagcatggagttctttgttctttcgccttcagcctgagagaacgatgaccactgggtgacccacccaggcgcctgacccatagtgtaagggaacaagaatgtttgccaaagatagcctgtaacctttccgtgggagatgagctgtaattcactatccccattcttacgatgtttactcagcttccccattctttgtggtcttatcctcccctcactttgtggtttattctttaaaaaccctcgactgcaactgctgggggtcgatctcctctgcccctgtgtgggttatgagctcggcctcagcatgctgattcccgaataaacctcatgcgatattgcatcaagaacagtttctctcgagttattgggatgttggctcatcccgggacttgagcgaggttctccccgaaacgggggtctttcagtctctgtctgtgagtggttcaacccttccctacccagggtcttccagtcaagttccgatttatcgcttcaaggttgcaatggttctagctttctcctctagacacctagttgccagtataagattgcttatgtctagtaaactctcagagattcattttctggagcttgctgaggttatatctccaatatctccaatcctccccctctcccaccccctttccgttcaccctcttgctacagctccacttgctccggcccgcttgctccagggccctctatctccaatcctaatggaagggctttgcttgcaggggttgcttctactgggccatctgaagaatgctctctgttggccccaccttcagttttaaatgagggagttaattatggagtatactgcaagcagaaataaaggaaaagtaacacgcatcaagagagagactttgcccttagcaaaataatgtcatcaaatccagcagagacaattgagtagcctcagcaggagagagtcagcttccaccccacctactcatggcgctcacaacatcctgcagaggtcaactggggaagctgaggcagtcagctggagttcccactttttctccaaggatgtagctcccctaccctccgagtctgtacttccagctttctgttcccactgtagcatggggtaacaaaattgcccctccccgctctttggggaggggagagggggaaatgacaaggatggtaaccatggtgacaacactggcagacacaagacagccttgcaagaaaagtttgagatccacgtttggctctgaaacagtggaggctgcagaggcccgcctccagagacagctttttagtgatcttaaacatcccgtgacaatttgcccttataatgcgttttatggttccacagagacgagggcccagaggccagtatcctgactgtaaccgagatctgccattttctcccccccaggcccatcatcctagacccagctgaccccaccaacaacctgggaagaagaaagggatgggaacaggtggctgcagaagctgctttctgcctgctgcaggtctgttgcacgactgtaggccccagcgagcgctggaatgtacaggtactatgcatactatctcctggtgagaactcacgctaacactcatttagatcacgctcttcccaaggcatcccagcaagggctgttatgccttgattcctcaggaaaccggaagagctnnnnnnnnnnnnnnnnnnnncccacccccacccccccagcttagcacttatatacagagcagttagaacatctttgaatgcttagggtgaaggggaggtaattcagacacgataccatttggtggggcgggactgccaggctgggagggggattaaagattgtcttttgtggggctatcaggaactagttttatggcgggcaataactgtgtgtgacctctgattacttcttttctatgatttaagcatgggacccgaatctcctttcttcaaggataggcaccaactgtacctggttatctaggagagtgctagccttggcaccactgaagctgagcttctgaggggcaatgtagaggcaagccccagacacaagccttgcagcgcttgctgtgggagaagcctagggaaaggggtggggggacttctgcaggagagtgcagaagcaagcagcctgtgcacctcagggccgtgtatttaggtatcaaagcccagtttctatctataaacacccaggcctcagttcattcatcggtaagatgggcagacaatctgccctggtctatagtcacctcagagacagagtctaataatttacctctagcttggatctagagtaatattttctcatttggtggatcatcgtcactgttttagtcagggtctctattcctgcacaaatatcatgaccaagaagcaagttggggaggaaagggtttattgggcttacacttccatgctgctgttcatcaccaaggaagtcaggactggaactcaagcaggtcaggaagcaggagctgatgcagaggtcatggagggatgttctttactggcttgcttcccctggctttctcagcctgctctcttatggaaccaagactaccagcccagaaatggtcccacccacaaggggcctttcccccttgattactaattgagaaaatgccttacagttggacctcatggaggcatctccccaactgaagctcctttctctgtgataaccccagctgtgtcaagttgacacaaaactagccagtacaatcgcttactatttaaatagtaagtgtaatatgttttttaaaaattaagtgagtcttctacagctcactgcagacagtaagtccactgtacagccttgccccataggccaccaccatcttggatctgaatgcaaatccaatgtttggattcaagaattggactgagaggtttcccgaggaagctgtttccctaacttgctaaacccacagaaatcctgtcccttggcccatttcttattttcttcgggaaaagttgtgatttgtcctcaaaagtggccccacagcaaatgaaacaaggtagacagatagagtctgaaagggacctgccatctggccatcaagtgccaatagctgagaatgccccccccccccaaaaaaaaaaaaacaaaaacaaaaaacaaaaaacaaaggaccctttgggaagcaaggaaaaatgaaaaaaaaaaaaaaaactacttatgtctcttgtctcagttagggtttctactgctgtgaacagacaccatgactacagagcagctcttaaaaaggaaaacactggggctggcttacagggtctgagaatcattccattatcgtcaggcgggaagcatggcagtgtgcaggcagacatggtgctggagaaggggctgagagtccttgatccgcaggcagcaggcagagacctggctggagcttctgagacctcaaagcccacctccataaagatacatttcttccagcaaggccacactcactcccggaagccacacccactctagcaaggccacacctcctgctagagccattccctacggtgcggggatggggagcgatttttattcaaaccaccagtctctctccatctcagaccccagtttctcagaaattccattttccagagaccagctctcagcctcttacctccctctgtgaatagcgcctccgctgagcgtgtgtggtccctctgcgtgttctcacttcacttaagttattgttcagtgggttattctgttactaaattatcttaacagacaattccctagtcgcaaaaacagatccagaagggaccacggtggagtacaagtcagagcacttctgagcatcacctgggggtgaggttgattatagcagctcaaaggaccagtgccaggattgtgctcaacaaatatgaggaaaaaaaaaaaacatttctgttacttttctgtgtggtagaaaactatttaaaccccgggccatagactatttatgttccttgttattctttactttattatattttttaaaagatttatttagccgggcggtggtggggcacgcctttaatcccagcacttgggaggcagaggcaggcggatttctgagttcaaggacagcctggtctacagagtgagttccaggacagccagggctatacagagaaaccctgtctcgaaaaacaaaacaaaacaaaacaaaacaaaaaagatttatttattatatgtaagtaaactatagatgccttcagacataccagaagagggcgtcagatcttcctatggctggttgtgagccaccatgtggttgctgggatttgaactcaggaccttcagaagagcagtcagtgttcttaagcactgagccatcttaccagatcagatattttctttatttacatttcaaatgtaattaaaccttccctggtttaccctctgaaaacctgctatcccatcctccctcctctgctgctatgagggtgttcccttcacccacccacccactcctgcctcccggccccggccccggcattcccctatttttttggttttcgttttcgttttggttttggttttggtttatttaattttttttttaattttttgttttttttttttaagacagggtttctttgcatagtcctggaactcactctgtagaccaggctggcctcaatcccaaaacctgtacctgccagccccccccccccccacacacacacacactgatatactaggatcctcctgtaagtcctgtaagtgctcggctgagggacgtctcatttaacctaccaggagaccattccagatccaagccatcttttcagcaaatatgtcagaattctgtgacgtgacatattttaatgtctagaacctaaccctgaagcagaatttttaggacacatccagacttttggcataacagtgatcgcccttgaacaaccctcctaaagccagacacaactattaaatgacatcactgtaatccccaggctcccataaggacaacgctgttgtgtacccgtgatgggtgacgattctgagtaattccacaggggaagagtatcatttagaatccatttgttgggctggagagatggctcagcagttaagagcactgactgttcttccaaatgtcccgagttcaattcccagcaacatgatggctcacaaccatctgtaatgggatctgatgccctcttctggtgcatctgaagacagcaatattatatatctatataatatatatctgtacacagatatagtgtacatagataaataaatctttaggctggagagagcagggctgaccagagcgagcaaccttcattctcagcaaccacatgatggctcacaaccatcagtacagccacagtggactcatatacataaaatttataaaatgttcgaggaacatggcgtgagttagtggtactctgagcctagggtagccaagcagctcacctgttgtctcacgccattgttcgttatgtctcccaggttgtcttggtagatgataaactatatcaggagctagaagaaagcagctttgtagacaatagacagttctttccatacacttgccctttctcttctctcccttgcagcgagcgagggatgttcaggtgagagtgaaacaaacgggaacagtggattggacactctggacaaacccctacagccccatcagaaagatgaaggcagagatcaggagggaaaagaactttggaggggaactgcgcatctccttccaggagcccggaggggagagacagctgctcagcagcaggaagaccctagcagattatgggatattctctaaggtgaacattcaagtgctggagacctttcctcctgagatcctggtctttgtgaagtatcctggtggccagagcaagcctttcaccatcgaccctgatgataccatcttagatctgaaagagaagatagaagatgctggaggcccttgtgcggaggatcaggtactactgttggatgatgaggagttggaagatgatgagagccttaaagagcttgagatcaaagactgcgacaccatcatactcattagggtaatcgactagtctggctgcttgagtccgtgcctagagtcttacgcctccctacctcatccctagactctgatgggttctttctatagcttaaatatcaacattcccttctcttgcttaaaaccctctcctatagccgggcagtggtggtgcatgcctttatctcagcacttagagaatttctgagttcaaggccagcctggtctatagagtgagttacagaacagccagagctatacggagaaaccctgtctcagataaacaaacaaacaaacaaacaaaccctctcctgtgttttccaataatacagaatgaagttcaagtttcttttcctaacagtcaattaagctgaaccctgcttagtccccgacccccaactctaaacactcaactcatactgaatgcagagtgacaccttgagtcacactgagagctgagtcacacctgtgtctcttttcctcaaacatcctttccctcagcctctgttttcatcattctgtgagtcaccgaatctcaaagagcagaccccagactgtcagattccccacctctccagaaacctcttagaatggaaaactaacccaagccagacatttcaccgagactcagcggtcctggacttaacaagcctttcacatcattctgcatgctcctgtttgaaaacaactactatctggcccatgcagcaggccaaatcatcttgtgttcccgccctctcccttcatccatgttagactcccgtggacgtaaatctatctcccttgtctaatcagactcgattgtttttaatgatttaggccttgtgctctagaatggtaccaatccagtatcaatgtatgacaagtgcttgttaaataaagaagcgaacc

SEQ ID NO: 97 - DNA, 3114 bp, Mus musculus
ctcactgaagataactagacagaaaacttcgtgagactacctcacgctgtccattgaccaggagcaatcctttgtgcctcacatctttgggactgcggtaggcatcagagaaatgtcacctcgatgggccctgcagctggagagtctgaccctggatatggccttcagctaagacacctgcacagatgatgagcagcctcggggagactagctgaggtcggtagttaggaatgtggagtgtggatgttgtgaccctcagcataagcaggaataacctagcctaaccctatcgctcgagacgccactagtaacggagacactatgcgtgattaagaatgaaataaatgcatttgccactgccagatcaccaggcagatgagattatgtggccaaatcgctgccactgaaactgctgaatcttactctgttgtggtaaacaacatcctgtgctcacaacagagccggtggggagactgcatccttaactcctgttcccttctgccttgaagaaggtaaactggatctccctgcagtttcactttcaattcttgtcaaagcttggtttctgtttccagtttctccaaggagggaggggcagagcgcttttcttctttccatgcaactctccatcccattgtctcctccagagaacgctgcaggaagcttctcccatcagagctgagcagaagctcagaggatttatctagaggacaggctggcccagctgaaatggacccgttccccgacctgtatgcgacccctggggacagtctagaccacttcctggaacacagccttcagccccagagggactggaaagaggaagggcaggatgcctgggagagaatcgagaggttctttcgggaacagtgcttccgtgatgagctgctcctggaccaagaagtcagggtgattaaggtggtgaagggaggctcctcgggaaaggggacaacgctgaaccacagatctgaccaagacatgattctgttcttaagctgcttttccagtttcgaagagcaggcgagaaaccgggaggtcgtcatcagcttcattaagaagaggctgattcattgtagcagaagcctggcctacaacatcattgtccttacccacagagagggcaaaagggcccctcgctccctcaccctaaaggttcagtcccggaagactgatgacattatttggatggatatcctcccagcttacgatgctttgggtaaatccagtggaaactcaaaaccagcaccggcaatctacgagactctgataagaagtaagggctaccctggtgacttctcaccaagcttcacagagttacagagacattttgtgaaaactcgcccagttaaactgaagaaccttcctccggttggtgaagttctggtacctgcagtgcctgagacgtaaatatggaagaggtgcagtgttgccctcaaaatatgctctggagctgctgaccatctacgcctgggagatgggtacagagagcagtgatagcttcaatctggatgaagggttcgtagccgtgatggagctcctcgtaaactaccgcgacatctgcatctactggaccaagtactacaatttccaaaacgaggtcgtcaggaactttctgaagaaacagctgaagggagaccggcccatcatcctagacccagctgaccccaccaacaacctgggaagaagaaagggatgggaacaggtggctgcagaagctgctttctgcctgctgcaggtctgttgcacgactgtaggccccagcgagcgctggaatgtacagcgagcgagggatgttcaggtgagagtgaaacaaacgggaacagtggattggacactctggacaaacccctacagccccatcagaaagatgaaggcagagatcaggagggaaaagaactttggaggggaactgcgcatctccttccaggagcccggaggggagagacagctgctcagcagcaggaagaccctagcagattatgggatattctctaaggtgaacattcaagtgctggagacctttcctcctgagatcctggtctttgtgaagtatcctggtggccagagcaagcctttcaccatcgaccctgatgataccatcttagatctgaaagagaagatagaagatgctggaggcccttgtgcggaggatcaggtactactgttggatgatgaggagttggaagatgatgagagccttaaagagcttgagatcaaagactgcgacaccatcatactcattagggtaatcgactagtctggctgcttgagtccgtgcctagagtcttacgcctccctacctcatccctagactctgatgggttctttctatagcttaaatatcaacattcccttctcttgcttaaaaccctctcctatagccgggcagtggtggtgcatgcctttatctcagcacttagagaatttctgagttcaaggccagcctggtctatagagtgagttacagaacagccagagctatacggagaaaccctgtctcagataaacaaacaaacaaacaaacaaaccctctcctgtgttttccaataatacagaatgaagttcaagtttcttttcctaacagtcaattaagctgaaccctgcttagtccccgacccccaactctaaacactcaactcatactgaatgcagagtgacaccttgagtcacactgagagctgagtcacacctgtgtctcttttcctcaaacatcctttccctcagcctctgttttcatcattctgtgagtcaccgaatctcaaagagcagaccccagactgtcagattccccacctctccagaaacctcttagaatggaaaactaacccaagccagacatttcaccgagactcagcggtcctggacttaacaagcctttcacatcattctgcatgctcctgtttgaaaacaactactatctggcccatgcagcaggccaaatcatcttgtgttcccgccctctcccttcatccatgttagactcccgtggacgtaaatctatctcccttgtctaatcagactcgattgtttttaatgatttaggccttgtgctctagaatggtaccaatccagtatcaatgtatgacaagtgcttgttaaataaagaagcgaacc

SEQ ID NO: 98 - protein, 295 aa, Mus musculus
LRLVKFWYLQCLRRKYGRGAVLPSKYALELLTIYAWEMGTESSDSFNLDEGFVAVMELLVNYRDICIYWTKYYNFQNEVVRNFLKKQLKGDRPIILDPADPTNNLGRRKGWEQVAAEAAFCLLQVCCTTVGPSWNVQRARDVQVRVKQTGTVDWTLWTNPYSPIRKMKAEIRREKNFGGELRISFQEPGGERQLLSSRKTLADYGIFSKVNIQVLETFPPEILVFVKYPGGQSKPFTIDPDDTILDLKEKIEDAGGPCAEDQVLLLDDEELEDDESLKELEIKDCDTIILIRVID

SEQ ID NO: 99 - DNA, 38697 bp, Homo sapiens
tctgatgtctgatggcaggagaagatgaatgtcccagctcccaaggaggatggcaaattcatcacccttccttcacattttgttctgtccaggctctcagtggattggacggtgcccacctacattagtgagggcagatcttcatccctcagtgtactcattcaaatgctaatctcctctggaaatagccttacaggcacacccagcgataatgttttactctctgggcatcctgatacctaaaattaactgtcatgtggatccaggagtccagatgatgccagagggggtgccagctggtttatgtgccaggccaactctccctgacaatcacacacacagacctgcatagcacttccgttacaccgacccatttccgcagagcagcacaaagactacagggaagctagaagcagacgtggcggggatgcctgcagctgcaagaagatgcctgggaacagacacagaaactctcgctcccagataagcaaaacacagcagcacaaaggcagctgtttgaataaattcattggagagtctaaggcagcaatccggaccaagctgtaaaggagataagacagaaataatcacacaacagacaggccttaaaggtactggggttctccgccgggcccggtggctcacacctgtaatcccagcactttgggagcctgaggtgggtggatcacctgaggtcaggagttcaagaccagcctgaccaatatggtgagaccctatctctactaaaaatacaaaaattagccaggcatggtggtgtgcacctgtggtcccggcaactcaagaggctgagacaagagaatttcttgaacctgggaggcagaggttgcagtgaagtgaaatcatgccactgtactccagcctgggcaagagagcaagactccatctcaaaaaacaaaaggtaccggggttctcacagcttaatggaacttagcaagtctttttttttttttttttggcctctgaccttctagttgaaacaaaattagttaccaatagacttaggcgaatgccatacggcacataggcacataacctcaacctatataagcactaagaaaatggtaacactttgagttggtctggtggaattatctccctgtatcttgttacagcaataaattcccttcttttctagtttctctgcttctcgttattgggcctcgagaaaatgcagccggacccggcttggttctgggcatagtgaatcactccacaacatccatttttctgttcaatgattctgtgacttggctgagcagttttcctggtctgatctggctcacctgccacaggagatctacaccagctccacccacgtgtctggcagttggttcaatatcagctgggaaggctgggcgtggtggctcatgcttgtaatctcagcactttgggaggctgaggtgggtggatcacctgaggtcaggagtttgagaccagcctggccaacatggtggaaccccgtctctactaaaaacacaaaaaattagccggatgtggtggcgggcgcctgtactcccagctactcgggaggctgaggcaggagaatcacttgaaccaaggagctggaggttgctatgagctgagatcatgccactacactccagcctgggcaataagagtgaaactccgtctaaagaaaaaacaaacaaactatatatgtattttatatatatatatattatatatatagtgatatatatattatatatagtgatatatatattatatatagtgatatatatattatatatagtgatatatataatatatagtgatatatataatatatagtgatatatataaatatatagtgatatatatataatatatagtgatatatattatatatagtgatatatataatatatataatatatagtgatatatatagtgtgtgtgtatatgtatatatatgtatatgtgtatatgtatatatatgtgtatgtgtatatatatatatatatatatgtgtgtgtgtgtgtgtgtgtgtatatatatcagctgagaaaatagggctgccttcaccgtaggtttctccttacccaataggccaacctgagcttgtgcatgtggtcactgggctctgacaggagcaagagaaagagcaagtccccctaggccggcactttttaagcatctgcttgcatcgcgtttgctaatgtctcactggccaaaacaagtcacatggccaagccttgatttgaaggaaatagagaaataaactccacctcttgctgggaggagctgcaaagccagccttgtagaggagtgtgtatacagggaggagaggaaattggcagcattattctatgcattgttagcctttttttttttttttttttttctttgagacggagtctcgctctgttgcccatgctggagtgcagtggtgcgatctcggttcactgcaaactccgcctcccggttcaagcaattctcccatctcagcctccctagttgctgggattacaggcacccgccactgcgctctgttaattttttgtatttttagtagagacagggtttcaccatttggccaggctgaactcgaactcctgacctctcaggtgatctgcccatctcagcctcccaaagtgctgggattacaggcatgagccaccacacccagcctgtgagccattttcttctataatctctctccatgaataggaaacttggccctgctttctatcaaggcattctccgccacctcataagacacatctgtgggtgcctactcacccattaggatgcatgagcaaacctgcaagttcaagggagttaacaccccatggagcaacccataaccaaggggaaggccagaaccagtggcccctcttctacctctcagatggacaattttttctttttttaaacagggtctcactcccttgcccaggctggagtacagtggagtgatcagggctcactgcagccttgacttcccacattcaggagatcctcctatctcagccctgtctgaggtagcaagaccccatctctacaaacaattttctgaaaattaaccaggcatggtgcctgtagctctacctactcaggaggctgaggtgggaggatcacttgagtctaggagttcgacaccagcttgggcaacatagtgagaccctgtctcaacaacaacaacaaaaaacaatttaaaattagccaggtgtggtggcttgtgcctgtagtcccagctactcaggaggctgaggtgggaggatcacttaagcccaagaggtcgaggttacagtgagttgtgatcatgccactgcactccagcctgggcgaatgagcaagacaacatcaaaaaaaaaggaagagaaaagagagagagagagatgacagaaagaaagagaaagaaaggaaggaaggaaggaaggaaagaaagaaagaaagaaagaaagaaagaaagaaagaaagaaagaaagaaagaaagaaagaaagaaagaaagaaagaaagaaagaagaaagaaaaagagaaagagttcctcagattggctttctctgcttcctaatcccccacacttaccccttgagatcatttcccagaacaaaccaccttcatgcaaccccttgtctcatgctctgcattgaggggaatccaagctaagacaacactcatctttgtgtctctttctcctgctcaaaacctagctcagccccttcctatccactggctcttctccctccctgcagatgcctgctcaactgggtggtattttaacaaaccataaaaccaacacattactgatttcatgttcccttttgaaatcctcaaatgtcatccaacatattaatgatcaaataattgaaagctatgtaaccctcagagatttcacgaagtcgaataaaaaaccaataggttaaggtctgaatgtttattgtttgaataacttctatattgccttgaagttcattgtcagtcatcgtaaccatatggcaaatgtttggagtcttaaccggttgttgacttagctttgtgaaattgtcactgctctttaaatcctcataatatggtattgctgaaggatcaggtactaccaaacactggaaatataagaacttttataatttatgtaattaaaatatgtgatgctttccacttggggttagccagtttgaaaagttaaattggaatgtgtcatgatggacaaactccttgaaagaatcatctgcacttctggtctccatgcccccgaccccacccagcctaatctggcttcagctccctcctctcgcctaaaactgtgcccaccttgatcaccagtcgttttcttgagtacttttcaggtctgtatttcttaacttttcagaagcattcagcaatgtgggtgacttttttttaactctggttatgcccacctctttggccaccccagcaggtaccgcctaaatttctcttcctctgctcatcacttaaatttggggcttggccaggcatagcagttcatgcctgcaatctcagcactttgggatgctgaggtgggaggattgcttgagccggggttcgaggctgcagtgagctatgattgcaccactgctctccagcctgggagatggaacgagactctgtctctacattagttcattttggtgtgattcattcttccccaaggtaccagtgaccacgtgtatactgagggaaatcaaatatgtctttacatggagcaggtcactcgcttctcatccttgggtactaccaaatcattatccaaaatgcacccctcgaactccccacagccatacccactcctccttctctccttgggaatggtggctccaacagttactcaaggacacaagccagagagctgggagtcatccctgtcttctccttgcccctcacctatagtcaacaagaagccctgcccacccttcttccaaaatagacctagaatccaacccctcttctccacctgcactgcttccagccttgtcttgggcctcactgcttatcacctgcacccctgcgaagtgtcctaatgcatttccctgcatctgcccttgccctctgcggttcgtcctcaccatggaagcagccagaccaatcttaactccactacatgccactcccctaaatttgccactgccctcaggacaaaaagcagattcacctggcactcatttaacccagtggatcatttccatttcttcttcttcttcttctccttttttttttttttttttttgagacagggtctcactctgtcacccaggctggagtgcagtagcatgatcatggctcactgcagccgcgacctccctggactgaggtgatcctcctacctcagcctcctgagtagctgggactatgggcactcaccatcatacctggctaatttttgtatttttttgtagagatggggttttgccatgttgcccaggctgatcttgaattcctgggctcaagcgatcctcccatcttgactttcaaagtgctgggatttcaggtgtgagccaccatgcccatcccatttcctctttcttaaaacaatatcttcacttggccttcaaaccatcactcctgatttctcttccacctcactagctacttcttttccttcttctttgctggactcgtgcaactccctaaactccgaataatattaagtgctctggggctcagtcctgggtctttttctcttcctgctgtgtcatcactcccttggtgatctcattcagtgtcatggctttaaacatccctatgccggtgacccccacattttatctcaagtccagacctcctccctgtaatacagactcgcatatccaactccccaccacatatctccacctgggtctctgacagacaccccaaacttcagttccaaaactgagttccttcctcatctccatgcccagcctatcccacctcagttaagggcagttcaacctttctgttgctaaggccaaaagccccggacttagaccttgactctgatctttctctctcatcatactctacccattagcaagacctgtcagccttggagtcaaaatatatccagcggaatgacatgatgtccagattcacttccaaataacacagtagggaatctagggatgggggtagaattgaaaccagactgtctataagttgatcattgttgaaactggtgatggtacatggaggttcattgtattattccactttgtttgaaatgttccaaaatcagaaaaattaaaacatactatttcactgctaccactctgatccaagtcaactgacctcttgcctggactgttgcagtagcctcctaaccatacttctgcctccactttcacctccactccaccctctgcttctaatttaatttcctcccagcagccaatgtgattaattccattaaaatgaaagaccgtgtcactcctccactcaaaactctccaatgtatggtgtcagactcctacagaacaacaaaaaatgctccccagtggttccccatttcattcagagtaaagccaactcctaacagtcgtcttcaagatcctatccactcctgctccttgtttatggaataaatctttttaaaaagatcttatatcctggctgggtgcggtggctcacgcctgtaatcccagcactttgggaggccgaggcgggtggatcgcctgaggtcaggagttagagaccagcctggccaacatggtgaaacaccgtctctactaaaagtacaaaaatcagctaggtgtggcggtgggcaccttgaatcccagctgctcaggaggctgaggcaggagaatcgcttgaacctgggaggtggaggttgcagtgagccgagattgtgccattgcactctagcctgggcaacaattgtgaaactccatctcaaaaaaaaaaaaaaaaaggatcctgtatctatttgccttgccaccctttactacttaaaccgcattcccttccactctctgctcttgatcactccgttccaggcacactgatgttccttatacttgccaccgggcagtaccaccacagggtcctcgtactttccactccttctgccatgaagaatcttcttccttctgttacacacgtggctcactctaccttcttttttttttttttttttgagacggagtctcgctggagttcagtggtgcaatcttggctcactgcaagctttgcctcctgggttcacgccattctcctgcctcagcgtcccgaatagctgggactacaggtgcctgccaccacgcccggctaattttttgtacttttagtagagatggggtttcaccgtattaaccaggatggtctcgatctcctgaccttgtgatccacccgtcttggcctcccaaactcttcaccttcttatgtctttgctcagatgtctccttttcagggaggccttccctaatcaccttatgtaagactgaaacctaaatacatgcccccaacacacacacacacacacacacacacacacacacacacacacacaacctcttaatcccttctcttgctttgtttttctgcttagcacttatcaccatcttctttactataattttacctatttatcctatttgttgtttgtctccactaccagaaagaaaactatctgcaggtagggatttttcactactgtttgttcactgttgtatccacagcacctgcctggcacagagtaggtgcccagtaagtatctgttgaatgagtgaacgaatgagtgaatagcactccaagattcaatcctgcccacctgtccaggtacatttctaacctctcccctgctcaccctttcatcccaaggcacacagcacacttgagtccctggcatatcctagcattatttatacttctcagcctctatgctgtaccctcatcctcctggctggagtgccagtcttttttattttttatttggagacagagtctcatgctgtcacccaggctggagtgcagtggcaccatgatagttcactgcagcctgaaactcctagactcaagtggtcctcccacctcagcctcccaagtagctggggctacaggtggacaccaccacacctagctattttttaaaaaactttttgtttttaaaacaaaaactggagttttaaactccaggccaccactgcctctcacctgcaccactgtgcagtgtcctgaccatctccctacatctgttcttgcccttgcaatcatcctcaccacagaagcagagaagttacaagtgtggcaaagggcagaccggaattcaaagccaatgtggagtggggagttggatacatgagtctggatttcagggaagaggtatggatttaagatacaaatgtgggagtcactgggtatggtggctcacgcctgtaatcccagcactttgggaggccgaggagggcagatcaggagttcaagaccagcctgggcaacatggtgaaacactgtctctactaaaaatacaaaaagttagccaggcgcggtggcgggctcctgtaatcccagctccttgggaggctgaggcacaagaatcgcctgaacccgggaggcagaggttgcagtgagccgagattgtgtcactgaactccagcctgggcgagacagtgagactccatctcaaaaataaacaaataaataaaaataaaattaaaatgtggaagttgccagagtaaaaacatttaaacgctggctgaaatcaccaagggagtaagtctagaacaagaagagaaaaggacccaggactaagccctggagcacttaatattattcagagtttgggaagttgcaggcgtccagctatgttgcccaggctggtcttgaactcctggcctcaagtgatcctctcaccttggcctcccaaagtgctgggactacaagcatgagccaccatgcccagcccggatccccggtctttaagattcctctcaagcaggtgtctgctaacaccaaatgaaactcatctgccggcttcatgttttcatgcttttttcctacttaactcatcgcactggacttttgcagtctcttttttctgtgtctcctccaccgttctgggagtccccttggaacaggaacctcatcttattttgtcttcttggctcaatgcatgaacttcttggttcagtgcgtgaatcataatacctgttaaacccactctatgggccgggcgcggtggctcacgctgtaatcctagcactgtgggaggccaaggtgggcggatcatttgaggtcaggagtttgagaccagcctgaccaaaatggtgagacccccgtctctactaaaaatacaaaaaaaaaattagccgggcgtggtggcacatgtctgtagtcccagctactagggaggctgaggcaggagaatcgcttgaacccgtgaggcagaggttgtagtgagctgagattgcaccactgcactccagcctgggcaacagagcaagacccggccaaaaaaaaaaaaaaacaaaaaaacaaaaaaacccactctatgaatagtgagggtcaaagaggttagagtctggcacaggtagactagaattcccagtctgttctcttgggctccagattctcactccaccacctgaacactagtgagtcccttccgttcccaagcctcaatttccttagacagatgtaagcagttgaattgactaacaactatccaaccccaacctactgggcaagttgcctcctttggggtcaaacactatccaacttcagtttcccaacgtcataaaggagaactctaaaagttgagaatcgaaactgatgacagattgactagacggccagcctgttaaggtggccccagatattccagcctcagcccagagtcctcctgtgcccctactgcagcaagggtgtctccaagaagggggacctggagtcagcccgtcacacctggtttcctctctgctagggtccctcctcccacagagcactggagggcagctgaggaggagctaccttaaaaaaggaggtgtgtgccagggagctgggtaggagcctggctatatatctgcccagcagcggtactctcgggacagagatggcactgatgcaggaactgtatagcacaccagcctccaggctggactccttcgtggctcagtggctgcagccccaccgggagtggaaggaagaggtgctagacgctgtgcggaccgtggaggagtttctgaggcaggagcatttccaggggaagcgtgggctggaccaggatgtgcgggtgctgaaggtagtcaaggtaagactgggctcctccagcccccacgcaagacaaaacccagtatcagagtccacgtccctggggatgctggggacccctgtcctccttatccctagcccatgctgatgacatctcagaataccccatcccacctagctgtctacaccccactgcaccactgccttgagtagaatgagtctagtaataatagctcacatttgggggctcactggactaacctcttaacatacactatctctaattcttgcactctgtgagataggtactattctttgcccagtttacagattagcaaatggaggctcagaaccaatacaatgcgaggtccttggttggatcctagtgtgaatgaaccatctgtaaaatacagtttggggacaactggcctagatatcagatagtacatatatctgatataggaaatcattgttgattttgttaggtgtaacagtagttttgtggttatcagaaggttgtcttttgtttggacacgaacactgaagtattttagggacaaagttccttggtgcctataatttactttaacgtggcttagattaagcacatgtagccaggaatttagacttgttgaatcaactagttgggtatatgagtgttagttgtatcatctatttttctatgtgttttaactttttgataataaaatgactttttttttttttagagacagggtctcgctctgtcacccaggctggagtgcagtggcacaatcaccactcactgtagcctcaatctccctgagctcaggtgatcctcagcctcctaaatagcttgggattacaggcatgcaccaccatgctcagctaatttttgtattttttgtagagatagggtttcaccaatgttgcccatgctggtctcgaactcctgggatcaagaatatgcccaccttggcctcccaaagtgctgggattacaggtgtgagccaccatgtctggccggccaataaaatgatttttgtttttgttttttttttttgagacagagtcttgctctgtcaccaggctggagtgcagtggcacgatctcagctcactgcaacctctgcctcccaggttcaagcaattcccctgcctcagcctcccaagtagctgggacgacagcgcccaccaccacgcccggctaattttttgtattttagtagagacagggtttcaccgtgttggctaggatggtctcgatctcctgacctcatgatctgccctcctcggcctcccaaagtgctgggattacagtgagccactgcactcggcctaaaatgattttttaatggaggctcagagaggtgaggtgacttgcccaaggtcacacagtgttgaagctgggatttgaacttgactcaagggacccaagcccccctcactgagattttcccccaagcccttcctccagctgtttcatgccaccgcctgtgctagctaagatcaaaattcaagagggtcggagctagaaagactttggagaatcagacagtctcaccaatgactcacttaaaaaattaagtaaaccgaggcacagagagggtgagagataccccaaggtcacacagcgagttggtggcaaaggcaagactagaattaggacccctgactcccagcccagtgctcaagttctctctctaggggcaaccaactcacagagggatctagaagccctgggcccctatccgttctttgcacctatccccagcatatgaagcctgaggccatacaatttataagtgagaaaccacaaattttgatattagacagactcttcgcttcttcctttaccagctgtgtggttttgaccttcccactcttctttctcaaacccacattcttttcatctgtgattggggcatcatcatcatctctccctcaccaagccagtggtgcaatgcaggctgaatgattcatgcacgataaatgctcagaaacagaagcatcattataattcttgccaagctttcttctgggcctgggactcaagtctgactctggcagaccctcctagaccaccccctccccaacaaacttgagaataaagtggagggaataaggaatgtctggtaagaggaggatgctacaagaataagtttattgtgtgtgtgtgtgttccaccacgcctggctaatctttgcatttttagtagagacggggttccatcatgttggccaggctggtctcgaactcctgacctcaagtgatccacccacctcggcctccccaaatgctgggattacaggtgtgaaccaccacgcccggccaagaatgagtttttacggcaggaaatgctatttacctaagcctcaaatacttcctgcacatcatagccacttttcctcttgaaaccactaaatggtagcaatccccagtgagccatgactaatgaggaataatatatcttatttagagtctaaaccctcccgttccccaccctctgaaaatctagtgagcggagctggtccacataagggaatgctcgtcttcaaatgaattgtgcttaaataggtttaaaactgaagcaaatcaggaagcctgttctggatgtgttcttttctctctgcctggatcttaccagtgggaaaggcagaaagggaagtctacgccaggcacagtggctcacgcctgtaatcccagcactttgggaggccaaggtgggaggattgcttgagcccaggaattcgagaccagcctgggcaaaatggtgagacccccgactctacaaaaatatatataaaaaattagctgggcatggcggtgcatgcctgtagttccagctactccggaggctgaggtgggaggattgcttaagcccaggaggtcgaggcttcagtgagtgaagatcgtgccattgcactccagcctgggcaacagagcaagaccctgtctcaaaaagaaagggaagtctagactggccttcggggggaatgtgtccttcattcacacacagggtgccatctccaaccctctcccagggggtggaggtgctgggtctgaatgcccatggtcccttggaagcagggcctggctcacagccttgggtcacgaggaagaaagaggcggaagaaccatcccctacttgagttctggctctttctctgactctgctgccttctggctgggagaccatggcaagctcctcactgcctcagtcttctcatctgtacattggagataattctcctagtacccacctcaatacaggaagtgaaggcgtttttttttgttgttttgttttgttttgttttgtttagatggagtctcgctgtgtcgcccaggctggagtgtagtggcgagatctcagctcaccacaacctctgcctcctgggttcaagcgattctcctgccttagcttccccagtagctcggattacaggtgcacacaaccacacctggctaatttttgtatttttagtagagatgtgctttcaccatgttggccaggctgatctcgaactcctgacctcatgatccgcccaccttggcctcccaaagtgctgagattacaggcatgagccatcatgcctggctgggaagtaaagattaaaaggaataatatgtatacagggctctcatgggtgccagacacagggcgtgctcatgtcatccagcatccgtgctcatgtcacacagggcatgttatatcatccggcaacagctggaatctgattcttgtgcagtgactccaaccaccaagaaaagtagccctctgggggtctgatgcctccctagcaattccacctcccaacacagaatgagaaggagaggaggccagagagttgtggcgctttgcataccagaggcaccagggcctggagagctcatctagaatctcaaaacatcgaaaaatcccttctcgacctccttccattactaacaggaaaactgaccccccggcagcagaagagattgtctaagtcagctggataatgagaagaaagagaaatgtattgctgacttcctgtgtgccaggcaccccaccaaacgcttggcatacattatttcatctgatcctcccagtagcccagtgactcttgttccaacattactttcattttacagatgagggtctcaggagtcagaatgtttacccagctaagaaacagggaagagtcaagatctttttcaggctgctccatttcacagcctatggctcttaaatccaccaggcaaacttgctccttgctttataatgtcatgaaattattcagccccaccaccacccccagaatcctcaaacaaccctatggagtagatgctaccattcctctggagtaggccttactctgtgggtaagaagactgggtctcagaagcaatgcagtgtagtagataagaagctgggcatttggggaggccaagggggcaaatcgcttgagtccaggagttcgagaccagcctgggcgacatgccaaaacccagtcactacaaaaaatacaaaaattagccaggcatggtggcgcaggcctgtagtcctagctacttgggagactgaggtgggaggattgcttgagccaagatcatgccactgcagcccagcctgggcaacgggagtgaaaccctgtgtaaaaaaaaaaaaaagagtctgggctctgagggctgcaaactgcgagacctgagacaaatgactaatgaggagaaagacaaatgtgttgctgacttcctgtgtgccaggcaccccaccaaacccttggcatacattatttcatctgatcctcccagtagcccagtgactcatattctgccattgctttcattttagagatgaaggtcttaggagtcagaacatttacctagctaagaaacagggaagtgtcaagatctttttcaggctgccccatttctccatcccatgtctcgagatcctccagacatctcagttttctcacctgtaaagtgtgggtattagtactacccacaacccatccctcagcgggtggtgagcattcagtgagacagtgcatgtgaagtgccgcaggggttgcctggctcatggcagtgggcctcagggtgacggggctctgtgttctgcaggtgggctccttcgggaatggcacggttctcaggagcaccagagaggtggagctggtggcgtttctgagctgtttccacagcttccaggaggcagccaagcatcacaaagatgttctgaggctgatatggaaaaccatgtggcaaagccaggacctgctggacctcgggctcgaggacctgaggatggagcagagagtccccgatgctctcgtcttcaccatccagaccagggggactgcggagcccatcacggtcaccattgtgcctgcctacagagccctgggtaaggggaggggaagctcacccgactcacacacttgcccaccccaggagacttcccagtgtctcacctttactcatggccacgtgcacacacccacatttattcatttcatctgtgtcctatgcttggggctgggttattgcagtgcacaggattaactcaactctggctatcatattgctcaacttggaatacagaaattgaccaaagaattgcagagataaatacatgattgcagcctgggcgcggtggctcacgcctgtaatcccagcactttgggaggccaaggcaggtggatcatgaggtcaggagttgaagaccagcctggccaagatggtgaaataccatctctactaaaaatacaaaaaattagctgggtgtggtggtgggcgcctgtaatcccagctactcaggagggtgaggcagagaatcacttgaacccaggaggcggaggttgcagtgagtcaagatcgcgccattgcactccagcctgggcaacagagcaagactccgtctcaaaaaaacaaaaaacaaaaaaacaaacaaaaaaacatgattgcaaatggtgtaaatgctcagagaaaaagaatggggtggcctgggtaaccacagaaagggtgctcaggaagtgactttctggggaaacaacattcaggaggctctgacacccagtgaggggaaggagctaaaagtgggagtgggggtctgtcactgcattttatagaagcagatcctaagacatggatgtgaggatacgcagtttatttgggtattcctcccaggaaacaccggtagggaagtatggaactgagatgggaaaggcaagaattcaatacaacgtgcgtccatgggcaagtcaccaccctgagcttcatgtcctgggagaactcacagtcccattatggagcgaacctcttcgggatcccaagtgggacgctggcgtgcttactcaccagcttcccagccgtcactggttgggggctgctttgggagcactaactcactggcccctgttgtttgtcctcgggcagagtcctaggtgtttgaagtaaaacctacatgctgcaagcccagatcctagaggtttcatctcatgtgctaactcctatcagctgtagtggctggctgcgtggagttgctctttggagaaggtataagagacaggatctgattttagcaaggaagagagtgctgggatgtctcagtgatgtgtaccatggaactggttcctggttctccctatgagtttatatatatatatattttttgagacggagtctcgctctgtcgcccaggctggagtgcagtgccgtgatctcggctcactgcaacctccacctccagggttcaagtgattctccagcctcagcctcccgagtagctgggattacagcccgccaccatgccatgcctggctaatttttctatttttagtagagataggatttcaccatgttggccaggctgatttcaaactcctaacctcaggtgatccgcccacctcggcctcccaaagtgctgggattacaggcttaagccaccacacccggcctccctatgagtattgaaagagatacaaaacagatattaaagaaaatgagggacattgaggacatccagggaggggtctgatgcatggaaagcccaatgttggttctccagagtaagaatttcacaaaaaggacaattagacaaggcaaacctttggtttctgaagatatgaggtctcaagtgtccctggagggatacttccaatgtaaaggcaggctctccccaaaatactacttaccaccctctggcttcctcaatccccaatctcttcctttgctccttcactcctcagggccttctcttcccaactcccagccaccccctgaggtctatgtgagcctgatcaaggcctgcggtggtcctggaaatttctgcccatccttcagcgagctgcagagaaatttcgtgaaacatcggccaactaagctgaagagcctcctgcgcctggtgaaacactggtaccagcaggtgagggggctgccaggatggcaggggcaaggagagggaagagggtgaggaggaaaggcagggcctgattttcatctcaggaagctgcagccaggggaaatggaagcaggtagagagggagagaatgctagtcttttgaaatgtaaagtgaaaccgtcagtgaagaaggtggaaaaggaggagaggaggaggaagaggagaaagaaacagagaaggaaggagaaaaataggtgctctacagtatttcagtaaactagttatttttattttattttattatttttttttgagacaggatcttgctttgttgcccaggctgtagtgcggtggtgcaatcaccactcactgtagcctccacctccctggatcaagacctccctggctcaagtgatcctcccaccttagcctcctaagtaactgggactacaggcatgcacaaccatgcccagctaattttttttatttttcttttgtagagacagggtctcactatgttgaccagcctggtttcgaagtggtctcaagcgatcctcccaccttggcctcccaaagtgctgggattacaggcacgagccaccacacccaccccacatgttcttgttacccttcaattacagtctaggcctggcagatgtcagcttcgccgggtactgtggccattcgtcacagcaggttaaggactaacaaggggaaggatttctttaattccaccccaggagtcgaaaagagggcatgtgtgagtgtaaacagccctcagggacatttctcaggcagcagctcagtcagttttggaaacaaaatcttcctccgagataacggaaactccaactgcaaaacagaactcagagacaaaaatcatttattatatagaacttgcagagaagttacaagggaatcagacagcagaaggaaagatttgatccaataaaaataaaataggctgggcatgatggctcacgcctgtaatcccagcattttgggaggccgaggtgggcagatcatgagatcaggagatcgagaccatcctggctaacacagtgaaaccccatctctactaaaaatacaaaaaaatagccaggcgtggtggcgggtgcctgtagtcccagctactcgggaggctgaggcaggagaatggtgtgaacccaggaggcggagcttgcagtgagccgagatcgcgccactgtactccagcctgggcaagagagcaagactctgtctcaaaaaataaaataaaatataacagggatttaaagaaaaaacaattaccggccaaatgtggtagctcacgcctgtaatttcagcactttaggaggctgaggtaggaggatcacttgagcccaagggttcaagaccagcctgagcaacatagtgaaaccccgtctctacaaaaaatacaaaaatacaaaaattagctgggggtggtgatgggttcctgtagtctcagctgctcaggaggctgaggaggaaggatcacttgagccccggaggtgaagtaagttgagctgggtattttttttatctattcactaaggcttacatcttacagattacaggcatcctacattttatatatcatctaagttttaagaatgtaacatttcactaatattgaagaaaataagttatattaccatgagtttaaatttctaacaaaattataatgttattagttatggtttacaaaattgagtgttaaggatgaatttgcaaaaagttacaaaacaaattaattaacttataatttttttttttttgagacagagtcttgctctgtcgcccaggctggaatgcagtggcgcaatctcagctcactgcaagctccgcctcccgggttcatgccattctcctgcctcaacctcccgagtagctgggactacaggtgcccgccaccatgcacagctaattttttatatttttagtagagacggggtttcaccgtgttagccaggatggtctcgatctcctgaccttgtgatccacctgccttggcctcccaaagtgctgggattacaggcgtgagccactgagcccagccttataaatacattttaattcaaaattgaatttctaaggtcaaggataaagtttttttgttagtaagtcagtgacctataggaaaggcccaaggtttcatttatttgggagatgagaattatacaagatgattctgtgtttgtttcaaggccaaagtgttatagcttttttttttctcctctgactttgggatgggagctaatattcatatatgatggccataggaaaatatgtcagttttacttccacaaatcaaactactgaatatttgaccaaaatttttcactttctggctaaatatcaatgtatcagtgaaattctttttttttttttttttttttctgagacaagttctcactcttgcccaggctggagtgcagtggcatgatcttggttcactgcaacctcctcctcctgggttcaagcgattctcccgcctcagcctcccaagtagctgggattacaggcacctgccaccacacctggctaatttttgtatttttagtagagacggggtttcaccatgttggccaagctggtctcgaactcctggcctcaagtgatccacccgcctcggcctcccaaggtgctgggattacgggcgggaggcactgcgcccggcctcagtgagattcttaacacaggaagtgaccactgtcagttaagatgcttccttttgcaagtaagagaaaaacacaaaaaccaactcaaactggcttaaacaataaagggaattatcagcttatgtaggaaaacccctaaacagtagggggggcgggcggggggggcgggtttcaggcactggtgagggcactggctctgtttctctggaattctctcagcttctcattcctctatatgtcagcttggtcctttggcttgtttccctcttggtggcaaaatggccacaactattcctgccctcatattcacacatgggaggacttctcttctttcaaccactgaacaaaagaactaggctttactctagttgagccaacttagatcgcatgccttctcttgaagcaatcacttgcaagggggaaaggtttatgctgataggactgtgccagtcagggcccatcctggagctgcgggtgggggtcaaccccttccaaacatcatggctactatgcaatggggaaggaaagaatgtctgctagagaggcaaccccaatcttcactacagaatctcacctattaccattttttccctctatctaaggaaacctttcctttcttttaagaaacatttctcagcagctcaatacattaaaatagatttaaatgggactgcttaggctagaatgtttgtgaccgagcgcaatctgctcatacctgttcataagttcattccaggagttacatctgttgagcatatattgaagcccaatggactaactcagccctttaattctaaaatggtgaaacctatgtctagagatggaatgtgacatggccaaggtcacacagccagtaggcagcagagccaggactagaacttggatttctcagcttctggtccaacgccatccttacacagaatcttagggtctctctctctctgtcttcccatctctttcaacagtatgtgaaagccaggtcccccagagccaatctgccccctctctatgctcttgaacttctaaccatctatgcctgggaaatgggtactgaagaagacgagaatttcatgttggacgaaggcttcaccactgtgatggacctgctcctggagtatgaagtcatctgtatctactggaccaagtactacacactccacaatgcaatcattgaggattgtgtcagaaaacagctcaaaaaagagaggtactggaccactgtttgcccaccaaatcttacagaaaaaaagagagacgggctagtgtaacgtggcatagagttttatggattggctgtattaagcagtaaggctgccaccatagttgagcatcgacctcccacaccaacacagctggcatctcaagttggtggcttatcaaagtcactggggggccatggggcgggtagaagcctgttccttgtttcctaagccaccctccaccttagcttggccttcttgctctctgaagaccattcagtgctttgtaggagctagcatgggaaaatggaaagaatcttggagactcaagtttaaatcccagctcagccattttcctactgctatgagcctcaatcccttatccataagacaggagtaaactggaacctacgatataggattgatgtaagggttggagaaaatctgtgttaaggatccacaatatctagcatctggcagatgctgagtaaatgcttatattggagcatgtgctgtcagcgtcccattcatatcctctcggcctttaccgttctagggaaggttggttccacttccagctgtcagcacctgcatccctttgccagcagacccactctgagaagagccctccaccagatctggtgggagttggtggataaataccacagctccctcacccaaaagatggaaggaatctgggtctcattgcgtaactttttttttttttttttaagacagagttttgctctgtcacccagggtggagtgcagtggcgcaatctccactcattgcaacctctgcctcctgggttcgagtgattcccctccctcaggcttctgagtagctgagattacaggcgcctacaacccacacccagctgatttttgtatttttgtagagacagtgctttgccatgttggccaggctggtctcaaactcctgacctcaggtgatgcgcctgccttggcctcccaaagtactgggcttacaggcgtgagccaccgcactgggccccattccatactctttcctaaagatcgcctccagtggaccacagtagtaattacttcaatacccactctttgttgtctgccttcccttatctgtctcactgtctcactcccttatttgtgcttcctgggatcactttccaaataagccaaatccttatctggggatctgcttcaggggaagcccaacccagacaactctctgtgttagaagctctgggcctgtgtaagcaacatcacagtatttagtgttctgttatgtagtattgggtctcttttgtaaggaagaaaagccaggtctgctcatgaaaagaggatttattataaccatggccagaaaaatcgagaaagcatcaggacctgagactccctctctctctctgtcactctctctcatgaactacagcacttttcccctcagcctctgcttctctctccacacctgtccggctcccctctgcctcccaggtataagggatctccatcatccccatgtccaaaccccagagagaaccagtctgattcctggtcacgggacacagaccccatgtgttgggtcacctgccagccaacagaatgagccactttagatcagtgaccccaccccataggacagcctggcactttcaggcaggactgttttagggagcagtcagggttgggaggagccagcctggagcccaaagtccagttcattccagtagcctgtgtcacattcgattacacagatgaagtcgcagctccctcccaagccctggagtacaaagggctgggttttttttgtttgtttttgggttttgtttttttttttttaatggagtcttgctctgtcacctaggctggagttcagtggcacgatcttggctcactgcaaccaccacctcctgggttcaagctatcctcccacctcagccacccaagtaactgggactacaggcgcctgccgccatgccctaatttttgtatttttagtagagacacggtttcaccatgttggccagcctggtcttgaactcctgacctcaagtgatctgcccacctcggccccacaaaatgctgggattataggcgtgagccactgcgccccactcaaagagctggtgttaatcatggacttgcagtcaccccaagttaataagcaagcccaagatccccttcaagccaatattctttaaaatatttattcaatatttatagaaaggagagacttttgggggcagcccaacctctgctctgttgaggaggtagatgggtaagagcccccatctactggctgtaagaacttagggcaatctaggccgggcaccggtggctcatgcctgtaatcccagcactttgggaggccaaggcaggtggatcacgaggtcaggagttcaagaccagcctggccaagatggtgaaaccccatctctactaaaaatacaaaaattagctgggcgtggtggcgggtacctgtaatcccagctactcaggaggccgaggcagagaattggctgaacccgggaggtggaagttgcagtgagccgagattgcaccactgcccttcagcctgggcgacagagcgagactctgtctcaaaaaaaaaaaaaaaaaaaaaaaaggaacttagggaggtctgtaaaaaggggacaaccacaacaataaacaataaaaataacagtccctaccttatagaattgctgtaagattaaaataggttaatctgcataggatttggccttgtgcttcaataaatgtcagtagttggtggcagtggtgtttctactatccaaagtaattcagcagctctaaccttaaacttaaacttgcaaaacctgctccgaaggtacagggccccccctgcctgaaagggcatctgttattactccagcatgcctcttggggcctcattctccccctaaattccttgcaaacacttaaggcactatcccaaagaagaagaatttttttttttttgagacagtctcactcggtcacccaggctggagggtggtggcatgatcttggctcactgcaacctccacctcctgggttcaagcaatgctcctgcctcagccttctgagtaactgggatgacaggtgcgtaccaccacacctggctaattttttgtatttttagtagagacagggtttcaccacgttggccaggctggtcttgaactcctgacctcaagtgatcctcccgcctcagcctcccaaagtgctgggattacaggcgtgagccactgtgcctgggccagataggaattcttggaaatagcattgtctccatcctgttactctcctgcggtgttttggggccctcttgaacatccccgggatgtggatatcacaattctcagtggctggacgaaataattgccgagaaggtttttttctggcttgaaggccttcaaaccattatgagcctgggcacccttttcctgtgttacaggcccatcatcctggatccggccgaccccaccctcaacgtggcagaagggtacagatgggacatcgttgctcagagggcctcccagtgcctgaaacaggactgttgctatgacaacagggagaaccccatctccagctggaacgtgaaggtaatggctcctctctgggctgtcaagggcttgaaggtcagaacgacagataaactactcagtatttactcattcagttctgtgttgatggagaacagaactttagagtcaccgtttaagggccagctgcaccacccatgggctccgtgaacttggacaaattctttggctctcagagccttgggtttcttaccttcaaattcttgttctcctttcctttctttttcccataatttactggagaatcagttctgtgttcctgatcattctttgcgtgagttgggtccagccaagtcagctcaatcagccattctgtgccagtgctgttctcagggatggggtaggggatgtgggctgggggacaacacaggcacagaaataagacatgaccacgacgctcggccaggtgcggtggttcacgcctgtaatcccagcactttgggaggccaagacaggtggatcacttgaggtcaggagttcaagaccagcccggccaacatggaaaaaacccatctctactaaaaaaatacaaaattaggcgggcgtggtggcaggtgcctataatccctgctactccggaggcagaggcaggtgaatcgcttgaacccgggagctgggggctgcagtgagctgagatcgtgccattgcactccagcctggacagcaagagggaaactctgcctcaaaaaaaaaagaaaaaaagaaaaaaaaaagacaccaccctcactctcagagaactcaccctatgttgtcaggaagcaaatccatgaaacaaacttacacaaaactgctagaattaccagagaagacaagatactctgaaaacaaacaaacaaacaaaaaatactaagtcatattattatatgatgccaaacctatagtataggcagagatcacaaaaatctattttattaacatcacactttctagtgtgcaaagctcttgtccaaggtctgtctcagttgatcctcataagcaattctgtaaagtaagaaggtcgagtgttatcactatctttattattattatcatcattactattattgccattttacagaagagaaaactgaggctcagagaggttaattaactaagggcactctgctaagaggcagcagaaccaggggctctgggggtctggaagcagaataaatgttaactgaagtcaccagagaagattcctttaaaaagttaggagttgaaatgagccctaaaggccggggggagatatagacactcagaacagaggacaaaggatgatgaggggtaaaggatgggaggctgggatgagcaagatgtgtacaggacaggagactgaactgcttggagcagaaggcagaagcagaatcagaggctccagtaaggtacatagagtataaacggggggacccgctggccaaatgaggaggcccacccatgggctggaaaatatacgcctctggatttttcctgaatataaaagccattgtaggctgggggcagtggcgcacgcctgtaatcacagcactttgaggggctgaggcgggtggatcccttgagcccaacagttcaagaccagcctaggcaacatggtgaaaccccgtctctactaaaaatacaaaacttggccaggtgcggtggctcacatctgtaatcccagcactttgggaggccgaggtgggcagatcacgaggtcaagagatcgaaaccatcctggccaacatggtaaaacctcatctctactaaaaatacaaaaattagctgggtgtggtggcatgtgcctgtagtcccagctactagggaggctgaggcaggagaatcgcttgaacctgggaggcggaggttgcagtgagccaagatcgtgccactgcactctagcctggcaacagagtgagattccatctgaaaaaaaaaaaaaaaaaaaaagaacaaaacttagccagatgtggtggcacgcacctgtggtcccagctactcaggaaactgaggcgggaggatcgcttcagcttgggaggtcaaggcgcagtgagttaagattgcaccactgcactgcagcctgaggtgacagggcaaggccctgtctcaaaaaacaaaacaaacacacacaacattgtgcaaatattttttatcttggctagtcagaaaacttggcaatgccaggcttatatttctttttctttttctttttttgttttccttttgagacagagtctccctttgttgcccaggctggagtgcagtggtgcgatctcagctcactgcaacctccacctcctgtgttcaagagattctcccacttcagccttccgagtagctgggactacaggcatacgccaccacacccggctaatttttgcattttttggtagagataggttttgccatgttggccaggctggtctcaaactcctgacctcaagtgatctgcccgccttggcctcccaaagtgctgggaatacaggcgtgagccactgcacccagccaaggcttatatttcttctggaaagaatcagctagaggcctgaccctcgccagcattttccaggtgctctccagccacctggggctctcaggccctggagtgtagcctctggaggtggtgagaacacagactctggagtctgaccaacctcacttcacatatctgccctgctccttactacctatgtgattggtgttcagtaaattacctaaccctgctcagtttcctcatcaataacatgggggtaacagtagaaccaaccaactaatagagatgctctgagaataaaatgcattaagggtatggaaggtgctcagcatacagcctggaaagtgcttaccactccctaaacatttgctgctgccgctgctgctgctactattgtaaagataaggacagatgaagggaacatttgcacatcagacaaagaagtgtggacttaacacctctccttctccctctcccttccagagggcacgagacatccacttgacagtggagcagaggggttacccagatttcaacctcatcgtgaacccttatgagcccataaggaaggttaaagagaaaatccggaggaccaggggctactctggcctgcagcgtctgtccttccaggttcctggcagtgagaggcagcttctcagcagcaggtgctccttagccaaatatgggatcttctcccacactcacatctatctgctggagaccatcccctccgagatccaggtcttcgtgaagaatcctgatggtgggagctacgcctatgccatcaaccccaacagcttcatcctgggtctgaagcagcagattgaagaccagcaggggcttcctaaaaagcagcagcagctggaattccaaggccaagtcctgcaggactggttgggtctggggatctatggcatccaagacagtgacactctcatcctctcgaagaagaaaggagaggctctgtttccagccagttagttttctctgggagacttctctgtacatttctgccatgtactccagaactcatcctgtcaatcactctgtcccattgtctactgggaaggtcccaggtcttcaccagttttacaatgagttatcccaggccagacgtggtagctcacacctgtaatcccagaactttgggaggccgaggtgggaggagcgcttgagccgaggagttcaagaccagcctgggtatcatagggagaccccgtctctacaaaataaaaaaataattcactgggtgtggttgtgcacatttgtagtctcaggcactcaagaagctgaggcagaagaatcacttgagcccaggaggctgaagctgcagtgagctgtgatcacactgctacactcctgcccaggccacagagcaagaccctgtgtctaaaaactaaaacataaaaataagtaaatccgtttaaaaaaaggattatcccagccctgccagggggaggatgaggaggggtgtgaggactaaatatacaaataaatagtgtggtcacatgacgcacagcaacagaattcggacccacagccttctgcagcaatcaaccccaaaccatcaggacttgggcgataactggcagcatctctaactccccaccctactcccatcctgcttcctatttatgaccaacccaagaaacccaaataagctccccagaccaatcacatggttagccccacttctggtgagtgcacttccagcttccccataccaacagcctcaatcacggcatccctgaagccttcccattttcctgcctgtctttaaatctctgtcaaaagcgagagatgggtggctggttcctttgctatagcaagttgggaataaatcgcctttgttagttctcatttgggggctgtttatttccacagggcctaatgctgtcctaatggttattgcttgatcatttgagcttctcaactctaagaaatgaggactggggaaactgaggcaaaaagagacaaagaatgggagattgaggatgatgcagtgtaaaaaaaaatcacctcaactcctaaaacccatacacaaacagtacataatagtcaggaaactgtaggaaagtaatagcatctttattatcaaaggacgtcatgtgatcaggtttactccaagcaataaaaagtttccttttgcccccctgttttgcctagttttctggtgggctactctcctaccatagcatagaaaatgcacactgcaattggttatcaacagcctctggtcaatttagcaatcataatctgtgtatctcccacctctgtttgccttcagggacagaaaaagtgcctcctttccaggaggtagacaggctgttccagtccccatctttgtgtccttcataatgcccagcacagcccacattgtaggtggtgggaaaattcttgtttaaaataaaaaaaagaatgaaaaatgcaatgtcttagtccatctgggctgctaaaacaaaataccatacactggatggctcatgaacaataaccatttatttcttacagctctggaggctgggaagtccaagtcaagacactggcagatttggtgtctggtgaggacctcttcctgattcacagatggcagcttctcactaagtcttcacatggtagaagaggcaaaggtgtctctaggatcgcttctttttttttttttttttttttttgagatggagtctcgctctgtcacccaggctagagtgcattggcatgatctcagctccctgcaacctctgcctccgaggttcaagcgattctcctgcctcagcctcccgagtagctgggactacaggcacctaccactgtgcccagctaattttttttttatttttagtagagacggggtttcaccatcttggccaggctagtctcgaactcctgaccttgtgatccacctgtcttggcctcccacagtgctgggattacagttgtgagccaccatgcctggcctctggggtctcttttatgaaggcattgatccagttcatgagggctcaggacccattatgtaattgaaagattctccgtggggcctgaaagcttaagagaatgaatgacccctccctcccctccctccttgggcccggtcccaaggcgcaaggccactcgcgccagcagcatgtgtcagcaagatagcagaagcgggaagagagcgggccagaagacacctaccccctgaagaccgagagagacgtcatccgggtacaatgtagcggttacaacagactgagaaacttcctgtttacaggagactacaaaacccctgccccgtcctcatttggtgctgacgccattttaagcctcagcccacctgcacacacactgcctcatgttgtctgttggccacgctcttggggttcgaaccaacacaagaccctttcactaattacttcccagaggtcccacctcctaataccatcaccttgggagtaaggactttttggaaattatcagtatcaaaatggagtcacttatgtcaaaccctaacaaatgcctgtcacaaaaattatctcaagaagttcctaaaatccgcagtattatagataaaccacttgcataagaatatttgcctaacagtgggtgtctccacaataagctaaagccaactcctgcaacaggctcctgtgatcaacggtacttgttttaaagaagcttatgtggactttgtcttttctcgttgccacaacctcttttaatgtgcctatagtccactatagcatgcatatctcaaattgcaattccttgcaattctggaataaacgctttattttggagagtcagtctctctgttatttattttacggtgtcaattttaacatatgaattttggaggaacacattcagaccatatcagtcaccttcctcttctttgaaatagaaaaagctcaaggccagagagtttattttagtaaagttttgacatacctgtcttcaaagataaaacatgaaacagcattccacacacaaaagtaaagtgattttgttcatccttcactgtgaggtattttaaccacagagattctaattttttggtcttggatgggtcctgggagtcagtattgcctggctaatttttgtatttttagtagagatggggtttcaccatgttggtcaggctagtctcgaactcctgacctcatgatctgcccgcctcggcctcacaaagtgttgggattacagatgtgagccaccgtgcccggacaggattctgcatttctcttttttttttttcgagacagagtctcagtctgttgcccaggctggagtgcagtggcacgatcttggctcacctcaacctccacctcccaggttcaagtgattttcctgcctcagcctcctgagtagctgggactacaggtgcgtgccaccatgcccagctaatttttgtatttttagtagagatggggtttcactatgttggccaggctggtctcgaactcctgaccttgtgatctgcctgcctcagccccccaaagtgttgggattacaggcgtgagccaccgtgcccagcctggattctgcatttctaacgagctcccaggtgttaccaatgctgctggctcatggactacactcttaagtagtaaggccctaggctattaaaggaaatacagattcctggattccacctatcagagattctgattctgttagtattttctgtgagacccaaaagtctgcagtttaaccagctctctaaggtgtttcttaggcccaactggactgggaaattactagaataaatgacatggaatcaaaacctgggaactaatcctgggtctgtcattaactccttaggagattcccatcccctctggagatctgtcatcaagaaatgattggagaagttaatctcttaggcccttctagctcttgcctttgagaaccgcccacctccccattcccacctggtatccccaacccagtacagttcatggccaatggcggtccaagtcttggaactacaatccccacaatgcctcgcgcctctcctctcacgtgacgtcatgaaggaggcttgataacggcggtgttctccacaatcctttgcggtggttcaagatggcggcgcccagtggcactgtgagcgattcggaaagtagtaacagcagtagcgatgcggaggagctggagcggtgccgcgaggcggcaatgccggcttggggcttggagcaacgcccgcacgtggcagggaagccaagagccggtagggtactatgtttggggagactggctgaggggcgtgggatcttcccctggagcctgagaggatggatggtgaggagagagtcactgggactcggcttccttccccgagagacctccagggactgggtgtagtgcagattgaaagcatgggcaggtgcagtagggagggtatttcattattccagtcggggaagctgaggtacccaaatgtcttttgattctgcctccttgggtctatcctcactgccccacactgggaaggctgccgtctcttcgagataactgcaacagccccctcccggtattctcgcacccagcctttccccacctccaacacattctcccaccctggaggttgttgccaagagcagtgcccagcacatcactctgaccgtgactccctagtgccctgggaataaatacagagccccgcaacatcaaggggcctaatcatggatagaacccaagggttcttgaatttggaatgaaaacatgttgcatctttgctttctattcatctctgactgaattttagcatctctttccgtcttgcaagcactaagccacagtagttctggcaatgccgttactttatcccaacagaagtcacagattttcatatctcattacaatctttgcagatacagatatcaatatatcattttattgataaaaagatattggggaaaaaagtcatttacactcatccctgatttaaaatgtgccactctaatttttagacccatctctatatctaagatgtaagaagcacatacatcacaagtttggttgtttactatcatgataattaaatttcggtatcattggttttctttgtaatcctgtatgttgcatttcatgcatttaaaacattgctctgagaagagaaccgggcttcaccaggctgttagagaaggctatggcaaagcaaggttaagaaccgctggatttgtttaaaaggacttacaagccctttggtgatccattgccttcctctcccttccttccctcctgccatactgcacttcctgtaggtagcttccagaccatagtctgcccctctcaccccctagtaccataaccacagttttctctgcaagttctatttacagatctgcctttccatctcattagcggtgggaacttgagcaaagtacttaaatctcactgtacctaaatttcctcatctgtacagtgcgggtagtgatagtacccaccccataaggttgagaagtaactgagataatgcaatctacagtgcttggcacatcttaaaggcccaatacatggtggcaaatatgtggttggtctttccacatggactgctttcctcctcctgcctaattctcgctcttttttttttcaaaactaggactcagtctgttaccgaggctgacacaatcatggctcactgcaacctcgacctccccctactcagatgatcctcccacctcagcctcccaagtagctgagactacagatgtatagtcccagctactttttgtattttttgtagagatggggttttgccatgttgcccaggctggtctcgaactcctgggctcaagtgatcctcccttctcaaccttcaaagtgctgagattacaggtgtgagccactgtgctcggcttctagttttttttgtttgtttgtttgttttttggggttttttttttttttgcatttttttttttttgagatggagtttcactcttgttgcccaggctgcagtgcaatggcacgatctcagctcactgcaacctctgcctcctgggttcaagtgattctcctgcctcagcctccctagtagctgggattacaggcgcctgccaccacgcccagctaattttttgtatttttagtacagacagggtttcaccgtgttggccaggctggtctcaaactccagacctcaggcaatccacctgcctcggccttccaaagtgctgggattacaggtgtgagccaccgcgcctggtctctttttttctttttgagacgcagtctcgctctgttaccaaggctggagtgcaatggcgcgatcttggctccctgcaacctccgcctcccaagctcaagcaattctcctgcctcagcctcctaagtagctgggattacaggtgcccaccaccaggcccagctaatttttttttatatttttattagagacagggtttcaccgtgttggccaggctggtctcgaacttatgacctcaggtgatccgcccaccttggcctcccaaagtgctgagattacaggcatgagccaccacacccagcctagattacattcttgagtgcgtctagtaatagccaccaggagttgagaattttctttttgcccctgttctaaacactttgtatttgttgtctgttttcatcttcccagcaatgccacaagagggtgtattagccccattttacagaaaactgattctcataatggtaaaataacttggccaaggttgtccaatttgtgagtggcagaaccaggcgtaaacccaggcctacctgactcccaagtccatgctcttcattgctgctgtgccactctgccatggacaagtgtctattgtggtcaaaactcccaccctttggtccatgactgtggaaatataggtcactattttatttatgtaacctctagagacagctcttaaatccagtgatgaactcgtcactcaaaccactttaattttagggtggcatctactttgacttatttttctgacaattaattcaaaccaagacactatggcaggatctggggatacagaggtaaaaagaggcagaccacgtattcaagtagcttacaaatccaggaaggggatgggtatggaaacagcgtccacaacactgactccagaaggttggtaatcgtattcccattttatagatgagaaaaacaaaggctcagggagagaaagtgacttgcccggcatcacacagcttggtggcagagccaggactcaactgaactgtctccctctgtaatactgtttctgttccctgacggtacctcaccttcatcacactgtagtcatgatggaagagatgctcttcttccaagtgattatgtgctgaagacgaaagaccaggtctttaaagactgtccatccaggcccccacattacccacctccaggagcatggggcgtgtttagcattctgtgttgtgctctggagtacagtgacacagaccacaaggtactaggacacagatgcaatgtgtatgggtgatgacataaacacagcagtgcccccatggagctgtttcttacaccatggccctccactgggcccggagctaccaagtgtccactttgttcagttggccccttaaatatacaagcacgttttgtcttgttagttaagtcagaaacctcagagctaactttcactcatttctcacgccctgtagtcagtccatcagtgaatcctattgactccatctttttttttttttttttttttttttagacggagtcttgctctgtcaccaggctggagtgcagtggcgtgatcttggctcactgcaacctccgcctcctgggttcgagcgattctcctgcctcagcttctcaagtagctgggactacaggcgtgcaccaccacacccagctaatttttgtattttttagtagagatggggtttcaccatgttgaccaggatggtctcgatctcttgacctcgtgatccgcctgcctcagcctcccaaagtgctgggattacaggcgtgagccaccgcgcccggccttgactccatcttaaaagtgcatctatctggagttcacccacttctcaccacatcaattactgcagcagactccgtgttcctgcctttgccccaacagtctcacgctgcacagcagccaaagatgttctgtcaaaacccaggtcagtttatgtcccttctctgctcatttccagagctcctcctcctcaaagtccaggtcctcccattggcccacgtcagggcccttcatgatctggcccctctgagttctccatctctgctgctcccggtttactgggcaggctctggtcacactgacctccttgctggttctaaacacacaaagcaggctccagtctcagggcctttgcagatgctttccctctgcctggaaggctgtgtcccacatgtccacttggttcactccctctcctctctcaaatctctgttcaaatgttgccttatcagtgaagccctctctgcccacctttatgttaacaatccccagcccaacactccccacctctctcgcctactttgtttccgtttttttccatacacttagcattatccaacttgacattttgtttacgtatgtgtgtttatcatctctctccaccaactagaatgtaagctcctgcagacagtgatagtcgagtaagttgctcagcaatgacaacacctggttaataaaaggcattcagtatctggtttgagggaatgaccaaaaggccgggcatccccaccgttttggcttgaaaaatgtgatccacaaaagagccatcttctctctcttccacggcacttagcacacagccaggcaggcattaaactgtgcagtcaaatcacacttagacctgcctgttcagcacagcgtggtggttaagagggggctcaggagtcagatggcctgggcccccagcccaaccctgtcacttattaggtatttgactctggccaagttattttacatatctttgacgtttcttctgcaaaatgggataattgtaatccctccaatcgggttgttgggaagattcactgagttatatgtgttatatatattttaagttacatatataactattttaagttttatgtatatataactaagttatatatataactattttaagttttatatatataactaagttatatatatattttaagttatataactaagatatatatatatataatgtacttacataaaatatgtaactatattatatacatatataactaaattatatgtaactatttgaagttatgggtatataactattttaagttatatataaatataatatatatgagttacatgtgtatgtatatatatgagttatatgtattttaagctgctgaaaatagtgcctggcacgcatttgttgttgctgtcattgtttcctctataaatgccctaattttcatttttccacaggtgctgcaaatagccagttgtcaacctcccaaccgagcctcaggtactatgcactttgggttcaagtttcacttattcaacaaatactgatcccctgcgtgtgccagatgctaggcttcacgcctggcatttccaggtgaacaagacacacatggtccctgtgctcatggggacagcttctgagcgggcaggaagtgaggtctctttgtgtgtgtcgtaggcataaggtgaatgagcatgaacaagatggcaacgagcttcagaccacccctgaattccgagcccacgtagccaagaagctgggagccctgctggacaggtaaacaaaggtggagtttctcctctcttgcccttgttaatatgaacagcaatggctcacattggctgggagctcacggtgtccaggctggcacggtggcaggcacctggcatatgtcatctccctgcatttataaagaacattatcatgtgggtcctgttgttacctttatcctccaggtgaggaaacaggctgtcagcaaggagacaggtgtgcctgaagtcacatcatcatcgcagctaccatttactgagcaactgtttgtggccaggctctgtgctaagtgcttgatgtccattttctcatttaatccttctgatgaccctgagaggtagggactgttatcattcccactgtacagatgggtaactgaggctcagagaggcaaagtcatttgcccaggggacaccgctattaagtgacaaagccaggattcagaacccaggagggaacagaattgggcctcaaacccaagtgcgtctgactccaagcccacatttttttgttttgttttgttttttgagacagagtctcact

SEQ ID NO: 100 - DNA, 1582 bp, Homo sapiens
cgggacagagatggcactgatgcaggaactgtatagcacaccagcctccaggctggactccttcgtggctcagtggctgcagccccaccgggagtggaaggaagaggtgctagacgctgtgcggaccgtggaggagtttctgaggcaggagcatttccaggggaagcgtgggctggaccaggatgtgcgggtgctgaaggtagtcaaggtgggctccttcgggaatggcacggttctcaggagcaccagagaggtggagctggtggcgtttctgagctgtttccacagcttccaggaggcagccaagcatcacaaagatgttctgaggctgatatggaaaaccatgtggcaaagccaggacctgctggacctcgggctcgaggacctgaggatggagcagagagtccccgatgctctcgtcttcaccatccagaccagggggactgcggagcccatcacggtcaccattgtgcctgcctacagagccctggggccttctcttcccaactcccagccaccccctgaggtctatgtgagcctgatcaaggcctgcggtggtcctggaaatttctgcccatccttcagcgagctgcagagaaatttcgtgaaacatcggccaactaagctgaagagcctcctgcgcctggtgaaacactggtaccagcaggcccatcatcctggatccggccgaccccaccctcaacgtggcagaagggtacagatgggacatcgttgctcagagggcctcccagtgcctgaaacaggactgttgctatgacaacagggagaaccccatctccagctggaacgtgaagagggcacgagacatccacttgacagtggagcagaggggttacccagatttcaacctcatcgtgaacccttatgagcccataaggaaggttaaagagaaaatccggaggaccaggggctactctggcctgcagcgtctgtccttccaggttcctggcagtgagaggcagcttctcagcagcaggtgctccttagccaaatatgggatcttctcccacactcacatctatctgctggagaccatcccctccgagatccaggtcttcgtgaagaatcctgatggtgggagctacgcctatgccatcaaccccaacagcttcatcctgggtctgaagcagcagattgaagaccagcaggggcttcctaaaaagcagcagcagctggaattccaaggccaagtcctgcaggactggttgggtctggggatctatggcatccaagacagtgacactctcatcctctcgaagaagaaaggagaggctctgtttccagccagttagttttctctgggagacttctctgtacatttctgccatgtactccagaactcatcctgtcaatcactctgtcccattgtctactgggaaggtcccaggtcttcaccagttttacaatgagttatcccaggccagacgtggtagctcacacctgtaatcccagaactttgggaggccgaggtgggaggagcgcttgagccgaggagttcaagaccagcctgggtatcatagggagaccccgtctctacaaaataaaaaaataattcactggg

SEQ ID NO: 101 - protein, 253 aa, Homo sapiens
MALMQEKTPASRLDSFVAQWLQPHREWKEEVLDAVRTVEEFLRQEHFQGKRGLDQDVRVLKVVKVGSFGNGTVLRSTREVELVAFLSCFHSFQEAAKHHKDVLRLIWKTMWQSQDLLDLGLEDLRMEQRVPDALVFTIQTRGTAEPITVTIVPAYRALGPSLPNSQPPPEVYVSLIKACGGPGNFCPSFSELQRNFVKHRPTKLKSLLRLVKHWYQQAHHPGSGRPHPQRGRRVQMGHRCSEGLPVPETGLLL

SEQ ID NO: 102 - DNA, 1434 bp, Homo sapiens
cgggacagagatggcactgatgcaggaactgtatagcacaccagcctccaggctggactccttcgtggctcagtggctgcagccccaccgggagtggaaggaagaggtgctagacgctgtgcggaccgtggaggagtttctgaggcaggagcatttccaggggaagcgtgggctggaccaggatgtgcgggtgctgaaggtagtcaaggtgggctccttcgggaatggcacggttctcaggagcaccagagaggtggagctggtggcgtttctgagctgtttccacagcttccaggaggcagccaagcatcacaaagatgttctgaggctgatatggaaaaccatgtggcaaagccaggacctgctggacctcgggctcgaggacctgaggatggagcagagagtccccgatgctctcgtcttcaccatccagaccagggggactgcggagcccatcacggtcaccattgtgcctgcctacagagccctggggccttctcttcccaactcccagccaccccctgaggtctatgtgagcctgatcaaggcctgcggtggtcctggaaatttctgcccatccttcagcgagctgcagagaaatttcgtgaaacatcggccaactaagctgaagagcctcctgcgcctggtgaaacactggtaccagcagaagggtacagatgggacatcgttgctcagagggcctcccaagggcacgagacatccacttgacagtggagcagaggggttacccagatttcaacctcatcgtgaacccttatgagcccataaggaaggttaaagagaaaatccggaggaccaggggctactctggcctgcagcgtctgtccttccaggttcctggcagtgagaggcagcttctcagcagcaggtgctccttagccaaatatgggatcttctcccacactcacatctatctgctggagaccatcccctccgagatccaggtcttcgtgaagaatcctgatggtgggagctacgcctatgccatcaaccccaacagcttcatcctgggtctgaagcagcagattgaagaccagcaggggcttcctaaaaagcagcagcagctggaattccaaggccaagtcctgcaggactggttgggtctggggatctatggcatccaagacagtgacactctcatcctctcgaagaagaaaggagaggctctgtttccagccagttagttttctctgggagacttctctgtacatttctgccatgtactccagaactcatcctgtcaatcactctgtcccattgtctactgggaaggtcccaggtcttcaccagttttacaatgagttatcccaggccagacgtggtagctcacacctgtaatcccagaactttgggaggccgaggtgggaggagcgcttgagccgaggagttcaagaccagcctgggtatcatagg

SEQ ID NO: 103 - protein, 173 aa, Homo sapiens
MGHRCSEGLPRARDIHLTVEQRGYPDFNLIVNPYEPIRKVKEKIRRTRGYSGLQRLSFQVPGSQLLSSRCSLAKYGIFSHTHIYLLETIPSEIQVFVKNPDGGSYAYAINPNSFILGLKQQIEDQQGLPKKQQQLEFQGQVLQDWLGLGIYGIQDSDTLILSKKKGEALFPAS

SEQ ID NO: 104 - DNA, 1824 bp, Homo sapiens
cgggacagagatggcactgatgcaggaactgtatagcacaccagcctccaggctggactccttcgtggctcagtggctgcagccccaccgggagtggaaggaagaggtgctagacgctgtgcggaccgtggaggagtttctgaggcaggagcatttccaggggaagcgtgggctggaccaggatgtgcgggtgctgaaggtagtcaaggtgggctccttcgggaatggcacggttctcaggagcaccagagaggtggagctggtggcgtttctgagctgtttccacagcttccaggaggcagccaagcatcacaaagatgttctgaggctgatatggaaaaccatgtggcaaagccaggacctgctggacctcgggctcgaggacctgaggatggagcagagagtccccgatgctctcgtcttcaccatccagaccagggggactgcggagcccatcacggtcaccattgtgcctgcctacagagccctggggccttctcttcccaactcccagccaccccctgaggtctatgtgagcctgatcaaggcctgcggtggtcctggaaatttctgcccatccttcagcgagctgcagagaaatttcgtgaaacatcggccaactaagctgaagagcctcctgcgcctggtgaaacactggtaccagcagtatgtgaaagccaggtcccccagagccaatctgccccctctctatgctcttgaacttctaaccatctatgcctgggaaatgggtactgaagaagacgagaatttcatgttggacgaaggcttcaccactgtgatggacctgctcctggagtatgaagtcatctgtatctactggaccaagtactacacactccacaatgcaatcattgaggattgtgtcagaaaacagctcaaaaaagagaggcccatcatcctggatccggccgaccccaccctcaacgtggcagaagggtacagatgggacatcgttgctcagagggcctcccagtgcctgaaacaggactgttgctatgacaacagggagaaccccatctccagctggaacgtgaagagggcacgagacatccacttgacagtggagcagaggggttacccagatttcaacctcatcgtgaacccttatgagcccataaggaaggttaaagagaaaatccggaggaccaggggctactctggcctgcagcgtctgtccttccaggttcctggcagtgagaggcagcttctcagcagcaggtgctccttagccaaatatgggatcttctcccacactcacatctatctgctggagaccatcccctccgagatccaggtcttcgtgaagaatcctgatggtgggagctacgcctatgccatcaaccccaacagcttcatcctgggtctgaagcagcagattgaagaccagcaggggcttcctaaaaagcagcagcagctggaattccaaggccaagtcctgcaggactggttgggtctggggatctatggcatccaagacagtgacactctcatcctctcgaagaagaaaggagaggctctgtttccagccagttagttttctctgggagacttctctgtacatttctgccatgtactccagaactcatcctgtcaatcactctgtcccattgtctactgggaaggtcccaggtcttcaccagttttacaatgagttatcccaggccagacgtggtagctcacacctgtaatcccagaactttgggaggccgaggtgggaggagcgcttgagccgaggagttcaagaccagcctgggtatcatagggagaccccgtctctacaaaataaaaaaataattcactggg

SEQ ID NO: 105 - protein, 510 aa, Homo sapiens
MALMQEKTPASRLDSFVAQWLQPHREWKEEVLDAVRTVEEFLRQEHFQGKRGLDQDVRVLKVVKVGSFGNGTVLRSTREVELVAFLSCFHSFQEAAKHHKDVLRLIWKTMWQSQDLLDLGLEDLRMEQRVPDALVFTIQTRGTAEPITVTIVPAYRALGPSLPNSQPPPEVYVSLIKACGGPGNFCPSFSELQRNFVKHRPTKLKSLLRLVKHWYQQYVKARSPRANLPPLYALELLTIYAWEMGTEEDENFMLDEGFTTVMDLLLEYEVICIYWTKYYTLHNAIIEDCVRKQLKKERPIILDPADPTLNVAEGYRWDIVAQRASQCLKQDCCYDNRENPISSWNVKRARDIHLTVEQRGYPDFNLIVNPYEPIRKVKEKIRRTRGYSGLQRLSFQVPGSQLLSSRCSLAKYGIFSHTHIYLLETIPSEIQVFVKNPDGGSYAYAINPNSFILGLKQQIEDQQGLPKKQQQLEFQGQVLQDWLGLGIYGIQDSDTLILSKKKGEALFPAS

SEQ ID NO: 106 - DNA, 1527 bp, Homo sapiens
cactgatgcaggaactgtatagcacaccagcctccaggctggactccttcgtggctcagtggctgcagccccaccgggagtggaaggaagaggtgctagacgctgtgcggaccgtggaggagtttctgaggcaggagcatttccaggggaagcgtgggctggaccaggatgtgcgggtgctgaaggtagtcaagggccttctcttcccaactcccagccaccccctgaggtctatgtgagcctgatcaaggcctgcggtggtcctggaaatttctgcccatccttcagcgagctgcagagaaatttcgtgaaacatcggccaactaagctgaagagcctcctgcgcctggtgaaacactggtaccagcagtatgtgaaagccaggtcccccagagccaatctgccccctctctatgctcttgaacttctaaccatctatgcctgggaaatgggtactgaagaagacgagaatttcatgttggacgaaggcttcaccactgtgatggacctgctcctggagtatgaagtcatctgtatctactggaccaagtactacacactccacaatgcaatcattgaggattgtgtcagaaaacagctcaaaaaagagaggcccatcatcctggatccggccgaccccaccctcaacgtggcagaagggtacagatgggacatcgttgctcagagggcctcccagtgcctgaaacaggactgttgctatgacaacagggagaaccccatctccagctggaacgtgaagagggcacgagacatccacttgacagtggagcagaggggttacccagatttcaacctcatcgtgaacccttatgagcccataaggaaggttaaagagaaaatccggaggaccaggggctactctggcctgcagcgtctgtccttccaggttcctggcagtgagaggcagcttctcagcagcaggtgctccttagccaaatatgggatcttctcccacactcacatctatctgctggagaccatcccctccgagatccaggtcttcgtgaagaatcctgatggtgggagctacgcctatgccatcaaccccaacagcttcatcctgggtctgaagcagcagattgaagaccagcaggggcttcctaaaaagcagcagcagctggaattccaaggccaagtcctgcaggactggttgggtctggggatctatggcatccaagacagtgacactctcatcctctcgaagaagaaaggagaggctctgtttccagccagttagttttctctgggagacttctctgtacatttctgccatgtactccagaactcatcctgtcaatcactctgtcccattgtctactgggaaggtcccaggtcttcaccagttttacaatgagttatcccaggccagacgtggtagctcacacctgtaatcccagaactttgggaggccgaggtgggaggagcgcttgagccgaggagttcaagaccagcctgggtatcatagggagaccccgtctctacaaaataaaaaaataattcactggg

SEQ ID NO: 107 - protein, 267 aa, Homo sapiens
MGTEEDENFMLDEGFTTVMDLLLEYEVICIYWTKYYTLHNAIIEDCVRKQLKKERPIILDPADPTLNVAEGYRWDIVAQRASQCLKQDCCYDNRENPISSWNVKRARDIHLTVEQRGYPDFNLIVNPYEPIRKVKEKIRRTRGYSGLQRLSFQVPGSQLLSSRCSLAKYGIFSHTHIYLLETIPSEIQVFVKNPDGGSYAYAINPNSFILGLKQQIEDQQGLPKKQQQLEFQGQVLQDWLGLGIYGIQDSDTLILSKKKGEALFPAS

(The sequence listing continues in the following parts.)
